United States Patent Application Publication US 2008/0220983 A1 - sequence listing, part 4

SEQ ID NO: 7910 - DNA, 1510 bp, Homo sapiens
accccggcgccgcccaaccgcgcccctcgcgccttttggggctctcctgctgggcgcgggtggggtttgtgggtttttttccacctcttttctcccaatcggactccggccaaactcccctagacagatgggtgacctgtctcctttgagaggatgctgaggcatctgtagcagctgtttcaaacaccaatgtcacctctcctcctggcccccgcccaatggggagaggaatttggggccctactctggggaccacctttcacccgtttgtactttctgggccacgccgacccctgggtcgcttgatgtaaaagccaaaagctgctgcctcccacttggatcatgtcgcctgggattttcatccctcgcacaaggactacgggttcacacggtgaactgggggaagggaagtgttagggggcaagtcgcggcacccccccttccataaactcacgtcctaacccccaggacctcagaagatgatctgatttggaaataggatcattacagatggaattagttcagatgatctcatcttggagtagggtgggccccaattcaaggactggggtccttaaaaaaagggggcctggggcagggcgcggtggctcacgcctgtaatcccagcactttgagaggctgaggcgggcggatcacgaggtcaggagatcgagaccatcctggctaacacggtgaaaccccatctctactgaaaatacaaaaaattagctgggcatggtggcacatgcctgtagtcccagctactcgggaggctgaggcaggataatcacttgaaccaggaggaggaggttgcagtgagccgagattgtgccactgcactccagcctgggtgacagagcaagactctgtctcaaaaaaagaagcgggggagtgggggattgaggccacgtgcagtggctcactactctaattccagcactttgggaggccgaggcaggaagattgcttgaactcagaagttcaagaccagtctgggcaacatggtgagaccctcgtctctacaaaaaaaaaattatcgtggtgggccgggcgtggtggctcacacctgtaatcccagcactttgggaggctgaggcgggcagatcacaaggtcaagagatcgagaccatcctggccaacatggtgaaaccccgtctctactaaaaatacaaaaattagccgggcatggtgttgcgtgcctgtagtcccagctacttgggaggctgaggcaggagaatcgcttgaacctgggaggcgcaggttgcagggaggcggaggttgcagtgagccgagattgcaccactgcacttcagcctggtgacagagcgagactcgtctcaaaaaaaaaaaaaaaaaaaaaaaaaaaagtgactgtggtggtgcacacgtataatcccagctacttgagagatgacgagggaagatcacttgagcccaggagttaagaggctgcagtgaccgatgatcatgccactgcactccagcttgggtgagagtgggactctgtctt

SEQ ID NO: 7911 - DNA, 215 bp, Homo sapiens
acctgggatattgtgtctgcagcacatagtccaattattttcatgttatctactgacaggtctatttgtctccctgttacactgtgagctccgtgagggcagaaacaatgttagtattttcactgctgtgtccccagcgcctggtccggggcccggcacacagcaggcatataataagcatgtgttgaatcaataaaggcatcaaagaataaacc

SEQ ID NO: 7912 - DNA, 1693 bp, Homo sapiens
cctgcccagaacgcctgcaccctcacctctcccctctcctgctgagatgggggaaatccggctgcggcatagcagatgctcgttcttgcctccttcaggcaccaatcaggagaagggttctgcctcccatcccctctacctgcagacagggtcggaggtgttagcgagcctttggtgctagaagcctgcggggtcatgtgctaagaggacagtctttctccgggagcccgctcactcattctgagttaggaaaagacacaagaccttccccacatcctgtctgcctgggttagggaggcctttgccttgttacctagaggcggagggactgaagccattgcgttccttccctgctagaaacacaggaagaagttgaggactgtctgccttccctcgtccctttacctggccagataactccagccgctgaatacagtgttaggactgggggctcctgagatgagagtttgagattcagggaatgagaccacctctcatttcttccagcatgatcgcgccctgctcccgtgccaccgtagtccctggcagacaggcagggctctgcccagggcagcctgccacttgcatagctttcggttggtttggtgttctgtttatttaataagtgggcaggttgcaagcgttgcacagaaattctgagattttactgcctttttttttttttttaagaaagttgtttgttggactccataagtgaatttcaagcagtgaggattttgtggtgcctgagatggccgagggcacagggagtgagctgtatgtgtgaggaatttggtgagcgagataaaagtccacggtgtcaacccctaaaacatgggtgaccgtacatttttatacatctccactctacggccttttacaggctttccgattttacaggcctttccaagtttccattctccttagagagagaactgtgcttccaaacagaaatcaggagtgaccacaaagcctgaaaacactttgccacccagcaaagaactggcacaattggtttgggtctgcattgccatagtgcccgagttaaaactgcaggccactctgccttgcagtggcctctgatttcattgtgggtgcatccacaggtggcccgagctgttctttcagctgctccaaggattgagacccaagtcatcatgaaaaaggcccaagtacagtcttaatgcgataaatccactagctaagacgtcgagtgccaagaccagccttccagccgaggtttggacaaagtctcaggttcccgtgactcagggtaaggtgctggggctgccagaggacctgccccagcaagatttttgtcaagagcgagactccatcagcccaggcagacgggagcaggttcttggccagcgtagacagcagcaaacagcagcagggaagccattctcactgcatcctccctgcagtagccacggccaggcccttaggaggagcagtgaccgggggtgtccagaaatatcctgtccctggatggaaactaggtctcgtttggatttttttttttttttgccgtgttaggaaattatttattaatttacaagacaggttttaactcagccgaggtgggaaatggtgtccctgtccctcccaaagcacagagcacagaaatgaggccgtttacatggcgagtctccgtgctggtgtttaagtcattaaaaagatactcaaagag

SEQ ID NO: 7913 - DNA, 1350 bp, Homo sapiens
tctccaagcacttctcgacaggcgttttgctgaaaacgtgtcggagggctcgttcatcggcactgattttgttcttagtgggcttaacttaaacaggtagtgtttcctccgttccctaaaaaggtttgtcttcctttttttttttatttttatttttcaaatctatacattttcaggaatttatgtattctggctaaaagttggacttctcagtattgtgtttagttctttgaaaacataaaagcctgcaatttctcgacaaaacaacacaagattttttaaagatggaatcagaaactacgtggtgtggaggctgttgatgtttctggtgtcaagttctcagaagttgctgccaccaactctttaagaaggcgacaggatcagtccttctctcgggttctggcccccaaggtcagagcaagcatcttcctgacagcattttgtcatctaaagtccagtgacatggttccccgtggtggcccgtggcagcccgtggcatggcgtggctcagctgtctgttgaagttgttgcaaggaaaagaggaaacatctcgggcctagttcaaacctttgcctcaaagccatcccccaccagactgcttagcgtctgagatccgcgtgaaaagtcctctgcccacgagagcagggagttggggccacgcagaaatggcctcaaggggactctgctccacgtggggccaggcgtgtgactgacgctgtccgacgaaggcggccacggacggacgccagcacacgaagtcacgtgcaagtgcctttgattcgttccttctttctaaagacgacagtctttgttgttagcactgaattattgaaaatgtcaaccagattctagaaactgcggtcatccagttcttcctgacaccggatgggtgcttgggaaccgtttgagccttatagatcatttacattcaatttttttaactcagcaagtgagaacttacaagagggtttttttaaaatttttttttctcttaatgaacacattttctaaatgaattttttttgtagttactgtatatgtaccaagaaagatataacgttagggtttggttgtttttgtttttgtattttttttcttttgaaagggtttgttaatttttctaattttaccaaagtttgcagcctatacctcaataaaacagggatattttaaatcacatacctgcagacaaactggagcaatgttatttttaaagggtttttttcacctccttattcttagattattaatgtattagggaagaatgagacaattttgtgtaggctttttctaaagtccagtactttgtccagattttagattctcagaataaatgtttttcacagatag

SEQ ID NO: 7914 - DNA, 2084 bp, Homo sapiens
gacagctggccgctcaggcgaccctcagcccggcggggaggccatggcatgccccgggcgttcgcttgctgtgaattcctgtcctcgtgtccccgacccccgagaggccacctccaagccgcgggtgccccctagggcgacaggagccagcgggacgccgcacgcggccccagactcagggagcagggccaggcgggctcgggggccggccaggggagcaccccactcaactactcagaattttaaaccatgtaagctctcttcttctcgaaaaggtgctactgcaatgccctactgagcaacctttgagattgtcacttctgtacataaaccacctttgtgaggctctttctataaatacatattgtttaaaaaaaagcaagaaaaaaaggaaaacaaaggaaaatatccccaaagttgttttctagatttgtggctttaagaaaaacaaaacaaaacaaacacattgtttttctcagaaccaggattctctgagaggtcagagcatctcgctgtttttttgttgttgttttaaaatattatgatttggctacagaccaggcagggaaagagacccggtaattggagggtgagcctcggggggggggcaggacgccccggtttcggcacagcccggtcactcacggcctcgctctcgcctcaccccggctcctgggctttgatggtctggtgccagtgcctgtgcccactctgtgcctgctgggaggaggcccaggctctctggtggccgcccctgtgcacctggccaggggaagcccgggggtctggggcctccctccgtctgcgcccacctttgcagaataaactctctcctggggtttgtctatctttgtttctctcacctgagagaaacgcaggtgttccagaggcttccttgcagacaaagcacccctgcacctcctatggctcaggatgagggaggcccccaggcccttctggttggtagtgagtgtggacagcttcccagctcttcgggtacaaccctgagcaggtcgggggacacagggccgaggcaggccttcggggcccctttcgcctgcttccgggcagggacgaggcctggtgtcctcgctccacccacccacgctgctgtcacctgaggggaatctgcttcttaggagtgggttgagctgatagagaaaaaacggccttcagcccaggctgggaagcgccttctccaggtgcctctccctcaccagctctgcacccctctggggagccttccccaccttagctgtctcctgccccagggagggatggaggagataatttgcttatattaaaaacaaaaaatggctgaggcaggagtttgggaccagcctgggctatatagcaagaccccatcactacaaattttttacaaattagctaggtgtggtggtgcgcacctgtggtcccagctactcgggaggctgtggtgggaggattgcttgagtccaggaggttgaggctgcagtcagctcagattgcaccactgcactccagcctgggcaacagagcgagaccctgtctccaaaaaaaaaaaaaagcaatgtttatattataaaagagtgtcctaacagtccccgggctagagaggactaaggaaaacagagagagtgttacgcaggagcaagcctttcatttccttggtgggggaggggggcggttgccctggagagggccggggtcggggaggttggggggtgtcagccaaaacgtggaggtgtccctctgcacgcagccctcgcccggcgtggcgctgacactgtattcttatgttgtttgaaaatgctatttatattgtaaagaagcgggcgggtgcccctgctgcccttgtcccttgggggtcacacccatcccctggtgggctcctgggcggcctgcgcagatgggccacagaagggcaggccggagctgcacactctccccacgaaggtatctctgtgtcttactctgtgcaaagacgcggcaaaacccagtgccctggtttttccccacccgagatgaaggatacgctgtattttttgcctaatgtccctgcctctaggttcataatgaattaaaggttcatgaacgctgcg

SEQ ID NO: 7915 - DNA, 75 bp, Homo sapiens
agatctagggcagggaggggggtgcaatgaggaatgtttctggtctgaaaagaataaagtgggtttgaaagcgga

SEQ ID NO: 7916 - DNA, 186 bp, Homo sapiens
gtacttggaatcctgtgtcctgtctcgtggcaacaaggctatgttctgttaggagttaccttaaactgtgtaaaaatatttttttttaatctgctgccatattgtagctcaatacaatgtgaatttgtttttcgttttggggttttttttttttgtaataaatgtgtttccgttcacatacccttt

SEQ ID NO: 7917 - DNA, 576 bp, Homo sapiens
gcaccggggggtgcccctccagtcccagacggcaatgttcctccctccaactgtccctggagccagaacactcacagagacacccctgagagggtggccacagcccaagatgaagtcatcaagacagaaaagcaaaaccgagaaaaacgacgggcacctggaaccagtcacggcttgggaggtgcaggtgccccgtgttaggcgcctttgtcggggacttgcaaggcctcacctgtttggccatgattgatgacgtgactgcttccattttgcagatgaggaaactaaggctcagagaggccacgccacccttgagccacccatggacccctctccatctcctgcctgcgcctttaagtccctgatttattctttccattcattccatctgggaggaacccccccaactcctgccagcttcccctagctggggtctctggtactcttcacacctgcaggggcgtctacactgttcgtctacctggtggcagggtctgagcgggaggaggagggaaagagtgtgttctgagctggacccagcctcttgttcgagaataaaaactcttcttctcttgc

SEQ ID NO: 7918 - DNA, 44 bp, Homo sapiens
gcccctcccctgccctctccctgaaataaagaacagcttgacag

SEQ ID NO: 7919 - DNA, 54 bp, Homo sapiens
ggccggtccacagggtcccaaccccttgtcttcaaataaagtataatgtaacat

SEQ ID NO: 7920 - DNA, 150 bp, Homo sapiens
ccctacctcactcggccggcgcggcggccactccccccgcctcgacggcaccactggccggccccgcgaaagactgcgcgtgcgtagagcacgccggcgcggccccgggactctcgcgataactgtactgagataaagtgtggcaactcg

SEQ ID NO: 7921 - DNA, 1108 bp, Homo sapiens
gcccggaatgcagattacagaatggagacagaaagccactgctgtcagtgtccttgggagtcaccagcaccctgcagggggaccctacggcagagccaaagtcctgtctaagcatcagaacaggctgaacagtcaaaaagttttcaaataggcccacaggccaggtgcagacgtttaacccagacagaagtgttcttgtttgtttttaagctttgaatcagtcacccttgctaaaaacctggcaatgcaaacacaaagatctggatttctggcaagacttggccaagcttgcctggagttcagggcaccctctttagccagggtgtgagtttctgttttttgtttttttttttttaagacagagtcccactctgtcgccctggctggggtgcagtggtgcgattttggctaactgcaacctccgcctcccaggttcaagcgattctcctgtctcatccttcagagtagctgggattacaggcgcccaccaccacacccggatattttatatttttggtagagaccggggaggggagggggtttcaccatgttgaccaggctggtctcaaactcctgaccttaggtgatccacccgcctcggccttcgaaagtgctgcagttataggtgtaagccaccgcgcccggccctagcctagcttttgtagcatgcaactgtctcctttttatacgccctaaagaatatatttttgaactccttgtttctgcgctgtccttcttagcccaggacattcagggtgctttgcttgttgtcaaaccagggaaaggagaaaactcctgtgcctttctgggccagcctgtcaccctggcctggtcggcagccattcccctacctcctcactcaggaactgtcacaccaggaaccggcgaggggcacagcctgtttcagaccagaaaggtcggaggccacccacggccttcaggatggcgcccgcctgcctgcctggcaacagtgacccctcagtgcagtaacaatgggcccattttctcctctggatgaacaaggaggggggttgtttgtacaaaggaaaggcaggctggggcctgtctgtgctcaagaataaaccggatgatttcctggcctgggggc

SEQ ID NO: 7922 - DNA, 553 bp, Homo sapiens
gcagctccggctcagccctgctgccctggcctgtcactccccacccctgccggagacctcccttccctgggccccttctctcctgggcagccacaccacagagcggggaggggcaggtgggggaatggaggctgcaggactggctagaccaggtccctgccggtccaccaggcggaggtgggacaaaggtcctaacaggagtcactggctcaggaccccagggagaaacgctctccccacccacgccatgctgaccagagatcttgcagcccctgtggatgcccccgccgaggtcccccgatccccgcacccggactgctgctccctgcccctcccttgcgggtcccccaggaagccaggtgaccccaggtgggaggctgtgtgtggaggccatcctggaaggaagtttagacctgcccaggtgtggagcgaggggcacaggggcatcctaacctcagaaactgaaataaagcctttgaaaaaaaaatctgtaaaacatcaacccccaatcagaagatggcaaatggggaataaaaatagcaggtaacatgtc

SEQ ID NO: 7923 - DNA, 434 bp, Homo sapiens
ccttcagcaggaagacctcattgcaataagtgaaatgctgctctaggtagaagctctccctgctgtttttaagaagccacattcctcattggtcagtttcttgattgttcgtctgttggagaggtgctccctagaagaacctgccatacgtttcaaagcaataaaatcactgtatatctttctaaggaccttcaagtcatgactccagggaagcctattgggaagtctactaaaaactgcctgatttacaagaaagacctgaacttgtgggctcccatttgatttttttctcctcaggggactcagacattagaaagaaaaagcctcacagatttgaagaactggacccccaaatcaactcacctgcctggaagcaactgggaaacccttccaataagtcctgataataaagcacttcagggtcccatgtcttg

SEQ ID NO: 7924 - DNA, 194 bp, Homo sapiens
gagctgggcctcctctccagaatcatgtggaggggccagaggcctgccagacccccagctgggccctgctcaccccttgttgctgggcttggaggggcctcttgaggaacttttaatttgcaggggtgcccgctatggacggggcattccagctgagacactgtgattttaaattaaatctttgtggtctttgc

SEQ ID NO: 7925 - DNA, 56 bp, Homo sapiens
cccccagctttctacagacaccagatttgtgaataaagttggggaatggacagcct

SEQ ID NO: 7926 - DNA, 545 bp, Homo sapiens
acgctggggcctgctgcagccaccaacactgcccaggactgcgggttgctggcttgtacaccgcagctgccaccgagacaccagcctctgatggctcaggaggacttgtggggagaggctgggggcacccatgtggtgggctctgtgcagcatgttgcctctgcttggctgtgcctgcagctcagggtgctggggctcgggacccacccccctgcttgcggaaccaacttttctctgtgtgtccagcaggccccacaaccccctctcctttctttcagttctcccatgcagccgaggcccgggcccctcaggactccaaggagacggtgcagggctgcctgcccatctaggtcccctctcctgcatctgtctcccttcattgctgtgtgaccttggggaaaggcagtgccctctctgggcagtcagatccacccagtgcttaatagcagggaagaaggtacttcaaagactctgcccctgaggtcaagagaggatggggctattcacttttatatatttatataaaattagtagtgagatgtaac

SEQ ID NO: 7927 - DNA, 856 bp, Homo sapiens
cgtccagcctgggtgcagcccacctggacagagtccgaatcctactccatccttcatggagacccctggtgctgggtccctgctgctttctctacctcaaggggcttggcaggggtccctgctgctgacctccccttgaggaccctcctcacccactccttccccaagttggaccttgatatttattctgagcctgagctcagataatatattatatatattatatatatatatatatttctatttaaagaggatcctgagtttgtgaatggacttttttagaggagttgttttgggggggggggggtcttcgacattgccgaggctggtcttgaactcctggacttagacgatcctcctgcctcagcctcccaagcaactgggattcatcctttctattaattcattgtacttatttgcttatttgtgtgtattgagcatctgtaatgtgccagcattgtgcccaggctagggggctatagaaacatctagaaatagactgaaagaaaatctgagttatggtaatacgtgaggaatttaaagactcatccccagcctccacctcctgtgtgatacttgggggctagcttttttctttctttcttttttttgagatggtcttgttctgtcaaccaggctagaatgcagcggtgcaatcatgagtcaatgcagcctccagcctcgacctcccgaggctcaggtgatcctcccatctcagcctctcgagtagctgggaccacagttgtgtgccaccacacttggctaactttttaatttttttgcggagacggtattgctatgttgccaaggttgtttacatgccagtacaatttataataaacactcatttttcctc

SEQ ID NO: 7928 - DNA, 306 bp, Homo sapiens
accctgccagagacgggaagaggggggctgtcggctgctgcttctgggccacggggagccccaggacctatgcactttatttctgaccccgtggcttcggctgagacctgtgtaacctgctgccccctccacccccaacccagtcctacctgtcacaccggacggacccgctgtgccttctaccatcgttccaccattgatgtacatactcatgttttacatcttttctttctgccgctcggctccggccattttgttttatacaaaaatgggaaaaaaaaaaaagaaattatataaagttcctag

SEQ ID NO: 7929 - DNA, 253 bp, Homo sapiens
gccctggtgccttggcagagagacgagaaactccaggctctgagcccggcgtgggcaggcagcggagccaggggctgtgacagctcccggcgggtggagactttgggatggactggaggaggccagcgtccagctggcggtgctcccgggatgtgccctgacatggttaatttataacaccccgatttcctcttgggtcccctcaagcagacggggctcaagggggttacatttaataaaaggatgaagatgg

SEQ ID NO: 7930 - DNA, 423 bp, Homo sapiens
agtcctttcttgctttcaaatatgctatggagccacagttgaggacagtagtttcctgcaggagcctaccctgaaatctcttctcagcttaacatggaaatgaggatcccaccagccccagaaccctctggggaagaatgttgggggcggtcttcctgtggttgtatgcactgatgagaaatcaggcgtttctgctccaaacgaccattttatcttcgtgctctgcaacttcttcaattccagagtttctgagaacagacccaaattcaatggcatgaccaagaacacctggctaccattttgttttctcctgcccttgttggtgcatggttctaagcatgcccctccagagcctatcatacgcctgatacagagaacctctcaataaatgatttgtcgcctgtctgactgatttaccctagg

SEQ ID NO: 7931 - DNA, 113 bp, Homo sapiens
agctcagtcttgggctttcggtccctttcttttaatgcccatcctcattcctactctgaattgtcacacttttcccttccccaccagttctttaataaaagtatttgaaaggc

SEQ ID NO: 7932 - DNA, 4221 bp, Homo sapiens
attcaataactgtgggaaaagcattcattgatctttcatgcctcagataacatgagcaaactctaacaagatgtatgaatcacctgctactgtgtaacaaattaccccccaaaattttgtggcttcaaacaaaaacacttgttatctcaaaatttttgtaggtcaggaattcagaaacaacatagctctatagttcttcaggatatctcaagaggttacagtccagatgtcagcagaactgtaatcatccagaattgttactggtgaagggaccacttccaaatggcttacaagcccgacaagtgcatgctagctgtttccaagggagctgcgcttccaaatcacgtaggcctctcaacagggctgagtttctttatggaagcaacttctccccaaagccagtgatctaaaggagccaacacagaaagcataatgtcttttatgacctagcttcagtgagatatgttttcatgtccctgttacattggtcatacacaccaatcctgatacaatgtggaagaacaccacaggaggtatgaacagtagacatttggaaccatctggaaaacttgccatgaaatcagtggaggaaagccttcagctgaccctcatttttttttttttaagacaatgtctcactctgtcacccagtctggagcgcagtggtgtgatcacagctcactgcagcctctacttcctgggatcaagtaattctcctgccccagcctccaatgtagctgggactacaggtgcatgacaccatgtctggctaatttgtttttttttaaactagagggagggttttgccatgttgcccagactagtctcaaactcctaggttcaagcagtcctttcatcttggcctccagaagtactgggattacaggcatgaaccaccatgcccagccaacttctaaactgatcaatatgggagtagcattcaatcacccacaggttaactcactctagagagaaatcttgtgagtgtaatctgtatggtaaaactttgagctcaaactttccccctaccaaaaaaaaagtatctactggggagctgcccaggtaatgcagtagctgtaggaaagccttcagtgatggcttcagggagtcacatgacaactcacaataaggggaaaccctgtgtgtggcatcaaaaatggaaaaccaggggacactcattccttaagtcacatttcggagatcatacaacagaggaatatgttgagtatacacagtgttgaaaagcctgtgacacaaacagtcatattaccaagcacaagacagtatagtttggtatgctataaaagccttgaatattctctccatttttaagaagtgagattcatactagaaaaaccattgaattccatcagtattagaatgtcatttttccacatttttaggaacctaactcagtgtaagataacaatttatacaatttattttttgagacagggtttcatctgtgcccaggctgtagtgcagtggtgcaatcttggcttattgtaacctctgcctcccaggcttaagggatcctcccacctcagcctcccaagtagctgggactgtaggcatgcaccaccatgcctgtctagtttttgtaaagatggggattcaccatgtttcccaggctgctctcaaactcctgggctcaagtgatccacctgcctcagcctcccaaaatgctgggaatacaggaacgagctaccactctcagccagaacttcttaagataaaggatgagggaatgttttcagtgatacctcttatattaggaaaaatatgtaaatgttccttggatgcaatactcacgagtgtattaatttcagaaaaattttcagtgattcctccctttatgcatgagagaattcatttagaggaagccctaggaacgtaatcaatgttaggatgcctcatctcttaactgagtggccacgcagtaacttagaacaaaaggtgtaagtgctatgaatgtggaattaccttcatcaatgtctcatttgtaggttgggccactagctcgttcattttcagtcttttaatataaacatttatggctatagtggtcctgaaaatcttactacctcgttttatatacagtgtatttattataattctaaaacatcaatacaccaaatattcagaaaggtatttccaaacagctcctgagtgatctagtttgttataatagaaattagacatttgccaggtgtggtggctcacacctataaacctagcattttgggaggctgaggcgggcagatcaccggaggtaaggagcttgagaccagcctggccaacatggtgaaaccccgcttctactaaaaaatacaaaaattagccgggtgtggtggcaggcatctataatcccagctactcaagaggctgaggaaggagaatcacttgaacccgggaaatggaggttgcagtgagccaagatcatgccacttcactccagcctgggcaaaagagtgcaactctgtctcaaaaaaaaaaaaatcagacaatatttgatatatttttttctaatttaatagtattttgccagagtacatggactttgtgattttggttgttttctctttgtgtcctaatatagcaaatactgtttctttttttttttttttttttttttgagacggagtcttgctctgttgtccaggctagaatgcagtggcgcgattgtggctcactgcaagctctgcctcccagattcacgccatcctcctgcctcagcctcccgagtagctgggactacaggtgcccatcaccatgcccggctaatttttcatatttttagtagaaatggggtttcactgtgttagccagtatggtctcaatctcctgacctcgtgatccacctgcctcggcctcccaaagcactgggattacaggcgtgagccaccatgcccggcacaaatactgtttcttaatgttcattctccctacttaaagaaaaagataagttgtcaatgagcagtattgaaaatgtacagtggggccaggcgccatggctcatgcctgtaatcccagcactttgggaggccgaggcaggcggaccacctgaggtcaggagttcaagactagcttggccaacgtggtgaaacctcgtctctactaaaaaaaatacaaaaattagctgggcgtgatgacaggtgcctgtaatcccagctacttgggaggctgaggcaggagaatcgcttgagcctgggaagcggaggttgcagtgagccgagattgcacaaccacactccagcttgggcgacagagtgagactccatctcaaaaaaagatgtacagtgtactaggctttcctgaagcttagacaggctttatcccactctgctggctaaaagaagtaggaataacgcactgggtgagacaccgtctggcttattctcatctattttcttttcattcttttggaaagtggacacaaagcatagagttaaaagagcttttttttttttttttttttttttcttcactgtggtgataaaaaccacagtgcaggggctgggcgtggtggctcacgcctgtaatcccaccactttgggaggccaaggcaggcggatcacctgaggtggggagttcgagaccagcctgatcaacatggagaaaacctgtctctcctaaaaatacaaaattaaccgagcatgttggcgcatgcctgtaatctcagctacttggaaggctgaggcaggagaattgcttcaaactgggcagaggttgcagtgagccaaggttgacccactgcactccagcctgggcaacaagagcaaaactccatctcaaaaaaaaaaaaaaagaaagaaacagtgccgaaaaatcacaatgatttgagttcttcaaaaacctttgattggctgcattggctctgttctgcatattactagacttcttacatgatcacaagtaaccactaattggttaaaaccaaagagagagagagagagagtgtgtgtgtgtgtgtgtgtgtttggttggggggtgttgtgttagcttccaggtgaatgcattatctgttaatcctgtttattgatctgtttttataagtgctccatgattctctgaaaacagtatactatgtatctaatttttggatacaggatggacatacgtactcaaactgtgtttttcaatttgtactgtatttgtttctctcgacctgacttagtgatagaggtatattaaagtcttccactagcatggtagattaac

SEQ ID NO: 7933 - DNA, 1948 bp, Homo sapiens
gaaagtttttaatggaaagttgagccagaactaaaccagggagctgtctgaaatcatagcaccccatccgggtggcggggagatcaactccgagctgtttttccgaggcagtgaggaacggtgccggctctgcacggagctgaggacaggacagaccttgctttgagaaggagctgccggccggggccacgctccacagccgccgcgcgacagtggagccaagggttagggcaccaggaggggccaggtggcgtcggcagcatctgtccccagaatcaggcagaatccacttcccaaacagagccccacgcaggttcaccatgaacctcagggtcagggaatgagccaggcacgggggcatgggcagagagggccacggggcagggcccactgagggaacatcagtggccctccagtcaggttctgtgggtttggaagcccatcgtgaaaggggctgacctttgcccctttttacttggcattggttttgaaaccagctgtttcccaaactctgcttcccaagggcaaccgttgctgttcacacgctcagcctgtctgggggagcgggcctctagcttcagccagggcgggtacacaccctgggcacagggtcctcagcccccgggaaatgagctcccagggctggcgtcccaccttccaggtgggggctggcacatcacagactgtcgagagcgccatgtcccagggcatgcagaggatgcacctagagacgttgcagcaagtggacaagtggccgctgtgcgggcccctcgcttgtagtgagctgttgcagcttacggtccgttccctggaggggtggaggaaggaggtgttgggcagcatcaaaggtgctgggacatcccagggtggtgagatccatccacgatccagctccggtggagaaagggcccatgtcaagccttgttctgcaccccaagcattggtggtaggactgggtcctggctgatcgtccttgttcccagtggggtacatgtgagcccctgccagggccaagtccttctcccgaacccagggtcctgggaactgcagatcccggggggattcagcccttctcccactgtgctggcagaggcactcctgtgacgctgaatacagtgaacagggacattcccgccactcggggacagatgggcacaagggaggggaaactccatcaggaagtgctcccctgggcagaggcgcccactgggtgctgtgggctcaggagggggcggggcaggagctggtgccaaccgggaaccagagccccacagccatacagcccattggtgacaaggtcctgagaacacagtggccaggtgtccccaggctcctggcccctccgacgacctcaactctgcccagcccggtccctggccatcagcgacgctgtccgccccccgtcagatcccatgtgtgccatgtttatcatcagtgttttgtatttttgtactgagtatcggagcactttacagaagctgactgtacattcctgttctgttgtgaagagaacattcccagaccctggcaccctcctgagccggcgtgtgccggtccagccctccgagatgccacaattccttggatgggggagaagttcaaggaatttctgctcggccacgcggtgggaaccccgcgtccccgccatgtggcagaggggtctcagtcgtgctaggcatcgggcggcagcgccgacagcccttccctcgccagtgcccctcggccactcctgggttggagcccgattttatttgtaaagttgacagtcgagcaaatgttcctattttcgtgggatctgcacacgtctttgtcagttgtggtcatgatcttagtcacctgctaattatttttacaatgattacaacatttcctcactgcgggatatttctgacccgctttagaacttaagacctgattctagcaataaacgtgtccgagatgagcggtg

SEQ ID NO: 7934 - DNA, 20 bp, Homo sapiens
atgccatcttggcaacattc

SEQ ID NO: 7935 - DNA, 76 bp, Homo sapiens
aggagacgccggcatcctcgggggcctggggaagttgtgtgttgtgcagtcagtaaaatcctcccactgcctccgg

SEQ ID NO: 7936 - DNA, 180 bp, Homo sapiens
ttcgacctgactgccgttggaccgtaggccctggactgcagagacccccgcccccgaccccgcttatttatttgtagggtttgcttttaaggatcggctccctgtcgcgcccgaggagggcctggacctttcgtgtcggacccttgggggcggggagactgggtggggagggtgttgaat

SEQ ID NO: 7937 - DNA, 204 bp, Homo sapiens
ggacctcgacaggggtcaccccctccctcccacccctggactgggctgggggtggccccgtgggggtagctcactccccctcctgctgctatgcctgtgacccccgcggcccacacactggactgacctgccctgagcggggatgcagtgttgcactgatgacttgaccagcccctcccccaataaactcgcctcttggaaatg

SEQ ID NO: 7938 - DNA, 105 bp, Homo sapiens
ggtcgcgcgcagcgcgtgcacagcgcgggcggaggcggctccaggtccggaggggttgcgggggagctggaaataaacctggagatgatgatgatgatgatgatg

SEQ ID NO: 7939 - DNA, 719 bp, Homo sapiens
atgagaggacattgtggcagccaaagccacaacttggaagatggggctgcacctgccaacgaagacgggaaatgaccccccccccccagcctagtgtgaacctgcccctcgtcccacgtatagaaaaacctcgagtcatggtgaatgagtgtctcggagttgctcgtgtgtgtgtacacctgcgtgcgtgtgtgtgcgtgtgtgcgcgtgtgttcgtgtatgtgcgtgtgtgcgtgcgcgtgtgtgtgcattttgcaaagggtggacatttcagtgtatctcccagaaaggtgatgaatgaataggactgagagtcacagtgaatgtggcatgcatgcctgtgtcatgtgacatatgtgagtctcggcatgtcacggtgggtggctgtgtctgagcacctccagcagatgtcactctgagtgtgggtgttggtgacatgcattgcacgggcctgtctccctgtttgtgtaaacatactagagtatactgcggcgtgttttctgtctacccatgtcatggtgggggagatttatctccgtacatgtgggtgtcgccatgtgtgccctgtcactatctgtggctgggtgaacggctgtgtcattatgagtgtgccgagttatgccaccctgtgtgctcagggcacatgcacacagacatttatctctgcactcacattttgtgacttatgaagataaataaagtcaagggaaaacagcgtc

SEQ ID NO: 7940 - DNA, 767 bp, Homo sapiens
cttccagcggtactggaacagtggagaacccaacaatagcgggaatgaagactgtgcggaatttagtggcagtggctggaacgacaatcgatgtgacgttgacaattactggatctgcaaaaagcccgcagcctgcttcagagacgaatagttgtttccctgctagcctcagcctccattgtggtatagcagaacttcacccacttgtaagccagcgcttcttctctccatccttggaccttcacaaatgccctgagacggttctctgttcgatttttcatcccctatgaacctgggtcttattctgtccttctgatgcctccaagtttccctggtgtagagcttgtgttcttggcccatccttggagctttataagtgacctgagtgggatgcatttagggggcgggcttggtatgttgtatgaatccactctctgttccttttggagattagactatttggattcatgtgtagctgccctgtcccctggggctttatctcatccatgcaaactaccatctgctcaacttccagctacaccccgtgcacccttttgactggggacttgctggttgaaggagctcatcttgcaggctggaagcaccagggaattaattcccccagtcaaccaatggcatccagagagggcatggaggctccatacaacctcttccacccccacatctttctttgtcctatacatgtcttccatttggctgtttctgagttgtagcctttataataaagtggtaaatgttgtaactgc

SEQ ID NO: 7941 - DNA, 1273 bp, Homo sapiens
ggccatgcccagcgcgcccggagtcaggaggccgcagccgcggggggcgcccgggcagtccgcgttctgctccccacctgccgcacttgacaaactacgcgccctctgtggctcggccacccctaaagcgaggcccggcgaggcagcgcagagggtagggtccgacctgggctcctcagggccccggggcaggctctctatccccagcagtgtttacccatcttggtctgtacccctccgggccctctggcgttccaggggtgcctggaggggctgactgctctcttaacaggagggcagagggcaggggacagacgacccagaggtcccagcactgaatgagcaggcagctcccacctcctggcaggcttccttctgggacaggggcgacattgctgggaagtgctcaggaggtagccgaggcctgaggaaggagagcgccagctctgggctggacatcagcaccccacaacactcctcgggatgaagtgacccttgactagcccctggccatctctaggggagtcaggccgctggggacagatggccaggccggcctctcctgcctggcgcaggcaccgtggcccctgcagcggaaaccaaagtccccctactatgtgcggggcgcctggggactgagtggctaacgggaagcctccctgcttctctggggccagagcagcttccaggaagtgaagagacccctctccccagtgccccacatctttctctgggagacactcgcgccccctatcctggccagtgatggaggggtatctctacaggggtcctcggtctccatctacttccctttcttcatgtgtttccagccccaccctcagccagagccaggcccccaggcaggagcttcccagcgagcggcctcccctcacttcctcctggtggtcccgttgtctctgctgaatcagagctgagaacggtgccaaaatccaacgatgccccccaggccccttcctcccttcccccggccccccgggcctcatgaccctgggggctgcccccctcggtgctcccggagcctccagtagagtagcgtcacaagcaatctccctggcgcttcctgggtggggacccctgctccgtccccgcttcctagctgcccacttttcagtgttacgaagcctggggaccggggcaggcacccacggggctctccacacgccccctacactgcccgccaccattttgcacactgcctgttcacatgtcgcccaggcgggaaaaatggaaaataaagtgtatttacacagtc

SEQ ID NO: 7942 - DNA, 1111 bp, Homo sapiens
agctggggtggggccgttttaggtagagccttaaaaatgcttctgccctggaatctcaaccattgtcttccaagataggaagccaagtgggtccaggccaggagatggggggggcgggggcagctgtgtcatctttctggggcccaggaggatctgggctggtttgtctggggagacagacaggatgttgtggagctggggtggaacctggtatggagggattaactcagtcatggcattctccgaccaaaaccacacctgtgtctctggcaggctggctggccttgctcccatccctagaactgctgcctctccctggatattccagctcaattagtgccacatatgggggaaacgacacatcccagtgggatttccaacactccccctccccatgcaacaaagcaacttacttctggagttctctcccaaggagaggacacagacacagttgtttgctgtgttatatgttagctccgaacaatggttctcatttggctaagcatcaaaatcacctagggagtcggtgcaaaacaaaatatcccagtcccctcccctgaaacactgactcaggaggtttggttgggggccaggagtctgttcctaaatattccaggtagttctggtgcaggtaagtggccctgagacagtatgttgggaaatgctgacgtaaaggtatcagggccgggcgctgtggctcatgactataatcccagctgtttgagaggccaatgcaggaggatggttgagctcaggagttcgagatcagcctgggtaacatagcgagaccccacctctgccaaaaaaaaaaaaaatagggtatccaaatatctagattctgatcccttttgaggtcctagaccctttgagaaactgatgaagccaggcacctccttcctcaggaaaatgctggtgtacaaatacacacaaagctcttcaggcagctgatagatttcccccagagagctattcaaggacttcctaaggtgggtggactgcagggttaggacacctgctatagaggtgacatttttccaaggacaagcagggactttggtcttgactgttctctgggtgcttaataaataatactaattatgcaagttctagt

SEQ ID NO: 7943 - DNA, 2046 bp, Homo sapiens
ctgcttggcggcggccagccccacagggggccaggggcatggccacaggcccccctccccacttggccacccagctgcctgccaggggagacctgggacctggacggccacctaggactgaggacagagagtggggggtgcccacccaccccccccgccccgggcctaccaagcccccgcccttcccaccccggggtcagccggccgtgtgcgtcccccgacagacactgtgaacggaagacagcaggccgcgatcagagtcgctgttcattcagccgcagcctctgggccggggcggcccccaggggccaggagagagccctggagtcccgcagccaccatgcacgctcccagcgtgctgtgtccttcgccactcccacgcgcccgttcctcttccgtcgccctctgtcccctgctctacctctctgtccttgtctggctctcccgtcaccctccctgcctctgtctctcttctggcctgagcctgggcccagccacctcctgacgggtcccctgggtctgcataggtctcccatggcgcaatgagtcagtggcccccagccaggcagtgtgggcattgccactgcggctggacggggctgcgcgctcgcgctctctctctctctctctctctctctttgatctcagggggtcctttttggagtttattgtattttattgtacttggtggggtgtttggggtgggggcggaggagagcttgttctcgtggggttgtcggtaccttcagaaacttttaccaaagtcacgattagctgcttgtggtggggccccaaccgccctcgggcactggggagctgggctggggctgctgctctggggtctccgggggccacagcttggggtgagttgaagacctcaggggatgtggaggggtctgcggggccctggccgcacaggatggccttcagggaaggtggtcttggggcatggtgcagagcaggtgaccggagggaatcggtgacggagcggggccaagggaggggtccggagggagtcagggatggagggcagagggagtggatgtgggggtttgaggacgtgtgacaagctccagcaggggtgggggccgggctgagggtgggggtgcgaggtggtcactcccatcgtgcccctggccgtccctccactcacccacacctggcccagtccacgttgaggtccaggactgggaaggaccgggtgagtgcaccggggacccaggccaggtgccccccggagcctgctggggtggccagagcaggagggggtgtgtttcctttttgtgggtgttgcatgcaaatcaagtggacaagaaaaaataacaaaacaaaaaacaagaaaaaaaaaacacaaaaccccgtaaaatcacaaagaaaatccaacaccaaaggcgcagaagccggctggccgtggtgggggcagcgtaggcgtagcatccctctcctctcacttagcctgttgactcttgttattatcatgatattcacaaaacgccgcatgtttaaaaagtcatagatgtcatcttctctctgcccccagggaggaaagccaccttctcttgccccttggcccctttgtcaggggccaggggtctgccgggtgggggtgccaacaggcctggccctttcctcccctgcatccagccatgggggcctctgcgattgccggaaggttgcatggctggtcccagggccagcacaggcccgaggccgggctgcctggttttatttttatttaactttattttctgttttatgagtgtgtgtccgcccacccccacccccttcagtgttaagtggggagccctgggggagtctctcctgcctcccagcctctcccaagacctcccccctcgtcaccagccatccctctggaccaggcagagggcggaccgggtgggcaggggcctgagggtggctcgggccagcccaccagccaatggacccctcctcaggccgccagtgtcgccctgcccctttttaaaacaaaatgccctcgtttgtaaacccttagacgcttgagaataaaccccttccttttcttcc

SEQ ID NO: 7944 - DNA, 485 bp, Homo sapiens
ggggcatggcgggcaggaggccacaccaggccccccgccctgcccctcggttctgctcggctggccctggctctttctgaggatcccgtcatgggggaaggtccttgagatgatgctcagctgtggggcgggcctctaagatgccccatactttgggggtctcagaaatggaacccccgttgtacaggggttgggtgggggttgcaggactccactcacaagcctcctgatgtcaaggacaggcggacagggctggcctcccccagtccccaagccccactgtgccttgttgtctgctggggggccatagctggcactgcccaccgtaaaggccctcgcacattttcccccttcctgtacacctcggggccagcatcctcaccttcttcaactgaccagtcgtggttactccctgctgccaggtccttccccttcccgggggtattctgtgaccatgaataaagttatcattctctttctctttc

SEQ ID NO: 7945 - DNA, 437 bp, Homo sapiens
gccggctcatttctgggctccatcggcacaggaggggccggatctttctccgataaaaccgtcgccctacagacccagctgtccccacgcctctgtcttttgggtcaagtcttaatccctgcacctgagttggtcctccctctgcacccccaccacctcctgcccgtctggcaactggaaagagggagttggcctgattttaagccttttgccgctccggggaccagcagcaatcctgggcagccagtggctcttgtagagaagacttaggatacctctctcactttctgtttcttgccgtccaccccgggccatgccagtgtgtccctctgggtccctccaaaactctggtcagttcaaggatgcccctcccaggctatgcttttctataacttttaaataaaccttggggggtgatggagtcattcctgcctgtt

SEQ ID NO: 7946 - DNA, 309 bp, Homo sapiens
ccgggcggggctggctgtaaggggttgcccccccgccagtgccttggatatttctggggtgactggactggcgcccctgggccacctttctggagacagggagggccccacccggggtgggtgggaaggctgatgatctgtctccagccccttccttctgcccacccacccttcttccctctgggcaactggacagatctgggagccagcagctggatgctgtggctggccagagacacctccaggctgtggcctgggggctggggggagccccaggctgaaaagggtccaattaaaacaaatggagcc

SEQ ID NO: 7947 - DNA, 123 bp, Homo sapiens
ggtcttggatgtcgggttcgaccacttggccgatgggaatggtctgtcacagtctgctccttttttttgtccgccacacgtaactgagatgctcctttaaataaagcgtttgtgtttcaagtt

SEQ ID NO: 7948 - DNA, 487 bp, Homo sapiens
cgtcctggctgggcctggtcccaggcccacgaaagacggtgactcttggctctgcccgaggatgtggccgttccctgcctgggcaggggctccaaggaggggccatctggaaacttgtggacagagaagaagaccacgactggagaagccccctttctgagtgcaggggggctgcatgcgttgcctcctgagatcgaggctgcaggatatgctcagactctagaggcgtggaccaaggggcatggagcttcactccttgctggccagggagttggggactcagagggaccacttggggccagccagactggcctcaatggcggactcagtcacattgactgacggggaccagggcttgtgtgggtcgagagcgccctcatggtgctggtgctgttgtgtgtaggtcccctggggacacaagcaggcgccaatggtatctgggcggagctcacagagttcttggaataaaagcaacctcagaacactt

SEQ ID NO: 7949 - DNA, 37 bp, Homo sapiens
cccctgcgcctccacccagcgtgcgtgcacgtcctcc

SEQ ID NO: 7950 - DNA, 467 bp, Homo sapiens
atgctgggctctccggaccctgcagcagagaggccagaggtagctggtgataccctgtcctgtggaaggacttccacttcaacacttccacttcaacagttcccgcacggcctgaacgcttcttaggccaagagacaccatgcagagcctagtctgtgatcctgtgtgaagatattttcagggtttttttttttttttttttgcatatggaggacaggtggacatggtcctgagctctggacggagcaggcaccctgatctcattctgaggtccacatggcaccttctgggccagcagctgtggccggtgtatcaagggcgcccttaaagctggaacattccagcaagcttcttgcgcttctctgcacccggcaggcccactttcctggcaccctcgactttatataaaagttgcactgcgtttcaaaaacccacccctgaatgaataaaaggagccctggctggac

SEQ ID NO: 7951 - DNA, 256 bp, Homo sapiens
gcagttgccttttttaaacatcgatacgagacctctgaatttgtattttttcttgttaaccattttaatttgttggctggatgtataaagatgtttaaaaaattcagttgctttttggggtaatttgaattacttttttaatgactggggttccatttgactgtttgcattgagattgcaatgtgcgcaattttttttgtagttgtggcatcttgttgacatcgaatatgactttgataataaataccggttcctg

SEQ ID NO: 7952 - DNA, 56 bp, Homo sapiens
gaaaaaaagggaagatagtgcagatgaaataaagtgtaatcctttattaacatctc

SEQ ID NO: 7953 - DNA, 1973 bp, Homo sapiens
gcgcgcctgctttagagacacaggatgattcagaccggaaacagacctcgtgggtgtaagaggaagcctctgtgagctcgcaccttactgggtgcaaaagaatccacggaacttgggagaagtccagttcctgtaaaaactgggaagacgaggcgttctcatcccataggaggtttgtgagaactcacgccgggggtgaaaatgtacgtctgtagcatggagaagccttcagggtacattcagctcttaacaaacacaggaggacttaatggcagcttggcatttaatgtcaaaatccaagccgtggcatttaatgtcaaaatgacttcagaccacttctagccttctgggcccatgagtaataatgagcacactagggagcatctctgtaaacacagtggctggggaaacccttcctagtctcacttgattcctcatgacggaaatcacactaaagagagaaatcagtgaagtaaggaacgtggaaggtcatgaatgggccgcaaaccacggccagctgcttgtctttgtatggcttgccagctaacaatagtggttccatctttaaggaagaagaatgtttgatggagaaaatttgtggccaatgaagtctgaaatacttcctgtcatctgcccctttccagaaaaacttggccgacccttggtctacagcacgggttctcagtcgggcgacgatttggctgtctaggcgtcatttggcaatgtctagagacatttttggtagttagaatggggggaagatactcctgacttgtaataagaagacatcagagatgctgctaagtcggctccagcacacaggagccccccacaacgaagagttagtgcccccaaacgtcactgttgctgaggttgaaaataatcatgcagtcattcctcaattactgcctgcagcaattcctccatttttatgaatcttgtgagcacttacgctaggagaaatttcttttacaaaacttttaaaatacaattagtgctgataattcctatgtggaaatgattccagccatggtcccctcacttgagcatgtgaatattctcacggagagaagccccagcgagattttccggtgaatacgggattgcacttactctttcatcacggaaacagaccccccgagagaagccccaacgagattttccggtgaatacgggactgcacgtactctctcatcatgaaaacagagccccgttcataaatttttcatctttatttttaaggttatactcctctaaataacccttaagcctcatcaagaaaggtttgtttatagtatttttactatagcttcatccttgataacgtcctaatttccttctggacaacctccttgaccaatggcatattgagatctatgtgacatgaggatatttctcagtaccactttgttactggtacctgatgcacacggattgcgaccagagcatgatgcctccatcaagtggtaatatgtttgcagcctgctgtccagccaagagtgacagatacttctagtgacttccccggtatccactctcatcttcttccaatatcaagagaatccaggttctgtcagattagtaaggtgtgctaatctaaattttaaaaaatctcttacaggttttcttgcagctggtaccatccatgtctcacagccctggccactgacagatcagcagatgtcaccacatgggcttctgagaaagctcttgaatggggatcgttcttaaacatgaattcctccctgtatgttttgttctttgctttacttttcaccttgcaaagagatccagtacctagtattggaagatccaccttaacgaccgtgcatatgaaaaccacagtctaaggaagtgactgcagaaagctcacagcgaccctggcctcccctgtggcctctttgagtgtctgcagcagccctggacttccagacttctatcacatgagaaaaaataaaactgattattggttt

SEQ ID NO: 7954 - DNA, 2097 bp, Homo sapiens
tggatcccttggccccaggactaagaagttttgtgagcaccaatggcaaaaatgttttattttgaaattcttactctttaaaattaaaaacatttttttatactttgagagtacaaatgcagatttcttaacatgcatttgcataagggtgaagtctgagcttttggcgtaccaattacctgaatagtgaacataaggcacttttttttcttttttgagacggagtctcactctgtctcccaggctggagtgcagtggagtgatctcggctcactgcaacctccgcctcccgggttcaagtgattcttctgtctcagcctcctgagtagctgagattacaggtgtgtgccacccatgccttttagtagagacggggtttcaccatcttggccaggctggtctcgaactcctgaccttgtgatccacctgccttggcctctcaaagtgctgggattacaggtgtgagccaccacgcccggccaaggcagtttttaaactctcactcccctctcaccttttgcagtctccagtgtccattattctgttataatgcccatgcgtatacattgtttagctcccaattataagtgagatcatgcagcatttgactttgtttctttactaccttacttaagagaatggcttccagtcccatcgatgttgctgcaaaagacatgatttcatccttttttatggctgagtagtactccattgtatatatcctcgatatctatatagatatagacatatgtagatacataccatgttttctttttttaaaaaaatttatttttatgtcagtagtttttggggtacatgtggtttttcattacacggatgagttctttagtggtgacttctgagtttttagtgtacccgtcacccaagtggtagtagtctcttattcctcacccccctcccaacctttctcccttcaagtcaccaaagttcattatattgttcatatccctttgtgtcctcatagcttagctcccacttataactgagaacatacgatatgttcatatggatcttatgtatgttggttgaacatacaaacaagtccaggtttttcattcctgagttacttcacctagagtaatgacctccagttccatccaagttgctacaaaagacattatttggttcctttttatggataagtagtattccatgctgtacatataccacaatctttatcactcattggttgatgggcacttaggttggttccatgcctttgtaattgctaattatgttgctataaacatgcaggtgtatgtgtctttttcacataatgactttgtttcctttgggtagatacccagtagtggaactgctggactgaaaggtagttctacttttagttcttttttttgttttttttttaagacagagtctcactctgttgcccaggctggagtgcagtggcgcgatctcatctcactgcaacctccacctcccaggttcaagcgattctcctgcctcaacctcctgagtagctgggactacaggcacctgccaccccacccagctaattcttctatttttagtagagacagggtttcaccatgttggccaggctggtcttgaactcctgacctcaggtgatacgcccacctcggcctcccaaagtgctgggattacaggtgtgagccactgtgcctggccttctagttctttaagataccactttaaaaaaagtccagtcctccattgatggacacgtaggttgattccatatctttgctaatgtgaatagtgccgtgataaacatgggggtgtaagttaacaattaatctccaagtaatttccttgatggcacttctgtcctatgtgctattcaaaaattgtgtccttgatcatcgttcttaattctccattagtgagttctgaacttgggtttgaagcatttgctatagctttgttatctcaagtggtggcacagagttcttaagctattgattgttcactgactttatttctatgtgtttgcatgtgggtttttgttgtttgtgtgttcgatcatgaacagatcaacagtgtttatttgttttcctactggatgaagtatgattaaaatacgtatttaaatat

SEQ ID NO: 7955 - DNA, 775 bp, Homo sapiens
attggggctgatacttggaaagaatgtggtaaagccactacttcctcacacttactgaacatgtactcattcatagtggcaatgtacacagtcataaggaatgtgggaagccttccttggtgtctcagatcttaacaattccaatagaagagaagacatatgaatgtaaggaatgtgggaaaatcttggctccttccataggccttactattcatgtgtctgtgcatcctaggaaacaaactgaacgtaggaaacctgtcgatgcttacatcttactgagtctgtttgaactcatgctggagagaaatgctatgaatgtgaggaaggtggaaaagctttcattattttcctcgggccttactgagcttgtgagcacattggatataaatgcacgtcctctggctgtaaggaatgtgttgaaacctttcactctgccttataccttaatattcagctgtgatctcacaagtgtgaaaaatcttatgaatgtaaaatgtgtggagattcttctttgtttttagcttccactttgggaacatgtcaaagcacacattgagaagtcccatgagtgaaagagatgttggaaagcccttgaacttggtcgttaggaaacatccacactgaagaggaacctgactgtatggaaggtcaaaaaggctgtattaatttacatgcaaaaagtcacactagaggaatgccatatcagaatgcttttggtaaatatacatgttttaaagaggttatatatcattaataaaaatatctagctggtctg

SEQ ID NO: 7956 - DNA, 411 bp, Homo sapiens
aatgactcagggaagtgtttgttgcccctcatgcctcctttctcactttagaacatatattggagagaagccctgttatggtcacctggaaacagccttctggcccaactctggatgcctgttatactgggacaaaccttataaatgttatagctatgattgtttttatcagtgagtatttcattcttatatgtgtcacaactgtagatcctatgaatattttagttatcttttcagtttaattgcattgtgaacagaacacatggtcttcaatatgtagattctgtgtgacatagatttgaacataattgctggacactgactgatgtactgtggcagacagaactagttgctgtctcaatatccattcctcccttctttcttaaagtaataaaatttaccatttagttc

SEQ ID NO: 7957 - DNA, 113 bp, Homo sapiens
atgagaatcctcatcttcctgccccgctttcctctcccatcctcatcccccacactgggatagatgcttgtttgtaaaaactcaccttaataaagacttagatgttgctttgt

SEQ ID NO: 7958 - DNA, 483 bp, Homo sapiens
gggtggggagcccaggcctggcctcggggcagggcagggcggctaggccggccagctcccccttgcccgccagccagtggccgaaccccccactccctgccaccgtcacacagtatttattgttcccacaatggctgggagggggcccttccagattgggggccctggggtccccactccctgtccatccccagttggggctgcgaccgccagattctcccttaaggaattgacttcagcaggggtgggaggctcccagacccagggcagtgtggtgggaggggtgttccaaagagaaggcctggtcagcagagccgccccgtgtccccccaggtgctggaggcagactcgagggccgaattgtttctagttaggccacgctcctctgttcagtcgcaaaggtgaacactcatgcggcccagccatgggccctctgagcaactgtgcagcaccctttcacccccaattaaacccagaaccact

SEQ ID NO: 7959 - DNA, 528 bp, Homo sapiens
gcagaacagagcttcacgatccccatccctgaacaaccagacctcttcattccacatctaattcaaaggatgaacagactcttcatttattcattctgcaaactccccctcccctcctctgtgcctagacatggctagaatcccagaagggcctttattttcaggcatagactcctctgtggtcacagctggagcacagagagggaccctgggaacttggcctgggaagcccagagcaggaagccacagctgtctctgggaaagcaagggaggcttcctggaggaagcggcattgttatgagccttgaaggaagagacagactctgctacattcaacctcgtgacttcatgatcctgggcctgagaacacaggaatgattcatagcccaccccccacctccatgcatacaccagagctctgtggaccaaggggtcattcctggtcacacactccatcagcaaaatgtatttgagcacacaccagcaatgtatgtatattttttccattaaatatatatttataaccac

SEQ ID NO: 7960 - DNA, 219 bp, Homo sapiens
ttacagctatgttctgggcaaggagacgttcctcatcctttggccagcagatggagatgccagcaagaaagaattgcgggaccaactggaggaatttttggaatatatgcgcacccacggctgccagtcctgagcctcttctgctttcagggaggtgtcatcaggcagctctgggccactgggtttaaccccaaataaagagcacaggatatgacaccc

SEQ ID NO: 7961 - DNA, 950 bp, Homo sapiens
cccctgccaggtgcagatacaaaccagacacggtctgtggctactttgtgttattataagatatgagctcaaaccgagatatgaatgaccttggggagccatctgaggccaagatattgacgggggggattcctgggtcccattttcagcgcccagggtcacagatccacagtgggaagttctgtgggacacattggcactgagccacaaagaaggtgtggccagaacaacttgggctcctgctgaccaatgtcctctagggcctaggggacagaggaacacagagtcacagcttcaggggccgaatgagcatggcggccttcctgagagaatatgccccaccacgaaactcagcccagtagacaccatcctggtagcggcttcggtagtggccgccgtggtgccacacaccgttgaggttggagtgggcacaggcatggtaccaccagcctccccgctggtacagggcacagttacctgaggggagagagagagtccatgtcctctcaccagaataaaagcctctacctgcacctcacagtgcaaggcttttgccaggcatcccctggcccctcccattcttattgaatacaagccctgatcttccatctcctcagcaaaaaaataggagccctggccccccaactttcttcagagtaatagccttaattccttccctatctccttaccaaagtacaagtcacatctttcccaccttttctgcaaactaggagtctaccgttcattcctttatcaaagaaaagtatctacttcctttctagaataagagtactagctctcaccctctgccctttacttgaacaggagtcttgattctttttttgcctcatcagagaaggaatctggactccccatccccccaccaggataaaagtcctgacctttgttctcttgacggaataaaagcttgcttatccttatacttacca

SEQ ID NO: 7962 - DNA, 134 bp, Homo sapiens
gcccaagccgcaccggagcagcggctggattgaacgccccagattggggcccgagatgtggccctcggtttcctttcataaaggagttgtgtccccagcccttccactccagtaaagaactgaattggccaggg

SEQ ID NO: 7963 - DNA, 648 bp, Homo sapiens
tgtggcctagcggaagctgcctcctcaccctaggtgttgctggagaaccctgagggcagggcccgagccccgacacatcccttcccccaaaaagcaacacctgtgcttgcagccaggtcaggcccagctgcagcccaggcaggagcagtcgcctttcccacccacagcgctggccacagggctccctgcagggtcagggaccagaccacgcccagaggaggggaggcactggcccccgccacaggactggagacgcaagaacaaaaagaaccaagtagagagagtggagctgctttattgcccttggagcccgcgctctcggaggctgtcttctgtcgccaagggtcccggaccgagtacacagtggcagctggcttagttggtggacggcctggggtaggggagggtggcaggtataagacttctgggggcaccccaagaccccagacacccaagtggcatcttgggggtgggtgggcagaggacggggtaatgtgaggacgaagcgggcacggagccagatggccagtctccaggcctggtccacggactggcagggaccccaggcacaagagctgccacccctctgcccggttttggaaaaaaacaataaaggactgtcccctcaaaaccagccgggggactgtt

SEQ ID NO: 7964 - DNA, 1320 bp, Homo sapiens
aatcacagcggttcaaatccggcatctggtcgctgagtggcctcaggcagtgaccacgctcccggacccaaccttcagcttgcccaaagcaataatctttcctaaagaagtgcttggctggggatggtggctcacgcttgtaatcccagtactttgggaggccaaggcagtctgggcaatatagtgaggctcccatctgtactaaaaataaaaaagttaggcgtggcgatgtgcacctgtagtcccagctactcgggggctgagccaggcggatagcttgagctcagggggccaaggctgcagtgagtcatgatcgcaccactgcacccaaacctggggagagagctagactcttgtctcaaaaaaaaaaaaaaaaaaaaaaaaaaagctccaaagtcacctctgtcaaagccacagtctgttccttccacagccacaagatggcgacatgagcctaagtcaagtcctgtccctcaacccacgcccctcgctggcttccccacctctctcaggatgaaagcccaagtcatcagggtggcacgtcaggccctgcacgatgtgccccgtcacctccctgccctcccgtcatttgccctgggtctcccccaccagaatgggagccaggagtcccagccaggcacaggaccgagcctggctctcggtcagcaggtgatgagctgggagcagctccttggccagaggcttacaggcaacaagcggccaggcagggtctggccccgggctgctgggctcacaaagtcacactagaccacagtgacgatctctgtaagcacaaagggactccgatgtgggtggggtgaggagagaggcagccccggcctgaccggccccccgccccgcccccaccccgcccccaggcctaaatgtgcacagcatgctcaagcaccagacgctggtcctgacgctgcccaccgtcgccttcctggaggacaagctgctctggcaggactcacgttacagacccctctaccccttcagcctgccctacagcgacttcccccgacccctaccccacgctacccagggcccagcggccaccccgtaccactgttgatgtgaagcacctcttctgagccaggccgagcccctggccgacttgggagcctcaggcccacgcccacccttcgaggaaggtgtcacctggaccccttcattccacggaggaagctgaggccacagggagcggccatcgccattgggaaggggcgactccacggaaagcccagacgggcttctgcatccattccctctttttgtttttaaaataaattgtatttttgaatcaaggaggataaagat

SEQ ID NO: 7965 - DNA, 1328 bp, Homo sapiens
acctatcccgggacagggcctcttcctcggccttcccatattggtggcagtggtgccacactgaacagagtggaagacatatgccatgcagctacacctaccggccctgggacgccggaggacagggcattgtcctcagtcagatacaacagcatttggggccatggtacctgcacacctaaaacactaggccacgcatctgatctgtagtcacatgactaagccaagaggaaggagcaagactcaagacatgattgatggatgttaaagtctagcctgatgagaggggaagtggtgggggagacatagccccaccatgaggacatacaactgggaaatactgaaacttgctgcctattgggtatgctgaggccccacagacttacagaagaagtggccctccatagacatgtgtagcatcaaaacacaaaggcccacacttcctgacggatgccagcttgggcactgctgtctactgaccccaacccttgatgatatgtatttattcatttgttattttaccagctatttattgagtgtcttttatgtaggctaaatgaacataggtctctggcctcacggagctcccagtcctaatcacattcaaggtcaccaggtacagttgtacaggttgtacactgcaggagagtgcctggcaaaaagatcaaatggggctgggacttctcattggccaacctgcctttccccagaaggagtgatttttctatcggcacaaaagcactatatggactggtaatggttacaggttcagagattacccagtgaggccttattcctcccttccccccaaaactgacacctttgttagccacctccccacccacatacatttctgccagtgttcacaatgacactcagcggtcatgtctggacatgagtgcccagggaatatgcccaagctatgccttgtcctcttgtcctgtttgcatttcactgggagcttgcactatgcagctccagtttcctgcagtgatcagggtcctgcaagcagtggggaagggggccaaggtattggaggactccctcccagctttggaagcctcatccgcgtgtgtgtgtgtgtgtatgtgtagacaagctctcgctctgtcacccaggctggagtgcagtggtgcaatcatggttcactgcagtcttgaccttttgggctcaagtgatcctcccacctcagcctcctgagtagctgggaccataggctcacaacaccacacctggcaaatttgattttttttttttttccagagacggggtctcgcaacattgcccagacttcctttgtgttagttaataaagctttctcaactgcc

SEQ ID NO: 7966 - DNA, 667 bp, Homo sapiens
ccctggggactaggaggaagggggcagagagagttatgaccccgagagggcgcacagaccaagcgtgagctccacgcgggtcgacagacctccctgtgttccgttcctaattctcgccttctgctcccagcttggagccccgcgcccacagctttggcctccggttccatcgctgcccttgtagggatcctcctcactgtgggcgctgcgtacctatgcaagtgcctagctatgaagtcccaggcgtaaagggggatgttctatgccggctgagcgagaaaaagaggaatatgaaacaatctggggaaatggccatacatggtggctgacgcctgtaatcccagcactttgggaggccgaggcaggagaatcgcttgagcccaggagttcgagaccagcctggacaacatagtgagaccccgtctatgcaaaaaatacacaaattagcctggtgtggtggcccgcacctgtggtcccagctacccgggaggctgagttgggaggatcctttgagccctgaaagtcgaggttgcagtgagccttgatcgtgccactgcactccagcctgggggacagagcacgaccctgtctccaaaaataaaataaaaataaaaataaatattggcgggggaaccctctggaatcaataaaggcttccttaaccagc

SEQ ID NO: 7967 - DNA, 160 bp, Homo sapiens
gcccgctcccctctccccgcgggccgggggacgccccccagactcacacgggggcttatttattgctttatttatttacttattcatttatttatgtattcaactccaagggcgtcacccccattttctacccatcccctcaataaagtttttataaagg

SEQ ID NO: 7968 - DNA, 2008 bp, Homo sapiens
tccccagacctctgtccctgttcccctccactcctcccctcactcccctgctcccccgaccacctcctcctctgcctcaaagactcttgtcctcttgtccctcctgagaaaaaagaaaacgaaaagtggggtttttttctgttttctttttttcccctttccccctgcccccacccacggggcctttttttggaggtgggggctggggaatgaggggctgaggtcccggaagggattttatttttttgaattttaattgtaacatttttagaaaaagaacaaaaaaagaaaaaaaaaagaaagaaacacagcaactgtagatgctcctgttcctggttcccgctttccacttccaaatccctcccctcaccttcccccactgccccccaagttccaggctcagtcttccagccgcctggggagtctctacctgggcccaagcaggtgtggggcctccttctgggcttttcttctgaatttagaggatttctagaacgtggtcaggaatagccattctaggcggggctggggccagggtggggggcagtcactgtgggaggtcccagctccagcccccctctggtttgctgcctcctctcccctctaaaaaagtcttccgcttgattttgcacaatcccggcgatactcctggcgatactgactagaaagtcagggagctgggggagctgttcactttaggatacgggggtggtatggaagggagcgttcacaccgccagcctcgggcctgggatttgaggagggccctagacctcctccactctccatcccctttcccttccactttgggttcactttgaattttctccgttttttggggcagtggctctgatccactcacccccccgccccccgccccacttctagctgcttctcctcttgtttctgccttaataattcccacggccacaggcaagggggttgcagtggccgcctgcaccttggatgaggcagggccaggcgcccagaacccccatcctggccgcacccccctttccagggtcctccggaccccaccttccacactctgatcacagcccccctaccttttgccctaggaggaagcaataatggtgtataccctcattctcattcctgggcagcccttccttccaccctggcaccaaaataatttctcctccatccgtaccttgcctagcctctccctctcccccagctagtccctgagcaatacggcagacagatgcaagaccatttttctccaagccatgggggactgtttggaaggaaagccccctctctccctcctcccctcgccctcggcctggttctgcagctggaccgacctcattcatcgcctgccccctacccaattctgagcacacggtactgtagcccccagttcctccctagccttccatccctctgtccaccccagggggaggtaaccccgcactcacactcccttgatgctgtctgtacagggttcatattttgtagcgaaagtcgtttttgtcccagccggcgatcggagtgggccttttctttctttttgttcattctttacctttttttcttttctttctttcttttttgtacatactgtaaggttggtttgtaaattattctacggaggcaaaaagggaaaataaaaacttgcccttccctggctgacccagtcgggaaggtagggaaggaggtctcccgttgggagagtctctgttcctgctgtattatacaaactgtaccatagtcctgggaaaagggtggactcaccgctgttgttttatgggaagtcgtgtcatcctaggggttggggctgggcagagcctgtcccctccccccttctccaggagccagggggtgactggagagacagacccacccccaagcagggctcctctccccagggtgagcacaggacctctgtaagctgcttgtgtattgtccactttgacgatcagtcattcggtccgttgatcaataatccttcgatcttgtctccaattaaaccgaggctttcaccg

SEQ ID NO: 7969 - DNA, 350 bp, Homo sapiens
agggaggggatgaggggaaagatacaacactatttatttttttatttatgtcatgtcgggtgtgggatcttgagctctggcagtgatgatggtacttcctgttgtcagcccctcaagcccagctgcaaccagtctggggccattcagccagggacagagcccacagagcccatacacctgtctcccaccagcggggccctcctggcagggtagggaaggaggaccccgggcacccccctcagggcctgactcacgtactgtagtttgcactggacgcccgggccctccctgtcccaaagcccccttgggggaactgtggctgctgggggccaataaagctgtgtaacttg

SEQ ID NO: 7970 - DNA, 1171 bp, Homo sapiens
aggccccgtgctccccacctctcaaggagtctcatgccgcagggtgctcagtagctgggtctgttcccccagccccttgggctcacctgaagtcctatcactgccgctctgcccctccccatgagccagatcccaccagtttctggacgtggagagtctggggcatctccttcttatgccaaggggcgcttggagttttcatggctgcccctccagactgcgagaaacaagtaaaaacccattggggcctcttgatgtctgggatggcacgtggcccgacctccacaagctccctcatgcttcctgtcccccgcttacacgacaacgggccagaccacaggaaggacggtgtttgtgtctgagggagctgctggccacagtgaacacccacgtttattcctgcctgctccggccaggactgaaccccttctccacacctgaacagttggctcaagggccaccagaagcatttctttattattattattttttaacctggacatgcattaaagggtctattagctttctttccgtctgtctcaacagctgagatggggccgccaaggagtgccttccttttgctccctcctagctgggagtgacgggtgggagtgtgtgtgcccaggtgggggtgtctcctggctgggaaggagggaaagggagggagagttttgcgggggttggcagtggagagcaggctggagaggagatggctaatagctgtttaatggaaacctgctgggctggagggagttaggctgaatttcccgacttcctctgccagttattgacacagctctctttgtaagagaggaaagaaactaaacccacccaagggatgatgtcagggggagaggtggagggcagatgtcctgggcaaaccgggcccctctgcccacacacctcacttgatccttttgccaaacttgtcaaactcaggggaactggcttcccagttgcccctttgccatattccaagtccccctcagacttcatgtctctgctcatcagcactgtcccaggatcctggagagggagaactcctggccccaggggaaagaggggggggtctcccgtttcctgtgcctgcaccagccctgcccccattgcgtctgcacacccctgcgtgtaactgcattccaaccactaataaagtgcctattgtacaggt

SEQ ID NO: 7971 - DNA, 3105 bp, Homo sapiens
gcccccgcggggcggagatttctaccttctgcacttactccccatcagaagatcgagttttatgcatcacagttaacatgtcagctggccctccaggcccccgcccccatcccgtccacgttgctgtgtcgtgaggtgcagcgggtcaccctgtggcccgtcctgtgacccatatttagccgtgtttgggactccgtgtcttcaatggtttgttagttgccattacaactttgtctgggtagagtttttgagtttttgcagttcagtatccctctgtctattcacacttcgtgttagtggtaactcagtttgtctttaaatagttacagaagggatacgtcatttgttaatgcttttgtgaagtgagttaaacgagctttctgtattttaatgctttagtgtttcagttttataagtgaagattttattttaaaaaccagtgggaaagagtggggggtttctttttatgtctgggtcattcaggcagtacatctgaattaagctgaatgtagacaaataaagaaaaacaaaactgcgcccgtcttaggcctgggtgtctgacccaccagcagtgcaatgggcaggtttccccactctattcctgctcttgggaaagcagcgtgggccatcaggatggtccctggtccttagagagggtccagttcaggcttctagacattttactcatgctcagcgaaggctggttcctggtcccctgggctgtgtagacccggtgtcccaccaggctccaggctcccaccatctacagaggggcttacagcgcccattctggtcttggggaacccatcacaaaataggctttttctgctccccgattctggtgtagttctaagtacacagtgatgtcctctgtaggggcgtgcctgtggtggaacataacgcagttacaaaagaaagggcaggtgaggcctgggtaaccccagccatggaccgtcagtggctggagggagcttcgtgtctgtgctggagctgcagcctgctcgccatctggaggctcagtggagtggggagttggggttctcataccagcagatttccctagagcgtgattctcccatctgaggcaatcttgcctcccaggggaaattttgcaatgtttggaggatgttgtcacagctagtagcgggtgctctgggatctggtggatagatgccaaggatgctgtcaagcatactgtactgcccagaacagtggcccatagcagggacctgccctatcaaaatatcaggtgtatggaggtggagtcccaacgctagagcagcccttctcagctccaccctgcccggggagggaggaggagctctggtttcagagcagtgccgggattgcctttccccaggatctgtgtcggccatccaggaagaactgtactggccaagcctgggaccacacgtctgcagagatcctgctctgctggcctgagccccaggccttggcctcctgtgcttgggtaaccatggccactgggaaaagcaaggaccgtgtttgactttcttggagaggtgaaagaggtgaaagaacaagttgtgtgctagaaaacttttgaggaattcttatttgtgttagagcagaggaggtcccagataccaagtggcgcctcccaggaaaggctgggagaagaggtggcctggagtaccccgagatcccagcagcgcacacagtggagggatgaggatggatgggtcctaacccctgattttgatgggatgtgttcatgtcctatctcctctcctggacacattaaggggttgggacaagaagagactcctgtgagatcagcagacctcgtgtttaaggagagaatgcctgcctgcaacactcatggagagggacacttcctggccccacctgctaaatacctccaaactctgggcaggcgcctgcattctcaacacaggacttcccttaacagtttccggatcagtgaccaccaccacgttcaggtttctgaatgcagacccaccacgagggatggattccacccgcccgccctgctgcagatacatgcggcacagcaggcacgtgcctggagagaacagctcctgagcacagcacccttggagccctcaccccgctcacgatcctcaccagtgctgatgatgccgtcatgctgctggcctgagacagtatcccagctacaacaggacgacaccgggttcaggaatatgtggctatcaccttgagcactgacagtggccttccaggctagttgccttccaaacgcaggtagccgacctgcaggagggcctacaaacgggcccagcaagagctgggcaacagctggcttgtgaaatgagacaccttgaccaatatgctttgggtggacggtctcctacatgttcagtggaggccaccaggagcatccatgagcggggaaggggtccacacccttacatggcaagttgatacgatggggtgcttggtggatgggccatggaggtccgtgagctggaactgggcacacgccatcccagagggctcaggatgccccaggaaggaaagaagggcaacagactacacgattggacgtgtgtggttgactgggatgaagttggagggaggggcagggccttgcaggggattggtactgatcccagggaggaagtgttggggcttcatgaactaggatgaaaggaggcccctgagccatgacaaggggcacatccaggatttccgccaccctgaatttagtagagctagtaggccctggtcgtcactctgggcagggatgccgtcagccttgagggtcgccacccacctgtgtgttgccctctgtcctggcagggaaacatacaccccttgtctcaccaccaaccttgcttgtgtagtcagcagggctggccctgccccaaggactcactgcatgtacccggacccctaggcctggcctttgcagcatagttgggagcttctggattccatctgcacctgtgagccccatgctggctgtgcactgcgcgggcctgagactgctggatacaatgttgggcaacaactcagccagcctgatggcagcctcagaggcttactctaacccatcccagaataaatggagacttcatgtgttcattgtttcattcactc

SEQ ID NO: 7972 - DNA, 1302 bp, Homo sapiens
agcgtctaaaagtattgcacacaaaatcaactttttactccaatttcctccaactccaaaacccaaagtgtccgtgctgtgtccctgtgcttcactgggtttctcaaccgtggcttttcaccgcagcttgtctgaaactcttagcctgcagaatttaagacaatggcagtttttatcgtgatttgcctttgaacttggtcctattgaagttcacaataagtggaaaacaattttttcagagaatgtatttttgtgcagaattgcacagaattctagagacagcgttgttcggcatcaaggcaaaagcccacctttgctttttatggaaagcattactttatttaaagagacagacaatgacgcattttaatctacctttgtcttaatttacagcaggttttgtatgaatttttaaccttttaacaaactcccaaatctggttgatgcctttgacagtgatgaaaacgatttcaccacatctgaatccagagaaaccggctttttttcttattgcgagcatgttaaaacgttgggaacatgtggggaattgtatattgcgctgaattaacttctcccgcctcttgtaatgctctggtgggttcttgtttgggaatgcgatattttgtggctggtttagctagagagtgaactctcaaaggtatcaaaactgtgcttccattattagtgcaagaaacagacaggctttaaggggtagatgacgtgaaattttgcaagtcttaattacagctgcagatgcatgggattctggatttttttgttgctttttagtttaatgggactttaaaagtaattgaggagaaagaaccgtgatgttccctgtttctccagtaaaggactggcttttgcttgggcagaggtggtgctgctgggtgtgcagctgccacagactccaaaggcgtagaagtttgtgccaacacacggagtcattctggctctctgctgaggcccctgttttctggcaggtgccctccttggaaactggttttggctctgatcagcggttctttttgcagcaaagcctgcatctgtgttgacttgcaagattttgcgtttattcaggcaaaaactggtcaaaatggttactacatgatttgttcccagaggtttgaaacattcagtgaaactttttaaaactttgattgcatgatgtattttttttttagaaagttattgtttgagaataatgtctttttataccaggaaaatagttatcctgaatgacgttgaaaactccccctcccctttatttttttttaatcaatacatgtgaaagtaacaagc

SEQ ID NO: 7973 - DNA, 94 bp, Homo sapiens
cctggcattgggagagggagggaggaaggaagggagggaggggctggaagatactgaaggattcctttttgaaaggttttttttattgtaactt

SEQ ID NO: 7974 - DNA, 856 bp, Homo sapiens
gcctcgaggggggcgtgctctcgggggggcctcacgcacccgcggcgcaggagcttcagtggtctggggccctccgccgcccctatgctgggaccaggctcccagtgggcagccctggcctcttccttaacgctggccccggtccagggccggcccctgtgcctggctggacaccgcactgcgcaaaggggccctggagctccaggcagggggcgctggggtgttgcactttgggggatggagtctcagggtggcagaggggggaccagaacccttgacaccatcctgaatgaggggtccagcctgggggggactctaccaaggtcttcttgggctgggaaagcccatgtagggcaggccttctataagtgcgggcaccaagggcgcctacatccccaggccttgctggggtgcaggggtatatcaacttcccattagcaggagctccccagcggcaagcctggcccagtgggctcggtagtgcccagctggcaggcctgaggtgtacatagtccttcccggccatattaaccacacagcctgagcctggcccagcctcggctgccagaggtgcctttgctaggcccggagccgttggcccgggccggccttgccctattcctctcctcctcctcctcctgggtcccccagggtggctgggcttgggctatgtgggtggtggtggcggggggtcttgggggcctctcagctcccgcccatgcctccctgatgggtgggcccagggcggcctctctctgaggagacctcacccactcctcgctcagtttgaccactgtaagtgcctgcactctgtattctattaataaactaaaataaagggaagacgctgctggtg

SEQ ID NO: 7975 - DNA, 1014 bp, Homo sapiens
gggcccgccccgcggactgacagcaccaggaaaccaaatgatgtccctgcccgccgcccccgccgggcggctttcccccttgtactggagaagctcgaacacccggtcacagctctctttgctatgggaactgggacacttttttacacgatgttgccgccgtccccaccctaacccccacctcccggccctgagcgtgtgtcgctgccatattttacacaaaatcatgttgtgggagccctcgtcccccctcctgcccgctctaccctgacctgggcttgtcatctgctggaacaggcgccatggggcctgccagccctgcctgccaggtcccttagcacctgtccccctgcctgtctccagtgggaaggtagcctggccaggcggggcctccccttcgacgaccaggcctcggtcacaacggacgtgacatgctgctttttttaattttatttttttatgaaaagaaccagtgtcaatccgcagaccctctgtgaagccaggccggccgggccgagccagcagcccctctccctagactcagaggcgccgcggggaggggtggccccgccgaggcttcaggggccccctccccaccaaagggttcacctcacacttgaatgtacaacccaccccactgtcgggaaggcctccgtcctcggcccctgcctcttgctgctgtcctgtccccgagcccctgcaggtccccccccgcccccccactcaagagttagagcaggtggctgcaggccttgggcccggagggaaggccactgccggccacttggggcagacacagacacctcaaggatctgtcacggaaggcgtcctttttccttgtagctaacgttaggcctgagtagctcccctccatccttgtagacgctccagtccctactactgtgacggcatttccatccctcccctgcccgggaagggaccttgcagggacctctccctccaaaaaaagaaaaaaagaaaaagaaagaaaaaataaatgaggaaacgtgttgc

SEQ ID NO: 7976 - DNA, 536 bp, Homo sapiens
aaccctgaggcccccgagtcctggcaaactgcttgcctggggtggtgcagttctgagtgtgcctcacctgcagaacagctgagacagatgatgtgcaaagtgttttctcactggatttgcacaagtttggggagcctttctgccccccgtctttgttctttattagctgaagctaattcagagccacctgggtccgggagttggggacagcagaacgacttgacacatgttcatcactggcagagctggtcatgagccttttatataagcctttttcatcgggcctcagaggccctccttaaggaggtaccacattggtcagctgacttgcaaactcttctaaggccacttagattttctttttcaagtttgggttgtggcctggcatggtgatgtctgtaatcccagcagtttgcaaactgaggcaagagaatcgcttgaggccaggagtttgaggccagctagagtgacatagcaagactccgatgctacaaaaaagaataataatagtaattaactaaataaaatttgagctg

SEQ ID NO: 7977 - DNA, 460 bp, Homo sapiens
gccccgacattccagtctcgaccccgagcccctcgttccagagctgagatggcataggccttagcagtaacgggtagcagcagatgtagtttcagacttggagtaaaactgtataaacaaaagaatcttccatatttatacagcagagaagctgtaggactgtttgtgactggccctgtcctggcatcagtagcatctgtaacagcattaactgtcttaaagagagagagagagaattccgaattggggaacacacgatacctgtttttcttttccgttgctggcagtactgttgcgccgcagtttggagtcactgtagttaagtgtggatgcatgtgcgtcaccgtccactcctcctactgtattttattggacaggtcagactcgccgggggcccggcgagggtatgtcagtgtcactggatgtcaaacagtaataaattaaaccaacaacaaaacgc

SEQ ID NO: 7978 - DNA, 2498 bp, Homo sapiens
acatctgcctggagtcccgtccctgcccagaacccttcctgagacctcgccggccttgttttattcaaagacagagaagaccaaagcattgcctgccagagctttgttttatatatttattcatctgggaggcagaacaggcttcggacagtgcccatgcaatggcttgggttgggattttggtttcttcctttcctcgtgaaggataagagaaacaggcccggggggaccaggatgacacctccatttctctccaggaagttttgagtttctctccaccgtgacacaatcctcaaacatggaagatgaaaggggaggggatgtcaggcccagagaagcaagtggctttcaacacacaacagcagatggcaccaacgggaccccctggccctgcctcatccaccaatctctaagccaaacccctaaactcaggagtcaacgtgtttacctcttctatgcaagccttgctagacagccaggttagcctttgccctgtcacccccgaatcatgacccacccagtgtctttcgaggtgggtttgtaccttccttaagccaggaaagggattcatggcgtcggaaatgatctggctgaatccgtggtggcaccgagaccaaactcattcaccaaatgatgccacttcccagaggcagagcctgagtcactggtcacccttaatatttattaagtgcctgagacacccggttaccttggccgtgaggacacgtggcctgcacccaggtgtggctgtcaggacaccagcctggtgcccatcctcccgacccctacccacttccattcccgtggtctccttgcactttctcagttcagagttgtacactgtgtacatttggcatttgtgttattattttgcactgttttctgtcgtgtgtgttgggatgggatcccaggccagggaaagcccgtgtcaatgaatgccggggacagagaggggcaggttgaccgggacttcaaagccgtgatcgtgaatatcgagaactgccattgtcgtctttatgtccgcccacctagtgcttccacttctatgcaaatgcctccaagccattcacttccccaatcttgtcgttgatgggtatgtgtttaaaacatgcacggtgaggccgggcgcagtggctcacgcctgtaatcccagcactttgggaggccgaggcgggtggatcatgaggtcaggagatcgagaccatcctggctaacacgtgaaaccccgtctctactaaaaatacaaaaaattagccgggcgtggtggcgggcacctgtagtcccagctactcgggaggctgaggcaggagaatggtgtgaacccgggaagcggagcttgcagtgagccgagattgcgccactgcagtccgcagtctggcctgggcgacagagcgagactccgtctcaaaaaaaaaaaacaaaaaaaaaccatgcatggtgcatcagcagcccatggcctctggccaggcatggcgaggctgaggtgggaggatggtttgagctcaggcatttgaggctgtcgtgagctatgattatgccactgctttccagcctgggcaacatagtaagaccccatctcttaaaaaatgaatttggccagacacaggtgcctcacgcctgtaatcccagcactttgggaggctgagctggatcacttgagttcaggagttggagaccaggcctgagcaacaaagcgagatcccatctctacaaaaaccaaaaagttaaaaatcagctgggtacggtggcacgtgcctgtgatcccagctacttgggaggctgaggcaggaggatcgcctgagcccaggaggtggaggttgcagtgagccatgatcgagccactgcactccagcctgggcaacagatgaagaccctatttcagaaatacaactataaaaaaataaataaatcctccagtctggatcgtttgacgggacttcaggttctttctgaaatcgccgtgttactgttgcactgatgtccggagagacagtgacagcctccgtcagactcccgcgtgaagatgtcacaagggattggcaattgtccccagggacaaaacactgtgtcccccccagtgcagggaaccgtgataagcctttctggtttcggagcacgtaaatgcgtccctgtacagatagtggggattttttgttatgtttgcactttgtatattggttgaaactgttatcacttatatatatatatatacacacatatatataaaatctatttatttttgcaaaccctggttgctgtatttgttcagtgactattctcggggccctgtgtagggggttattgcctctgaaatgcctcttctttatgtacaaagattatttgcacgaactggactgtgtgcaacgctttttgggagaatgatgtccccgttgtatgtatgagtggcttctgggagatgggtgtcactttttaaaccactgtatagaaggtttttgtagcctgaatgtcttactgtgatcaattaaatttcttaaatg

SEQ ID NO: 7979 - DNA, 152 bp, Homo sapiens
agcgatccccccgcctaggcctcccaaagtgctgggtttaccagcgtgagccaccacgctgggcttcctgcatccttttaaggttcctgagggtctgcctgagaggagctgtccctgaatctccatgcagccccacctgccacatcaccaag

SEQ ID NO: 7980 - DNA, 1317 bp, Homo sapiens
tccccagctgtgtctcctccagggccccagccatgtgttcgtcgccccgtgtgccccgtcctcgattgaggtctgagccgacgcccttgcccctgcccctacccctgccagcgcccacccccagccagggcccctcgccttcctcccctggacctggggggccaggcgggggtggtggacgtggccggaagctgctgctgcccacgcccctgctgcgggacctgtacaccctgagtggactctatccctcccccttccaccgggacaacttcagcccttacctgtttgccagccgtgaccacctgctgtgaggcccgaccacccacccagaatctgcccagtccccacttcttccctgccacgcgtgtgtgtgcgtgtgccacgtgagtgccaaagtcccctgccccccaagccagccagacccagacattagaagatggctagaaggacatttaggagacatctgcctctctggccctctgagatatcccgatgggcacaaatggaaggtgcgcacttgcccctactattgcccttttaagggccaaagcttgaccccattggccattgcctggctaatgagaacccctggttctcagaattttaaccaaaaggagttggctccaaccaatgggagccttcccctcacttcttagaatcctcctgcaagagggcaactccagccagtgttcagcgactgaacagccaataggagcccttggtttccagaatttctagagtgggtgggcatgattccagtcaatgggggaccgcccgtgtctaagcatgtgcaaaggagaggagggagatgaggtcattgtttgtcattgagtcttctctcagaatcagcgagcccagctgtagggtggggggcaggctcccccatggcagggtccttggggtaccccttttcctctcagcccctccctgtgtgcggcctctccacctctcacccactctctcctaatcccctacttaagtagggcttgccccacttcagaggttttggggttcagggtgctgtgtctccccttgcctgtgcccaggtcatcccaaacccttctgttatttattagggctgtgggaagggtttttcttctttttcttggaacctgcccctgttcttcacactgccccccatgcctcagcctcatacagatgtgccatcatggggggcatgggtggagcagaggggctccctcaccccgggcaggcaaaggcagtgggtagaggaggcactgcccccctttcctgccccctcctcatctttaataaagacctggcttctcatctttaataaagacctgtttgtaacag

SEQ ID NO: 7981 - DNA, 935 bp, Homo sapiens
gctttggtgggtgactacctctctgtgcttcagtttcccatggctggaatacttacctcagggacatatgcagatccaaagacctaaacaatgtaaagtgctttttctcttttaaaagtatagcattatcttgtatatattttacccaatcaatatgttgtttatagtttcattgctttaaactttataaaaagagcttcaggccaggcgtggtggctcacgcctgtaatcccagcactttgggaggctgaggcggtcagatcaccagaggtcaggagttggagaccagcctgcccaacatgatgaaaccctgtatcaactaaaagtacaaaaaaaattagctgggtgtggtggcaggtgcctgtagtctcagctactcaggaggcttaggcaggagaattgcttgaacccaggaagcggaggttgcagtgagccgagattgtgccactacactccagcctgggtgacaaagcgagactccatctcaaaaaaaaaaaaaaaaaaaagtttgagacttccttctttttgcactcaacgttgttactaagattcatctacatttttttagttcattcctttttccatattgcatataattccatgggtgactataccctgatttcttcatcagattgccttatttactgctgcgaacattcttgcacacatgccctggtacgtgtgtgtgtttttaggggccgagacaggtggatcacctgaggtcaggagttcgaggtcagcccggcctacatggtgaaaccccgtctctactaaaaatacaaaatttagccaggcatggtggcatgcacttgtactcccagctacttgggaggctgagacaggagaattgcttgaacccgggaggcagaggttgcagtgagctgagatcgagccactgcactccagcctgggtgatgaagacgagactctgtctc

SEQ ID NO: 7982 - DNA, 320 bp, Homo sapiens
aacctcaagaaggcatgaagccagcccctgcagtgccgtccacccgcccctctgggcctgcctgtggctctgttgccctcctctgtggcggcaggacctttgtggggcttcgtgccctgctctggggcccaggcggggctggtccacattcccaggccccaacagccttcaaagatgggtaaaggagcttgccctccctgggccccccaccttggtgactcgccccaccacccccagccctgtccctgccacccctcctagtggggactagtgaatgacttgacctgtgacctcaatacaataaatgtgatcccccaccc

SEQ ID NO: 7983 - DNA, 528 bp, Homo sapiens
ggccacaaggccttccctgttttccccccaagggaggctgctgctgctcttggctggacccagccaggcccagccgaccccctctccctgcatggcatcctccagcccctgtagaactcaacctctacagggttagagtttggagagagcagactggcggggggcccattggggggaaggggaccctccgctctgtagtgctacagggtccaacatagagccgggtgtccccaacagcgcccaaaggacgcactgagcaacgctattccagctgtccccccactccctcacaagtgggtacccccaggaccagaagctcccccagcaaagcccccagagcccaggctcggcctgcccccaccccattcccgcagtgggagcaaactgcatgcccagagacccagcggacacacgcggtttggtttgcagcgactggcatactatgtggatgtgacagtggcgtttgtaatgagagcactttcttttttttctatttcactggagcacaataaatggctgtaaaatctc

SEQ ID NO: 7984 - DNA, 1270 bp, Homo sapiens
gcatgaaaggagtcacatagagaaaccccatgaaagtaagaaatttgggaaagccttcagtcctttctgtttctttcaactacgtgaaaggattcacagtggagaaagaccctgtaagataattggctttaaattacgagagacttgtgataggacagtaaaacctagagttggagttggatctctggattgtgttatgtcagtgttggtaggttaggaactagatttcccagaatccattccatttgtgattccatgatacaattcaccagtaacctatcttacatgagattcggaagtaagttaagaaggcattagtcatggtttggaagcaccatacagggagacagctgtgtgaatacaggctgtatggacacttgcttccatcccattttcctgcttctttgggttgccaatcaagagtatcctcaaaacgacttgactttaattttctcggaggtgataggcttccacacaggtctccagaagccctgcattgaatatccatccacactttggttttccttcagacattattatgtctgtactaggcaactaattcagactgtcctggttgggaatattctgtgatgctctgactcccctagtctgtagacggaattggcatacggtctaatttgtgtagtaagcacctttgttcatactagtagtgactgtattcttgattcagcctgatagctaccatgctgctgtcaaaaccaaccagaggggagcttgttcttctgctgtagtgtgcagtgactggcctcacccaggactttgatgtgagaatgagcactttcctctatcaggaaatttcaagtgtttcctgttattcgtagctcaatgtaatgcctcagttcattttcagttgtttgattatatgtgactaatatgtattttttattcaaacaagacttctgtacatgtttcttcaaaacagtttattaactgtcttcagtcttggattacatcaagtttataattttggcaaattgttaagacactgtgaagtcagcgttaaccatgtgcatacaacttaaggaattttttcctcctcatgtaaattttacttttcatgcttatatagtttcaacttttatcttcatagtaatttctcatctactcataataccaaaagttaagtcatgctgttttgtgtgctctcttgctaaagaccgcagagaccatacctgttgtcaaagagggtgtaataaactgtaataataatcatgaccacaaaccataaaggactgtgtgatgtatcagt

SEQ ID NO: 7985 - DNA, 779 bp, Homo sapiens
ttctaagtacttaaaaatacatggaagaactcacactggagagaagtcctatgcagtaaagaatgagggaaagtattttattgtctcagtccccttcaaagacatgaaaggactcacatcagagaaaagttgtatgaatgtaaaaaatgtgataaagccttccattcgtccagtactgttagaaaccatgaaagaagtcacatttaagaaaaacacagtgatgttaggaatatggggaacctttcctttctcttccagtctttggaaggcacagggtatgacacactggtgaccttataactgtaaggagtgtggataagtatttattagtccttgtgtgttttagatacatgaaagaatttactcaaaaggaaactctatgaatgtaaagaatgtggtaaaacctgtgtagtttcagtttctcttgaataaagtcatttcctggtattctcaggggattggttccagcaccccttgagaatatataattttgctcaagtgctttacagaaaagtgtatttgcctataactaggcaatcctgtatactttaaatcatctctagattacttataatacctaatgcattgtaaatgctatgaagacaactgttttattgtatttagggaagtatgacaagaaaaaacatctgtacatattcagtacagacacaaccaccatacggctacctacctagtacacatcatctacaatataacattttctttttaaaaaacagttatggattggtttcattaaatgacctgcaagcgtgtgttaa

SEQ ID NO: 7986 - DNA, 580 bp, Homo sapiens
agaaaacccctatgagtgttgaacatgtgagaaagccttaagtactttcagcttcttacaaatacataagagactcacactgaaaaaagttgtatgaatataaaaatgtactaaaaccttccatttttttcagtaccttttgaaaacatgaccaaactcatacttcaaaaatatatatataatgaatgtgaggaatatgaaaaaactttctttgtctagcaaactttcaaaggtggttattataacatactagcaatggaccttactactgtaaggaatgtagaaatgcatttactagtcctaattcatttcagttacatgaaagatttcaaactgcagagaaccactatgaatgtaaacaatgtggtaaagcatttagtagcttcagtttcttttgaatacagtcttctctagtttctgaggtgaattgattccagcaccctcaggaatacctatattcagagatattcaagtccctgatattaaaaacagcatatttgcatataatctaggcacatttttctgtatatcttaaatcatttctagattacttataatacacaatgcattgtaaattctg

SEQ ID NO: 7987 - DNA, 1224 bp, Homo sapiens
gagaaatgctattttttaatttttattttaatagagacagggtctcactatcttgtccaggttggtcttgaactcctggcctcaagcatccctcccagcttgaagtgtcaataaaggaaggcaataaaatgtagagatggagttaggtgatgccacgctgggattcactggtggcctatcttacatatgatttcgaaggcagacatgaggaaggccttagtcacattttagagccagccaaattcacatgggctgtgtggccccctgattctagcccattttcctgattctctggcttgtcaatcaagagtatcctccaaatctcttgactttccttttttcagaggtgtaggtttccaaagatgtccccagaagctccacattcaagttctatctacagtttggtttttctttaagtattgtaatgtacataccagagagataatgcagactgtcatgggtggggaatgttctctgatgctcaactcccctagtctgcagattgagttggtaggaggtgtgatttgtttacatgcacctttgttcctgctggtagtgaccttgttcttgattcagcctgacagctactatgctgccatcagaaccaacttgatgagagctctgctgccctgtgcagtgactggtctcatccaggactctcatgtgagaaggaacaccttgctctggtcaggaaatgtccagtgtttcctgttatccacaggagaatgtaatgcctcagttcattttcagttatctttgattatatgtgattgacaatgtgtatttttgagggagcaaagatttctgtacatatttcttaaaaatagtttattcagctgggtgcagtggctcatgcctgtaaccccagcactttgggaggccgaggtgggcggatcacgaggtcaggagtttgagactagcctggccaacacagtgaaaccccatctctactaaaagtaccaaagttagccgggtgtggtggtggatacctgtaatcccagctactcgggaggctgaggcaggagaatctcctgaacctgggaggtggaggttgcagtgagccaagatcacgccactgtactccagcctggacaagagagcaatactctgtctcaaaaaaaaaaaaaaaggtttattcactgtttttcagttgtgtacttgcaaatgtttttctcttttttttgtatactgagaagctctattaaaatatcccttgtcaacatg

SEQ ID NO: 7988 - DNA, 2237 bp, Homo sapiens
tgcactctgtagagagaccttataaatgtaagatatgtgggaggggcttttattctgccaagtcatttcaaatacatgaaaaatcttacactggagagaaaccctatgagtgtaagcaatgtgggaaagcctttgtttccttcacttcctttcgatatcatgaaaggactcacactggagagaacccctatgagtgtaagcaatttgggaaagccttcagatctgtcaaaaatcttcgatttcataaaaggacacacactggagagaaaccctgtgaatgtaagaaatgtagaaaagcattccataatttctcttctttgcaaatacatgaaaggatgcacagaggagagaagctctgtgaatgtaagcattgtgggaaagcattcatatctgccaagatcctttgaatacatgcaagaacacacaatggagagaaaccctatgaatgtaaagaatgcagaaaagcattcagcttgcctacttcctttcatagacatgaaaagactcacactggaaggaaacactatgaatgcaagcaatgtggcaaagctttcacttcttccagttcttttcaatatcatgaaagaacacactagggagaaaccctatcaatgtaagcaatgtgcaaaagcctttatttcttccacttcttttcaatatcatgaaaggactcacatgggagagaaaccctatgagtgtatgccaagtgggaaagccttcatttcttctagttcccttcaatatcatgaaaggactcacactggagagaagccctatgaatataagcaatgtgggaaagccttcagatcagcctcgcaccttcaaatgcatggaaggactcacactggagaaaaaccctatgaatgtaagcagtatgggaaagcgttcagacctgacaagattctttgaatacagataatgaatgtaaacaattaactgtttataataactgtatactaacaaatgatattctttttaaataagaagctataatatcccattggtgtcatgtattagatcagccttatactgttaaattgttattatttggacattgtgagtcagtataaccatgtggataaaatgccagacatctttttattcgaaaattttacttttcatgcttctgtacttacatttttatctcaaccttaatttttctttctttttttttttcccccagaaagaatctcactctgtcacccaggctggagtgcagtggcatgatctcaggtcactgcaacctctgcctccagggttcaagcaattctcctgcctcagtctcctgagtagctgggactacaggcatgcgccaccatgccaggctaattttttgtattttttagtagagacggggtttcaccatattggctaggctggtctcaaactccagacctcatgatttacccacctcggcctcccaaaatgctgggattacagacatgaaccatcatgcccagctgcaaccctaatttttcattcagtcataataccaatagttatctcatgcacctctgagtgccttcttccccaaaaccagcagtgccatacctgctgtcagcaagggtgtaatataccatagtgataaatatgaccaaaagccataaatgactgtgagatgtatgagaattacaagtcacattagtaagaagagaaaaattttggtcatgtttatgatttgaaatacgttttcctctatcacatttaaaaatatagttacaaaatgcccttgtttttgtcctgattcatcatggtcactgaggagcatcgtctcatatgcctggtatgtgacacgtgtctctccaacaataaaagacttggccttggctgggcatggtggctcacgcctgtaatcccagcactttgggaggccgaggtcaggagttagagaccattctgaccaatatgatcaaaccccgtctctactaaaaatacaaaagttagcagggcgtggtggcatgctcctgtaatcctagctattcaggaggctgacataggagaattgcttgaatataggaagcagaggttgcagtgagccgaggttgcaccattgtactccagcctgggcaacaagagtgaaactctgtcttaaaaaacacaaaaaaagacttggccttagggccgagtgcggtggctcacgcctataatcccagcactttgggaggccgaggcgggcggatcactaggtcaggaaatggagaccatcctggccaacacagtgaaacccagtctctact

SEQ ID NO: 7989 - DNA, 922 bp, Homo sapiens
atataagatatatgggaaacacttttattctgccaagttatttcaaacacatgaaaaaattcacactggagagaaaccctataaatgcaagcaatgtggtaaagccttaattgttccagttcctttcgatatctaaaaggactcacagtggagaaaaactctatgagtgtaagcaatgtgggaaagtcttcagatctgtcaagaacctttcaatttatgaaaggacacacactggagagaaaccctatgaatgtaagaaatgtggaaaagcgttccataatttctcttcttttcaaatacatgaaagttgcacagaggagaggcgccctaagaatgtaagcattgtgggaaagcattcatatctgccaagatcgtttgaatacatgcaaaacacacactggagagaaacctatgaatgtaaggaatgcaaacaagcattcaattatttttcttccttgcatatacatgaaaggactcatacgagagagaatccgtatgaatgtaaggattgtgggaaagcattcagcttgcttaattgctttcatagacatgtaaagacacaccagaaggaaaccctatgaatgtaagcaatgtggcaaaagctttcacttcttccagttcttttcaatatcatgaaaggactcacactggggagaaaccgtatcaatgtaagcaatgtgggaaagccgtcagatcagcctcaagacttcaaatgcatggaagcactcacacttggcagaaactctatgaatgtaagcagtatgggaaagccttcagatcggctaggattctttgaatacaaataatgaatgtaaacaattaactgtttataataactgtatactaacaaatgttattctttttaaataattaagaagctataataaaatatccattggtgtcatgtattagatcaagctta

SEQ ID NO: 7990 - DNA, 905 bp, Homo sapiens
aaaaatctcactctgtcacccaggctggagtgcagtggcatgatctcaggtcgctgcaacctctgcctccagggttcaagcaactctcctgcttcagcctcctgagtagctgggactacaggcatgcaccaccacgccaggctaattttttgtattttttagtagagacagggtttcaccatattggccaggctggtcttgaactccagacctcatgattcgcctgcctcggcctcccaaaatgctgggattacagatatgagccatcatgcccagccgcaaccctaatttttcattcagtcataataccaacagttatctcatgtacctctgagtgccttcttcccaaaagccagcagtaccatacctgctgtcagcaagtgtgtaatataccatagtgataaatatgaccaaaagccataaatgactgtgagatgtatgagaatgacacgtcacattagtaagaagagaaaaattttggccatgtttatgatttgaaatatgttttcctctatcacatttagaaatatagttacaaaatgcccttagttttatcctgattcatcatggtcactgaggagcatcgtctcatatgcctggtatgtgacatgtgtctcttcaacagtaaaagacttggcattggctgggcatggtggctcacgcctgtaatcccagcactttgggaggccgaggtcaggagttagagaccattctgaccaatatgatcaaaccccgtctctactaaaaatacaaaaattagcggggtgtggtggcatgctcctgtaatcctagctattcaggaggctgacgcaggagacttgcttgaatataggaggcagacgttgcagtgagccgaggtcacaccattcactccagcctgggcaacaagagcgaaactccgtttc

SEQ ID NO: 7991 - DNA, 509 bp, Homo sapiens
cctggttccttttatggacatgaatagactcacactggaaggaagcactatgaatgcaagcaatgtggcaaaactttcacattttccagttcttttcgatatcatgaaaggactcacactggggagaaaccctatcaatgtaagcagtgtgggaaagccttcattccttttacttcttttcaatgtcatgaaaggactcacacgggagagaaaccctatgagtgtattctagttccgtttgatatcatgaaaggacttacactggagtgaaaccctatgaatgtaagcaatgtgggaaagccttcagatgtgcctcgcaccttcaacggcatggaagggttcacacttgggagaaactctatgaatgtaagcagtatgggaaagccttcagatctgccaagattctttgaatacagataattaatgtaaacaattatcataagtatactaacatgttattctttttaaataagaaggtataataaaatatcccattggttttatgtatt

SEQ ID NO: 7992 - DNA, 1272 bp, Homo sapiens
atgttagatatgtgggaaaggcctttattctgccaagtcatttcgaagacatgaaaaaactcacactggagagaaaccctataaatgcatgccatgtggtaaagccttcaatctttccagttcctttcagtatcatgaaaggactcacactggagagaaaccctatgagtgtaagcaatgtgggaaagccttcagatgtgccccacaccttcgaaggcatggtaggactcactggagagaaaccctatgagtgtaaggaatgtgggaaagccttcagatctgcctcacaccttcaaattcatgaaaggacacaaacacacataagaatacactctggagaaagaccttataaatgtaagacatgtgggaaaggcttttattctcccacgtcatttcaaagacatgaaaaaactcacactgcagagaaaccctatgaatgcaagcaatgtggtaaagccttcagtagttccagttccttttggtaccatgaaaggactcacactggagagaaaccctatgagtgtaagcaatgtgggaaagccttcagatctgcctcaatccttcaaatgcatgctgggactcaccctgaagagaagccctacgagtgtaagcaatgtgggaaagccttcagatctgccccacaccttcgaatccatggtagaactcacactggagagaaaccctatgagtgtaaggaatgtgggaaagccttcagatctgccaagaaccttcgaattcatgaaaggacacaaacacacgtaagaatgcactctgtagaaagaccttataaatgtaagatatgtgggaaaggcttttattctgccaagtcatttcaaatacctgaaaaatcttacactggagagaaaccctatgagtgtaagcaatgtgggaaagcctttatttctttcacttcttttcgataacatgaaaggactcacactggagagaaaccctatgagtgtaagcaatgtggaaaaaccttcagatctacctcacaccttcgaaaacatggtaggactcacactggatagaaaccaaagcaggtgaatcacctgaggtcaggagttcaagactggcctgatcaatatgatgaaacccctgtctctactaaaactacaaaaattggccaggcgtggtggcctgcttctgtaatcctagctagttgggaggctggcacaggagaatcgcttgaatctggggggcagaggttgcagtgagccaagattgtgccattgcactctagcctgggcaacaggagcaaaactccgtctc

SEQ ID NO: 7993 - DNA, 1247 bp, Homo sapiens
tgctctgggttcatgtcagatacattaaaatactcactgaagagaagccctatgaatgtaagtaacgtgggaaagcatgaaattctgtcagtgccttttttaatacatgaaagaattctagagagaagccatatacatgtaagtaacatgggaaagctttcaatcattttagttcctttcaaatacatgaaagaactcatcatggagaaaaccaaacaaatgctttttggaaaggaacccatatttgagagaaaccctgggtaaagggtgtaggaaaggttttgtcatcacacaaccctgtcacacatgaatgtgtagtggagagaaccttggtaaatgtaaagagtgtgggagagcctttagtcattttagttccacttgaagccatgaaagaacacacaaaagagaaagctcttgaatataagcaatgtccacacgtttttagccagcccacatgctttcaacaacatgtaagaatgtaccctggatcaaaacactataaatgtgaaaactacaaggaaggttttccattatacttttaaagtcatttgagggctctggctctgtggctttgtgggttaaagtacttgtctggcaaacaggagatgctggatttcaatcccagcagggcctcactagttgaggtattgaatttgaacagatgttttggctctggctgggtgtggtggctcacacctgtaatcccagcactttgggaggctgaggcaggaggatcacttgaggtcaggagtttgagaccagtgtgcaaaacatagcaagacctcatctcagaaaaaaaaaaaaagtcatttgaaaacttctaatacagcaaaatcctataaatgtaagtacttcaaaaagcctcatgcatagcgggtcatgtagtctctagaaaatacataacctgatggaaatgtagaagctatatgtatattttgttaattagtggctcatatttaaaatagttctctgactatggatttcaaatgcttaatctcacaaagaaatgttaaattgatataatcctgtaagtaatctgaaagcaatagtgcatgaatttcataggtagtgttgttttaggtcagtaaataaaatatttgtctttccattttgaaatgtgtttaatccaacaatgaatttaaatgtgtttctcatattcaggtatgttaaattgtatatggttgcttaattgttctgtgattgaggaccactgaaaaataagtcttaataaatgttggtatgaacct

SEQ ID NO: 7994 - DNA, 602 bp, Homo sapiens
aaactctataaatgtgagaaataggagaaagttttcaattctaacagatgctttcaaagttgtgaaaattcccactgaagagagaaatcctgtcaatgtaagtaatatagaaagcgagatacaagatgattcatgtatagtcaggtaccacataatcatgtttcagtcagcaatggaccatataggttggtagccccataagattatataacacctaaaacatttctatcaaccgcaatttagtagcagtagtaacaccatagtgcagcacattatttaagtgtttatggtgctggtgtaaacgtgctgcactttcagttgtataaaagtacaagacagcggccggggacggtggctcacgcctgtaatcccagcactttgggaggccaaggcgggcggatcacgaggccaggagatcaagaccatcctggctaacacggtaaaaccccatctctactaaaaatacaaacaattagccgggcgtggtggtgggcgcctgtagtcccagctacttgggaggctgaggcaggagaatggcataaacccaggaggccgagctgacagtgagctgagatccggccaacagagcgagactctgtctc

SEQ ID NO: 7995 - DNA, 160 bp, Homo sapiens
agccaggggacccaccaacaggaccaaggaccgagacacagacatggaaggacttcagataccatcttattctagagacgtagctgaccaaaaagtaggggaggggctgggtctgcaaattaataaatagaagagggggtaagaccttcctgggaccgca

SEQ ID NO: 7996 - DNA, 219 bp, Homo sapiens
cacagctgccagccccaaccgctgccatttcacactcaccctccaccctccccaccccctcggggcagagtttgcacaaagtcccccccataatacagggggagccacttgggcaggaggcagggaggggtccattccccctggtggggctggtggggagctgtagttgccccctacctctcccacctcttgctcttcaataaaatgatcttaaactgc

SEQ ID NO: 7997 - DNA, 380 bp, Homo sapiens
gatcttagagcccagccccctaaggacagggaaccaggtccctgcacggcacccacgcaggtgtcccggtctgcataagcctcgtgtgcctttgtaaagtccacctacacttttgaccagctctcgctgcccgcatgtgtttggcgctgtgctaggggcgggagttcttccagactcttggaccagcccgccctgaccaccagctctacttcccaacccccactgcctgagaggtctctatcagtgtcctgcctgaattctttccttcaagtgaagatgtgactgactacctcctcgagttgtcatgaggatgaaagaatggcattaaagcatttggtatacagtaggtgctcaataaattgctagtgatttttactcaa

SEQ ID NO: 7998 - DNA, 495 bp, Homo sapiens
acgtcccctgcccctttacggacaccccctcgcttggacggctgggcacacgcctcccactggggtccagggagcaggcggtgggcacccaccctgggacctaggggcgccgcaaaccacactggactccggccctcctaccctgcgcccagtccttccacctcgacgtttacaagcccccccttccacttttttttgtatgttttttttctgctggaaacagactcgattcatattgaatataatatatttgtgtatttaacagggaggggaagagggggcgatcgcggcggagctggccccgccgcctggtactcaagcccgcggggacattgggaaggggacccccgccccctgccctcccctctctgcaccgtactgtggaaaagaaacacgcacttagtctctaaagagtttattttaagacgtgtttgtgtttgtgtgtgtttgttctttttattgaatctatttaagtaaaaaaaaaattggttcttt

SEQ ID NO: 7999 - DNA, 182 bp, Homo sapiens
cagctgcctctacgcgctctacctgcttccccaacccagacattaaaattgtttaaggagaaccacacgtaggggatgtacttttgggacagaagcaaggtgggagtgtgctctgcagccgggtccagctacttccttttggaaccttaaatagaatgggtgttggttgattaattttattt

SEQ ID NO: 8000 - DNA, 81 bp, Homo sapiens
ccaagggggtcatcggccccgcgctgtacagcctccgtatacatatgtacacatataaataaagtgcgtccgtgctgcgtg

SEQ ID NO: 8001 - DNA, 427 bp, Homo sapiens
gccgctccatcaggggcccgaaactctcaagcccctttctggagagatgcctggctggaccgtaggagcgctgtgctctgagcttagaaagggaggtggcggatggagtgggaagtgagagacactgatttttaaatatcaaaatttcccttctgaagtcgttcagatgtgttccttaaaaagaagatggaattctctgtagagcgtctcaatccacttttaaccatggatgagagcagactccatttaccctgaaatagcagcttctcttgagaggagagtgacatggaagcaactccgtctgctgcagctgaccccctcacactgagttcacagtgcgccctccctccctcccatctgggggtagtgccttatgctgggtgttggagcagagtgagggagaggaaaataaagacctgcacatctg

SEQ ID NO: 8002 - DNA, 576 bp, Homo sapiens
agaggcctgcctccagggctggactgaggcctgagcgctcctgccgcagagctggccgcgccaaataatgtctctgtgagactcgagaactttcatttttttccaggctggttcggatttggggtggattttggttttgttcccctcctccactctcccccaccccctccccgcccttttttttttttttttttaaactggtattttatctttgattctccttcagccctcacccctggttctcatctttcttgatcaacatcttttcttgcctctgtccccttctctcatctcttagctcccctccaacctggggggcagtggtgtggagaagccacaggcctgagatttcatctgctctccttcctggagcccagaggagggcagcagaagggggtggtgtctccaaccccccagcactgaggaagaacggggctcttctcatttcacccctccctttctcccctgcccccaggactgggccacttctgggtggggcagtgggtcccagattggctcacactgagaatgtaagaactacaaacaaaatttctattaaattaaattttgtgtctc

SEQ ID NO: 8003 - DNA, 592 bp, Homo sapiens
tgccaggaagccaggccaccgaagcccccaccctacccttattccatgaaagttttataaaagaaaaaatatatatatattcatgtttatttaagaaatggaaaaaaaaatcaaaaatcttaaaaaaacaagcaaacagtccagcttcctgtcctcctaaagtggcccctgttcccatctcccgggccagacagctgtccccccgtcctcctccccagcccagcctgctcagagaagctggcaggactgggaggcgacagatgggcccctcttggcctctgtcccagctctctgcagccagacggaaaggcggctgcttgcctctccatcctccgaaaaacccctgaggacccccccccatcctcttctaggatgaggggaagctggagccccaactttgatcctccattggagtggcccaaatctttccatctagggcaagtcctgaaaggcccaaggccccctccccagtctggccttggcctccagcctggagaagggctaacatcagctcattgtcaaggccacccccaccccagaacagaaccgtgtctctgataaaggttttgaagtgaataaagttttaaaaact

SEQ ID NO: 8004 - DNA, 1119 bp, Homo sapiens
actgagcatcgtggatgggtgcacggagacacgcaccttggagaaatgaggggagatggaccaagaaagacgtggacctggatgatgtactctgggtcaagagaccagggatgcagggttaggcagacaggtccccagagtcctcaccctgctccccagacagtagacacagtgcccgtcctggagttgcaccactgatagtcacagcacacaatgattgacaactcactttttttttttttttttgagatggagtctcgctctgtcgcccaggctggagtgcagtggcgcaatctcagctcactgcaagctccacctcccgggtttatgccattctcctgtctcagcctcccgagtagctgggactacaggcacccgccaacacgcccggctaattttttgtatttttagtaaagacagggtttcaccgtgttagccaggatggtctctatctcctgacctcgtgatctgcctgccttggccttattattttttttttttaaggacagagtctctctctgtcacccaggctggagtgcaatggcgcgatcttggctcactgtaacttccacttgccaggctcaagcagttctcctgcctcagcctcctgagtagctgggactacaggcacccgccaccatgcccagctaatttttgtatttttagtagagacagagtttcaccatattagcctggctggtctcaaactcctggcctcaggtgatctgcccacctcggcctcccaaagtgctgggatcaaatccactgttaatcattaggctgaactgtctcttatagaatgaggtcaaagacactcccagttgcagggagggtagatggccccacccagaccgagagacacagtgatgacctcagcctagggacaccaaaaaagaaaaaaaaaaaaacccaaaccaaaaacgcaaaccaaagcaggcaggcagacagctgctgggggaaatcctggggtccttgagacagaggcaggaccctcgtgttcccagctgcctcttgccttgatagtggtgctgtgtccctctcagaccccccacctgagtctccacagagccccacgcctggcatggcattccacagaaaccataaaggttggctgagtcc

SEQ ID NO: 8005 - DNA, 4161 bp, Homo sapiens
tcctggttcctctgataagatcgacaaaagaaacaacaaaatgagaagaagaggttcctcgaaaggggggagaagaaattttgagaatggaaaaatcccccagcccagcccagccccaccgaaaagcaaaaattacacgtcgtcagccactcagcccttctctcctccagcccggggacccccgcgggccccagaagcagcccagttctcagagagcccttggaaggggtctcggtggagctgtgcaccagcagccaagcagaaagaaacacgcgacatggactctgtcaagtagaggacagaaagcaagaaaggatgcagaactgccttcctccccctgaccccgccccggccttctggggaaggaacaaagtccccaaacaaagcaaccagcacaattctgaaggggcctggcctccaccctcaccccttcctaggggaaccccaccctccacacagccggagctgccctagggagcctggagggccagcttgtaaagatgatggggtttagatccctcaggctctcccctccagactccgcccttccctccctccctccctccctccctctctgccaaggctccagcttcttcccccagctgctcccgaccaggagggggagagcagcctccacttaccccaccccacccttgggctaaaagcccccaggcgggcagggggtgacccctggagctagttgcgtgtcccagaatggagggtgttctgacaccccaccctgagccgcaagagcagtcctggggccctggacccctctgtacagtccgtaggaaaaagtcggaatgctctcgacggcctcgtcccagcctgggacaggccccctttcccctctctctgcaggccaggagggcctccttcctgccacgagggaggggagtcgggccccaggtcgcccccgcccccagccctgcatgcaggtgccctcgctccgccccatcagttcctgcccctgcccctcatgcagactgccctgctggggccgggccggagggtggagcagaaaggggaccccggagccgagcgaggaggaccaggcagccgccgctgccgcgctaagccaccacctgcgcttaggtaggcgtcctgctcgccgactttcagttccttgggagggtgttgggtgtcgtccttttcaaaagtgttttggagctttctgtgccccccgactttcccccgcctccccgccccccacgtggccacttttctctggattttagctgtaatgtctttactctttatttaggggtggggcattcattgtttgggtcttttgctgttggaatgggaactcctcctccatttgagcaacttgggaacaatttggtaacacaccacaggaagtagctctcccccccagccccctcctccctcaagggagggttggggggcctgtccagagggtcttcagaagcccccctgggagggaggggaggatgagcacgcccagctcccctccagggtgtgacttggcccctctggcttgtctttctgtgccttactcctcctcctgcgtctcccgttcctggccccttcttgagtccttgtgcctctctctttctctctctttcttaattgtatgaaaacacaaagcacaggtcaggatcctctgagagaaaatcaacattgcaccacgtaggggtgggctatgggctgtatttattgtgaatctagtttgtgaggctgtggccccgagctggcggagggagggaagaggagggagtgacgggaggggaggaggtcagcgacctggggccgtagcggcaggcgaacggtgcctgctacccagctggaagccacaaggtggctggctccaggggcggcttttgttggaagttgagtgaagccctccccctgtcctcagcgtgcagccctagaggaccccagggctgaggggcagtggatcctgcgggagtctcccggggcgtggggagtaaggccccgggggtggggggccgggtgggccgggcgtgacgcgcggtcaaagtgcaatgatttttcagttcggttggctaaacagggtcagagctgagagcgaagcagaaggggctccctgtccggcccacgtgccctttccctcgacgacagtcgagggctcgggctctgtgggactgtgggagctagggtctgcggggcgcctgcccgggcgaggtcggaagctgcaggccagctgggcccgggccggagcgtgcccggcggggctgcccgggcgggcagggggtgggggctgctcctttcccaagtggtgttgtgaggggcaatgagggcaacaggagatgtggggacgtgttaggagagaaaaaaaaaaaaacaaaaatatatatgggggaaattaacttttttttttcattgaaccaagtgcaatgcatcagagagttttcctatctttgtatgttaagagattaagaaaaaaaaattctatttttgttgtaatgtcctcgcggctctggggacgctaaaagaaccgggcctgccccgccctgcgcggggataacgaaagctgagtgtttttcccttttttttgttcgtttttagtttttttttttttaagtcgttttcctgcgttgacgaggatgatctggggtttttatttgtttcgtcgttcgttctgtttcggtgggagggctgaaggaaacgttcacattttagagtttaaaaaaaacacctcgacatttaaaaaatcaaccaacacaagatcaaaaaggaaaaggacgagagaaaaattatttttaagataattaaacataaaaccctggtgcttcttacattataaagtacgttttaaagaacccacaaactattatacataagtttatgaatcaattaaatatcctgcacttgttaggaatacgcatatcccttctttgttgagtttaacggaacgggacagcggcgtgcccccggcggctggactgctccggccgcgggtctccccgggcgcccctccctggggcccagcacccctcctcgccccatccccgtccgggtacgggggcgcggcaggggtccccggcccctcccccgcagaggtcaatgccaacgaacaaacgtcccctccctccctccctctccgccccgagcgcccttctttgagccagacgccaacttgaccctcaccagcattatcaggagcgcgctcagcaagttggtagtttcctcccccctttcccggcgcccctcccgcccccattcaacatctctcatcctatccccgaccccctccggggaacaccgggaaggctcgacgctccaggacaggaccagccacgcagacaggtcgatttgcccaggcccgcgcccgcacgcacgcacgcacacggccccgcacacagccccgccccaccccgcaaccagccctgtcgactgccttatacacccgcccccgcgctggccggccgacctagtgccttgttctcacccccgtgctggcggagcggacgccgcgctctgggtcccagaggggccgggtggctcagacgacccaccactcccccaccctgaccgtgctgaacagacccccccacacgagagaaaataaaggagcaataaagtcacgagaactttcgtcccccaatcgagagcccgaggggcaccccagccccgcctctgctcccccccaccccacccaccctcggggcgcccccctccccccgcaagccagcctgggccagccccgcttcggcccctcccgggagatccgtgcgcccgaccagcaccagcatcgcggaccgcaaaggccgcccgtcccgtcaaacaagtttcttcttaggctaagaaacgcagtatatacgagtatctctatatatagtactaatggatttggtgtgcttcccccttagcgtccccctccctctgctcctcctccttcagcctggtctccccctcttctctgccctccacccccgtctctgcactgagatacataagaaacaagggtagtttactgtctgttttgttttctgggttttcagtgtcctagcggaatgcaagtaggcagccagcccgtctgttccctctccgccccgccccgccccgcccccgtcactgcgcttctgttataccatctttgcctgactctctccggcttctccattgaatggctaatgtgtatgtgaaataaagaaataaagaaaaacaaacgcg

SEQ ID NO: 8006 - DNA, 2738 bp, Homo sapiens
cccgcccagcctcccgcggggccacacacttcccctcccaacacacacacacacctgccatcttggtcatgagctactgtctgtccctccccaggacccgcggtgggtgctgcatgttcccggccctctgcccctcctgtcctaccccctttccccaccgagagctgggccgggagaggaccgcagggcaggtggcgtgaggtccgtgttgccttctttaacacacactcgtgcagtgggggagttctggctccccaacctaacccctagccgtcatctccacactcaccaggcccaccaggggagggggctggcctgggggtcttgggaaggcccctccccaggccctaggccacctcgcggaagccttcagcctccgcccctcactgcagccccttgggacttgaggggggccccaggggttctcaggacccctcccaccacctcccagtgcttccacgtctccaaaagcgccttcctgtcaccctcgtctatccctgcgcctgggggctggggtaggcgaggccgtggggactacccattttatagctggggaaacaggctccgagaaattgcacaaccgacctcaggtggccggcagtggcgtgcctggtgccctttctcctcttccgcctctgttgctccctttggtcctctggggcctcagagaggcaggtcctaaaggagggggggtctcctgggggcagaccgagggtctcggaggatagaatgagaggtttccagggctggcagagtgtgtgcgtgtgtgtgtgcagaagttttgctttcaaacaaatgaagatacaagaggcagtaggacctgggttggaacccaggggagcagactggggggctgttgcccctccctccatctccccacacccaccccaccccacagcagggctcctggcccccacccccctgtacataatttttaaaacctttttttagcgaatgaaatattgaagtataagattccttttatttttcaaaccaatggggctgtgtctattgtccccctcggtccccaggggtggggggccttggaaggcagggcggtgttggggggctggggggcaggctgaatgtgtgtgtgtgggtgtgtatgtgtggagtgtgtgtgtgtgtttccatggtaggactccagtcccagctgctgcctaggctcctgtgggtcctgtgggtccccctcccctgttcaccttccccaacagggctatagtttaagggtgtcccaggccttggctggttggctgggcccagctcctgggggctgggcagggcagggcagggccgggtccacttccattgttagcagttgtttgcagaattttctcttttaccattcctctctttttgttctcgcccagagtgggtggttttttgttgttgttttagattttcatgtgaaggcagttttttttcttttttaactccccatccccctatgcagggtgtcatttcaccatccacatccacatccttgtttgtgtttctggccctcgtcctccctgcctctcatctgcctccccaacccccacctacccactgctcccaggggtctctccaggggcagggggattttaggagatggggtgggggccagcccctactggacccttgtaatctgatttggagaccatccccccgatgggaccagcagccccgccggcccactgggggtccctcttaacatctgcttgttgcgggggtcagtcatgagtgccagggtctggctggggtcttggcactgtcttcctggccggggcctgaaaccttagcccccagccggcctgagtgggggatattgacacccccagctaaagcacaagcaccttagtcacccctcctctccccccgcctcctggcctgccaccccaccccagcgtttaccccaaagcacaatgccctggtcacttggcaagcggctgggcctgacggaggccgaggggcagaccggggctccagccagacccctgaaaggaaggtgctcccccacttccaggccttagttggggtgggggggccagctcctgggcctggggtcttctcacccccacccccttgtcctgggtaggcccctgcctgcccctctctgccttttcctcgggtgtccctcctcgagcccctgtggcattggcttgggtggcagagcccacttgtttcagggaccccaggaggtgccccctggctcccaggactgtgtgtgggtccggggggtgggggggtggggagaagggtcgggcagggggtgcaggggaggaaactcctcaccaggagagccaaagacagggttgtgccttaccccaggagccacccctgtaccccccttgccctgccattcaccctccacccctacccctgggcggcctgctgctttttccttctcttcctcccctgccctgagctgcatggttcccccaccctgggcagccaggaaggaatctgaatggagaatcaccaaccaccagagaaaaaagactgtggggccctcccctgccaactccccttccctggccgcccactcaacccacacctctttcacgcaggacaggctgcccaccctgtccacgtgaagtgccaacgccctccccaccctgggccgagcccccacccctccctgggcccccaagtgagattgcacatttaactactgtaaggagaggagcggcgttggcaaatgtgaaccatgagaatatcagtgatactgatgagaataaactaaacgcctttgtaac

SEQ ID NO: 8007 - DNA, 1044 bp, Homo sapiens
ggaccccgagcggcgctgccggagcccagagcgcgcgtcgaaccgtcggcccgagggcgcagacctgaggcgaggccacccccctccatcctgggggaagcgcccgcgaaaaccgtggagagaagccgccgcccgggctgctgagaggcccggagagggactctgtccccggggagccatcgccttcagtgtgcagggacggcaccgaggagtctgagccgggggcgcgggcgccttccgcagagacctgcgcccacaggtgctgtcttagtggactgggacgtgaacctttcgctctccttctggactgggagaagggaggcttgggtgttgtgttttttgttttgtttgtttgtttgtttttaaagatctcctcagggtcggacttcattttgtactgtgggctgtgctggccctttcaaggtttttcaagagttggttttgcgtttccaacctcggagaattccaggcactccccttccccctccgctgacatacttgtataagcggtcatcgttgcgtcatggggcaggcgtggggagcttcctgtcgccttgcgtgggtgtggggcctgggaggaggtcctggggcgtgcacccgccctgggcagtggggaggagagtggcctgagttacttcacccccgcgtgctgctggttaatgtcccgcgtctctgcaccttcgggtgggagcggggactgatctactttcacattctcaagtttttctcatctgcattagaggtgcccagtaggttcccaggttccagcgtgcccctccctcagacacacggacacaatcagccgagaagttcctggtctgaatcacgagaatgtggaggggtggggggtgtcagtggaaaggcataaggctgagctgagaccagttgctggtgaaactgggccaatctggggaggggaacatccttgccagggagtttctgagggtctgctttgtttacctttcgtgcggtggattctttttaactccgtctacctggcgttttgttagaaatgtcagataggaaaataaaaaccatttgagt

SEQ ID NO: 8008 - DNA, 224 bp, Homo sapiens
gcgatccccatcctggagactggacccgctctagaggcccggacacacccaggaggcccctcacagactgcagacccccggctcgcccaccagccctgggagagctcagatgccgcatcctccccagaccgcgccttcctgcaaccgtggagttatttatttggtcctggtgagggtgtttgtgccttgtgagactccgtacattaaagacctgtctcttcttc

SEQ ID NO: 8009 - DNA, 2000 bp, Homo sapiens
ccaactcagctctccctagcctgcctctctaggtttttcaatacatttcttgaatggctacccaaaagctgaccgtccagcccctgaccacacttgttcctagtgcagggagctcagacagggccttccatctagagcccagcacctagagccaggctgcccagattcaaatcctgactccgccacttttcccactgtatgatcttgggcaagtcacttcacctctctgtgccttggtttcctcatttataaaatgtggataacaggccgggcgcagtggctcacacctgtaatcccagcactttgggaggccgaggcaggtggatcacaagatcaggagattgagaccatcctggctaacatggtgaaaccccatctctactaaaaatacaaaaaattagccgggtgtggtggtgggcacctgcagtcccagctacttgggaggctgaggcaggagaatggcgtgaaactgggaggcagagcttgcagtgagccgagatagcgccactgcactccagcctgggcaacagagcgagactccgtctcaaaaataaatataattaattaattatttaattaaaaaaataaaaaataaatgtggataatactagtacctccctcttaaggtcagggctggagctagggtgacatctccagggcagaattttaagaggacaccaaaaaagctcagcaaccaagataaaaaatattttaaagcaatattttgttttgggttttttttttttgagatcaagtatcactcgttacccaggctggaatgtagaggcgagatctcagctcactgaaacctgtgcctccccggttcaagcgattctcctgccacagcctcctgagtagctgggattacaggcatgcgccaccatgcccagctaatttttctatttttagtagagacatgatttcaccatgttggccaggctggtctcgaactcctgactcaaatgatccccctgcctcagcctcccaaagtgctgggactacaggcatgagccactgtgcctgaccttacagcagtattttttaaaaatcaaaattaatgcaaaaatccatgatgaggccaggcttggtggctcatgcctgtaattccagcactttgggaggatcccttgagcccaggtgtttgagaccagtttgggtaacataggaagagcttgtctctacaaacaaaaatttaaaaacaatgagctgggcatggaactcacacctctagccccagctactcaggctgaagtgggaggatggcttgagcccaggagttcaaggatgcagtgtgctttgattgcactactgcacttcaccctaagcaacagagtgagaccccatctctttaaaaaaaaaaaaaaatccatgatgaacaaaacaagtatttgtttgagacggggtctcgctctgtcgcccaggctggagtacagtggtgccatctcagctcactgcaacctccgccttctgggttcaagcgactctcctgcctcagcctcccgagtagctgggattacaggagcctggcactatgcctggctaatttttgtatttttattggagacaccatgttagtcgtggctggtctccaactcctgacctcgggtgatccgcgccccgcggcctccgaaagtgctgggattacaagcgtgagccaccgtgcccggcctaaataaaattttgaagaggctagaaccccgcacttgtgccttgagcttactgacctcaacaccctggttccactaaaactttatttacaaaattatgctgccggtctgcaggatgtagtttaacaatttgattattttggatattaaaatattttttaagtcttgaaaatattgtttactattaccaaagtttttgaaccttcttaaattctgtaccagaggtgagtgccacaccctaacctagtctgagtttttatgtgtaaagatcataaaacgttgtaagttttctaaaacacataagctctcaataaacgttagcttatcattgtc

SEQ ID NO: 8010 - DNA, 572 bp, Homo sapiens
ggacgctggccccagtgcaggccaacatcccaccccctacctccatatgggaccttgcaagtcatcccacaggctgcactgtcaggaagaggaccctgtcccccagcactgggcttcacctagaacttcagtgggggccaagggtgctgagaacccagcaatgaccaggaagatacagtcactaacttcatctgtccccgtgccccttcccaggtcctgcctccacaggtttaacccagaacaataaacctggctttgtcatccctcttgcagtcctgtgttcgggtgagcaggccaggtgagcccacaagtctccatgagtgacgtggcctggcgtgctccaccccaccccaccgcctttagcaaccatgtgcccaggggacagctgggcttctacacctctggccctgagcctgagagccgggaaagagtcttttctccatttaaccccgggtgactcactccctggccagtcctcacccctggggacacaaccagagtcaagctggacatcagtaggtcagatgccacctcacaggaccaaggtgccgattaaaccggaatacattcag

SEQ ID NO: 8011 - DNA, 1180 bp, Homo sapiens
gggacagtggggtgcgtgggagtggggatccccctcgcccctgcgtcccccacccttgctctccaattaggcccacgtggcatttcagtattattaagtcagggaaggagcccggctggagatgggggcagggggagcagcatcctgccacgtgtgtgcctgggagtctgtgagcaagtgtgcaagactccagaagcagaagccatactgccacccagaagcctggaaggggtgtgtgcttgggctgctggtatgaccccactttgggcaccccaaaagcaataggcaaactccccttacccagactggcttgggctccaggagggaggctgggaggcaggactttccagaaatcgaccctctaagtcaatgtagcacattttcccccaaccccaccctgggtggccaagggtcctcccccaccccctactgctcagggccccccattatgccacctccaaagtggctgcccagccaggaccattggctcacccccactgaaggaattgaagaggcctcaggcctcagcctcatacctcacccccttatcctatccggccaggacccccatttccttgggcactagggtcccagggtgggctcagggttggggaagtcctcgctgccctctcttctcacctgctagtcactggacgtacaactcaggaactgagcgaggctcacactgccccttccaacctggggttgggggacacagacgcgagagagccggagacccccacccccgatctggaaaggaaagagacctgtatcttggtgtttttctggctttttcaccctttcgcctcctgtctttctgcttcgccccttcatcttactctgtttccatttttcccggcacttacctgcctttctctctgcacctaagtccctgccgccctctctctttggccatccttcctttcccccaccttgacccagggaggagaagggagaacatcacccccccaagtcacccccacatcttttcccttcttgtatattaaggacaaaataccacatcattttgtaactttttttctatttattgaacggtgtattacatgtccttttcctttttttttttcaaagattgaacagaaatttttctttttaattttattttgagactggggtgcatctccagagccactcacaccctcaacctcgtttcctccgc

SEQ ID NO: 8012 - DNA, 483 bp, Homo sapiens
ggagcccatggggcgggcagcccccagaaagcgggcagcaggccccgataccgggaagagccgacacagccacgaaccagacaagcagacaatcagcggacaatcggttctggactcacccctcatccgggcccccagccccgccagagcctccgtggctgcgggtgttgggaaccatgcctgccagccagtatgtgcccctcacccaggcctggctgggccctggagagtcctgtttgcacagcccaggggtgtccggcctctggcccgccccggagcagggagggtggctggggccaagccccgagggcccctgcaagcactttacttcctgttcctccccagccttaaccccaaagccctcctgcaccccaaagaagccactgaggctggccgagccacactgtctccccaggggcgtcgacctggcccagctgggtccccagggccagcacatggaataaaatagccagggccacactc

SEQ ID NO: 8013 - DNA, 447 bp, Homo sapiens
gggccaggccgccccggacactgactccaactacctccgtggcctgggaccggcccccttcctggggtggcctcttcctggccggctggcccaccgactgatgaccggcactagtgttagcctgcggaacggggctgggcagggcagcctctgttggcctgagggtctggacgctttttatttatgcctatttaagttgggaaggggcagagagagggcgccccctgccccaccagcctgagtgccccgccttcaccccgagctgggcatgggcctggcccctcgtgcatttgcccttttctcggctacagctgtggacgttgccctcggggaggtcgaatggaccccattccccctgccctgcccgcccccagcctccccacccaggccggcaacctggccatccccattccgttcttcttcatgtaataaatgttttaatttctg

SEQ ID NO: 8014 - DNA, 23 bp, Homo sapiens
tttgagggctgggcagccgtggg

SEQ ID NO: 8015 - DNA, 923 bp, Homo sapiens
accacacgtctggctgggggctgccagccaggctagagggatgctcatgcaggttgcaccccagtcctggattagccctcttgatggatgaagacactgaggactcagagaggctgagtcacttacctgaggacacccagccaggcagagctgggattgaaggacccctatagagaagggcttggcccccatggggaagacacggatggaaggtggagcaaaggaaaatacatgaaattgagagtggcagctgcctgccaaaatctgttccgctgtaacagaactgaatttggaccccagcacagtggctcacgcctgtaatcccagcactttggcaggccaaggtggaaggatcacttagagctaggagtttgagaccagcctgggcaatatagcaagacccctcactacaaaaataaaacatcaaaaacaaaaacaattagctgggcatgatggcacacacctgtagtccgagccacttgggaggctgaggtgggaggatcggttgagcccaggagttcgaagctgcagggacctctgattgcaccactgcactccaggctgggtaacagaatgagaccttatctcaaaaataaacaaactaataaaaagcaaaaaaaaaaaaaaaagaaaagaaaaaacactgcatttgggcaccatctcagctcccttgcatccaggtgcagcatggactgagttcttgacaacagaatgtggtcagaagtgacatatgccaacacggggtctgggtgggggctcccccacatcctttccttgcctatgagctggaacataacacatgcctatgatccagctttggtcatacccaaggggaaggtggagcaagaaatgaaaaggaacctgaatccctgaatgactgcatggatagaaccactaagaaaaataaacttttatatttttat

SEQ ID NO: 8016 - DNA, 600 bp, Homo sapiens
aggcgcatggttctggacggcccagcagctcctgtggccacagcagctttgtacacgaagaccatccatcctcccttcgtccaccactctactccctccaccctccctccctgatcccgtgtgccaccaggagggagtggcagctatagtctggcaccaaagtccaggacacccagtggggtggagtcggagccactggtcctgctgctggctgcctctctgctccaccttgtgacccagggtggggacaggggctggcccagggctgcaatgcagcatgttgccctggcacctgtggccagtactcgggacagactaagggcgcttgtcccatcctggacttttcctctcatgtctttgctgcagaactgaagagactaggcgctggggctcagcttccctcttaagctaagactgatgtcagaggccccatggcgaggccccttggggccactgcctgaggctcacggtacagaggcctgccctgcctggccgggcaggaggttctcactgttgtgaaggttgtagacgttgtgtaatgtgtttttatctgttaaaatttttcagtgttgacacttaaaattaaacacatgcatacag

SEQ ID NO: 8017 - DNA, 82 bp, Homo sapiens
ccccctcccctgcccctgcccctgcccctgcccgagagctcttagtttttaaaaaggcctttgggatttgccggatccttgc

SEQ ID NO: 8018 - DNA, 108 bp, Homo sapiens
gcgctcacccctgctgaggctcagcccctcaacccggtggcattctgggggaggagtggggcccacagctctccagcacccggaataaagcccgcctgccccagtcgg

SEQ ID NO: 8019 - DNA, 1049 bp, Homo sapiens
catccacgatgaggactgtgctaccatgaacaaaggtggcacctggaatgatctctcttgctacaaaactacgtattggatttgtgagcggaaatgttcctgttgaagcccagggccgaggctgggggtccatatctgagtgtctctttgagatgagaatctcctgccctttcgtggacggccttgcctcttcgtgagtggacacacagatgtgcctcaaacaggattggcaccctggatgcagcaagttcccaggggtgcaagtcaggctgtttctagagtgaggacttgggcttgccctagtagatggtgagctgggaggatgctcagagcttggtggtgggaggtctcccacttctggggttgaaaggatcttcactaagttcctgatcatgactcttgggaagtgatactagccctgaggaccctggggctggtgttgaacctgggatgaaatatcctggcgcctgtgaaccacaaagagctgggactgggctccttttcctgcagcctcaaacttctgggctcaggtgatcctcccatctcagcctcctgagtagctgggactacacatgcgcaccaccatgcctggccaattttttgtagcatttaaagagagggagtctcactatgttgcccaggccagtctcaaactccttgcctcaatggatcctcctacttgggcttcccaaattgtgaggattacaggtgtgagccactgtgcctggctcaaaattattattattatttttatagagatgaggtctcactctgttgccgaggctggtctcaaactcctggggtcaagcaatccttccgtgatggcctcccaaagtgctgggattacaggcatgtgtcaccgtacctggccgatatttttatttttatttttactttccccatcttttccttttttttttttttccaaacaaaagctttgaaagtggtgacagaaaaatttccctttgagctagacctctagatctgcctcgcacagaaatacattaagtgggctggtctcatgtagtccccacatcattgcaaattac

SEQ ID NO: 8020 - DNA, 1633 bp, Homo sapiens
cttccattttgtaaaaatataaacacatggggctatgactttccctcgtaatactcctttagctgcatcctgtgtttcaatgtataatattttcattttggtttaattgtaagtattgtcttaacctccattatcgtttattctttgacccatctattatttggaattagatttttcaaaactaatatgtggatatattttcatagaggtataatgacttatagtgaaatgcatacatctgaagtgtacagttggatgagtttgacagatgcatacatgcatgtaaccaccaccccattccagatatagaatgtttctatctctctggaaggttcctgcatgttatatggctatttcttagttgcctttttgttgttggtttctaatttaattacatggtgagaagagtatgtggcctctttgttactgagtcataggtatttgctgagatttgctattaggtctggtgtggcttattcttctagctgccaacccaaattaccccttcctccttagaaaagaacctgggttttctgttcagattggcagtgtgcactattaaaaagcttccatctcccggctgggcacggtggctcatgcctctaatcccagcactttgggaggctgaggctgggggatcacctgaggtcaggagttcgagatcagcctggccaacatggtgaaatcccctctctactaaaaatataaaaattagccaagtttggtggcatgcacctgtaatcccagctacttgggaggctgaggcaggagaattctttgaacccaggaggcagaggttgcagtgagccgagattgcgccactgcactccagcctgggcaacagagtgaaactctgtctcaaaaataataataataaaaaaaagcttccatctcccagcccttcttgcaagcaagggcaggccatttcctccggtcctggctagtatgaatatgagaagtcactggatgtgactctggggaagatattgtgttcagggatggtttcatgtagccacatctctccacttcttgccttttggacaagtagacatgatttctagacctagaggagccctcctgtgaccataagggtaaaagccgcaagctaagaagagggtggccggaagtcataaccatcttgcttctgtaatctaaaaaatatttaggatagatttaatagaattggcatatttatgtgattgcagcagccctggactatttatttctggatgtcccatacatgaaaaatatgcacttcttactggtacagttttcttttgtttgtttttgtttttggtgggaggtttatttcacctgaatataattcctaactgatgcacttagtatatgtcagtttttataaatgcttcatggatggttgaaatcaatgtattgtattctacaaatgtctgctagatcaagcaaatgtgtttaaaaaccatctacacatttataaatgttgatctgtgatctagcatttattgagagaggtatgttaaactctcccaccatgattatgtattgctgaaaaatctttgtcattctgtcagtttttaaatttatgtatatacatacatatatatgttttgaagcaatgaaattaaatatagatactgacattttttacatttcc

SEQ ID NO: 8021 - DNA, 149 bp, Homo sapiens
tgaccccagcgtcccccgccccagccagctgattggatgctggctgggacctcggagagcagacacagccccatggccctccctctcccctgacgcaccctccctccaagcaccctctaggagaattataattaaaaataacaataatt

SEQ ID NO: 8022 - DNA, 1015 bp, Homo sapiens
gccagatgacggggtgggaccccggttagtaaggaccgggcgcccagtggctaaggcggtgccctggtgaccaaggagagccagacctgttgctcaggccgagctcctggttgccagcgagttaccacgggaccagtcgcgtgtatggctgagactcattcccagtttccagggcccggtatttggacactagttgccaagtctggggcctggggattttagggaccagcggttgtgaccatctttcctgagcaccaagggcttccccttttgttgccaaaaaggtagttctcgcgcttgctaggctggcctctcttgcctccccttggccggggcaacaccagttactgtgagcatcaccctggtgtggtgagtcacctctagtcggccctcttgctgctgccaaccaaatcagtattagctttgagcactgcactgtttctccctcccttggacgacacaaagactagcatgaggcactgtttgtggggggcagcccctatcctgggttccagcatggacacaggggtagcctggggcttatagagaaacagctggtttcccctacccttttccggggaagtccccacgattggcctctagtcagcaaatggagataacagagtctggcctttccaatccccatctccttgccccccccttgcccccccccccgaaaaaaattgagcacttaaacccctcccttttggagggggccccctgaagcgtcaggctgggggcagtctggtacggaacatatttattgcctccatgcatgtgtgtgtgtgtctgtgaggactggtgtgcgtggacacgtctgaagcaggcgtgtggggctctttcagggaccacagaggagggagcagtttgcagtgcccagccaccctgaaatccccaataatggtgcctcagtgggccccagagttccagtgggagagtacggttccctcctgtctccctcttcttttccgcacctccatctttgtggataataaataaatatgcacaggttctg

SEQ ID NO: 8023 - DNA, 845 bp, Homo sapiens
gcgtgggcgcgcccctgcggctcccgagggtccaggccccgcccccaaaggaccaggactcgccccaaagatcccgagggcataggccacccccctcgaagttcaggttcagctcctggatgaccaggcaccgctgttgagcagcctggtggtactggccacgcccctcaaggcaaggctcctccccttagggggcctgatcccgccccttgaggcttaggtcccgccccctgacttctcgcacctgtcctgtttgagggaccagggtcgaccctgcccccttgggctcaggccccgcccccaggatcctacggattgaggtcctcaggccacgcccctgcagatccaggtctccaggccttgcccactgagccttcagaggacctaagacccacctatgactcagggcccaccacaccccacccccccccaactggctgaacccctggcaggcttccaaactgaggaaagctggagcctgacgtcagagcttttaactcggacatcaccctcctgaggccctcagctcatacgggcagactgctcaggcgtgaggctggatcgtagggttcgaggctgcttgcttttgttgttgttttgtaaactcagacccttgtaagccccttccttcctcccttgcccaaagatcctttgctgagtgttctgtttttgcagaataaaagcaaaggatgcagacttaccccaccctccacccctagctcagccagatccttacacgtggagcccccagcatgggaatgaggggctctgcaactgagcgaagctgcgggctaggaggctggaaagccatttatcctaggacataaactcagattttgggggtc

SEQ ID NO: 8024 - DNA, 277 bp, Homo sapiens
ggcctgcagtgacccacccacctacctttgcatcacctacctttgcaccaactaccttttcagatttccggtaataaatctgtgttggcccctgtgcctcagtcccgcggatggccagtagggggcgctggaggactgcggggatctagggcctggctgggaagaggcggggagatgtctctgtgcccaagatactcactgcctctctgggtgagcacaggagccccgtgctgagggtgggatctcccagagtctaagtaaagactttttccccccc

SEQ ID NO: 8025 - DNA, 1374 bp, Homo sapiens
gttctgcagagacccactctgaccccactaaaatgacccctgattcatcaaaagtgaggcctagaattaccctaagaccctgttccacagtcctgtattccatcctagatatctactcaaaataattgagacaagtgttcaaacagaaagacgcttgtgcgtgaatgttcatggcagccctattcacagtagccaaacgatgaaaacaaccccaagctatatattaccagatgaaaggataaacaaaatatggtccatccatacaatggagtattacacagccataaaaaggaatgaagcagtgatccccactacactgtggatgaaccttgaatgcatgatactgaatgaaagacatcagatgcaaaaggtcacatagtgtactgtccttttatatgaaatttccagaacaggccaatctgaagagatgtatagtggattggtggctttcagcagctgtggggaggtgggactgaggagcgactgctaatcaggatggggtttcctcctgggatggtgaaaatgttccggacctagatagtgatgaaggtagcacgacactgtgagtgcactaaatgctattgaattggacactttagaatggttgaaatagtgatttttatgtgaattctacctaaacatgctattacagctcatatatactttttccatctggattcttcacaaaagaatatgttgtgagcatctttccatgatattaaatcatcttaggaaacattattttgtgttcttcaaaatgtgcatgttaagtattcaaatcagtcttaaatttttaaaaatatgtaattttagaaaataatttaaaaggttttgtttcagtttgtaagatttcttttctggcactttaatggcttgaggtatcattatcagttacaaattgagttattcttcatcaaatgacttttggagtagagattttatttttatagcaatagatgcacagatattcctgtaagatacaggtgtggttagacacttttctagaacaggcatgccctgcaaactccacagacactgactgtttttgtcctattaagaagtagaccactgagaagggagaaggtgacattttagctttcccaggtaaaagtggttttcatcctcacaccaattttatggactggacgttaactctcttgctcaaggtcactctgagtggaagagtggggataaatctggttcgtttggcatcagaggccatgacttttcctaccacagaagtaattttcaaagtaagtctctgccctaggcacatcagatcacctggggaccactccagagtgagtagacaagactttgacaggggtgcctaatttttttttttttttgagatggagtctcgctctgttgccc

SEQ ID NO: 8026 - DNA, 89 bp, Homo sapiens
ctttctgacccatccacctgtttttttgcagattgtcatgaataaaacggtgctgtcacctctgcctgggcctcactgacagcctgcag

SEQ ID NO: 8027 - DNA, 61 bp, Homo sapiens
gtagctggtgtggaagtgctgatagaatatgataggaggatgaccatcaccttgtctgcac

SEQ ID NO: 8028 - DNA, 1252 bp, Homo sapiens
gcaaaacagaagagtcttgttccaacagaaactctggagctccgtgggtctttctcttctcttgtaagaagttccttttgttattgccatcttcgctttgctggaaatgtcaagcaaattatgaatacatgaccaaatattttgtatcggagaagctttgagcaccagttaaatctcattccttccctttttttttcaaatggcaccagctttttcagctctcttattttttccttaagtagcatttattcctaaggtaggcagggtatttcctagtaagcatactttcttaagacggaggccatttggttcctgggagaataggcagccccacactttgaagaatacagaccccagtatctagtcgtggatataattaaaacgctgaagaccataaccttttgggtcaactgttggtcaaactataggagagaccagggaccatcacatgggtagggattttccatccagagccaataaaaggactggtgggggccgggggtggctattgtgggaagtcataacccacagatagatcaacctaagaatcctggcccttctccactctccaccatgcaggacaaacatcttctcaagcagtcaacgtagaatgcttgggaaatagtcataattacccacatatagtaattaatagatggtaattaattgatccttgatgtgatgttcttttgcatatttccttcattctaaagttgttccctggccgggagcgttggctttcgcctgtaatcccaacactttgggaggccaggacagatcacttgaggtcaggagttcgagaccagcccagccaacatggcgaaaccatgtctctactaaaaatacaaaaattatggtgacgcctgcctgtagtcccagctactcgggaggctgaggcaggaggatcgcttgaacccaggaagtggagactgcagtgagccgatatcgcaccacagcgctccagcctggtcgacagagtgagactccatctcaagaaaaaataaaaataaagttgttctctgaagagcaaatgtctcattccagtaatgacccactcagcaggaatatggtggagttcagtccaattcaggtcagccatatccaaaagaccacaagtcattactaagttgagcaaaagagtttttatctattagcagaaagggcctctctggcagcagagattaaaaactggcccaacttcatttccatacttcagggaacagcaaattgaggatttacttatctaggactt

SEQ ID NO: 8029 - DNA, 1329 bp, Homo sapiens
ggaacaccgccttactctgagcctcgctcagcccagctgactgtgcctgttctgagtgagcccctcactcagccggggccctcccacctccaacgccccgcccacgccgcggccaccgggcccacggccaccagaatgcaattgagaaatcgtttattttagtaactgtctgatctttttcaactttggagatggaataagttaaaaatttgctatttttcctgtaacatctgctgaacgggcccacccacacgttgtatattcagagagagagagggagtcaaggtgtgaccgtcgaccacagccagtgtcaggcctctgcctctgggcctttgctttgtggcctcactgcaacacaaagctccaccaggaggctggttcacgtcccctaccacggaagcgaggtcccagaaggccagcggtggttccaggagcaacagctcccaaaccctgagcaaggcaaccgatcgccaggaccaggaagcatcacccaggagatttggcgcccacttccacctcttctctcagttttggacaagtgacaaaccattttgccccctcactcttcttttttaactgttaaaccaaaggaaagcacaaatgaaggaaatcctgtgtaaagcattgagaaggaaagaagcctggagcagcctctcctgtccacagccaggggttaggtctgcaggcccgtctgcggtccccatcgagcatcaaggggacgctgtgtgtgctgcaagtgaccccgaaaacaaccacagccgtcacatggtcctcctgaagttggggcaccctcctctcagcaccaaaatggcccccactccttcgtgtcctcccgctatctccaaatcggacgttctttctagctgagatttttatttttccacatctgtagtgccatgaagcgattctgtctttgacttccaatggcaaacctgggtgatcgggaacaagcacgttgtacccttggctggacatggccaagacacaaggcattccacggcggcaagctgaccgcacagcagtctggcttgattttcagccgtcatcattgggttctgttttgacagctctgctgtcccatagggactgcgactgggaccaggtcaaccacgccaggggggtgtcaccagccttttctttttttctttctttttttttttttcctccttaagctgctgtcaatccaaaccattggcatcatcgtttcttttgaattaaaaccaacatatcagcaatagtctgctctccccgggaatctctaacatgctctgtttacatcgataaatgcacttaaggaaaacaaacaaattaaagctcatcttaaagtcc

SEQ ID NO: 8030 - DNA, 770 bp, Homo sapiens
agaacaggtccaccctggctctgggactcgctgccaggggctgccacactcctgaatgccttaacatttcttccatggccccacaccatggcatccgggggtcttcgggaacccgggaaatggaataaagatgtttttggggtctgttcctgcactcacccatggggtgagctggttattttagcaacaatcatcagagtgacgctgatggtttggggcaccagctatacatcagccccagtgccagaccttctattcattattttacgcctcagagcaaggccctcagggagggtcatcctccatgttttgaagaagagactgaggttcagagaggataagaggcgtgaccaaggccacagagctatgggtgtcagcaccaggatttgaagccaggtgaatccgagcccttttcccatatcatctgtttgttctgttgtctaaaagcacactgcaagccgggctcagtggctcatgcctgtagtcccagcactctgtggggccgaggcaggcagatcgcttgaggtcaggagttcgagaccagcctggccaacatggtgaaaccccgtctatactaaaaaattcaaaaattacccggacgtggtggcgcatgcctgtaatcccagctacttgggagcctgaggcgggagaattgcttgaacccgggaggcagaggttgcagtgagccgagatcgcatcactgcagtccagcctggatgacagagtgagactccatctcaaaaaataaataaataaataaaaatgaaatt

SEQ ID NO: 8031 - DNA, 1091 bp, Homo sapiens
ccgcctgcccccagtatggagcagcatcgagggttcgcaaaaggccacactggggttgtgtgtgtttcctttggtatattctggaaacatggctacacacacccttgcatcttctgctacagactgcttttcgaagctgtgtaccctcattctggaacttgattaaagtaagatcgtccttgtactcagtttaggcttcttggcaacatacagaagatacacccttttcgtttggatggaaagtttctaagtttatccagaggtaaagcccattgtgtgtctgtgtcatgtaaaaatgttttcacccgagttgcatgtaacgctctgaggccagccagctgtcttctcctggatgagacagactccagagggtaaggagctagcgccatggtggcctgcagtatgcagagccccgcaggacccagcgtgggcgcccttccaagcttcctctagctttgggcctatgctgtcccctgcaggccctagggaagccacttgcaactatgcggccttcagacttcctcctcagccacctggccactgagacagcatagcctgggtaacggaacagccacctaaggcaagaatggaacggacacaccttgctcctttctgagcccgtttcccaaaaccccccttccaggtgcttctaatgggtgttgccatagcagacgctgctaatgcatcacagcattctttgaaatggaaccagacacagcctgcctctcaatcctcagctgggggctcctagcagcctcttgtatttactcagagttgacacatcacacagatcctgtttggcattcctaccttacggacgtctcaggggtgacaggaccagggcagagccccggtacaaacagacaaggctgcagtcaaatgggagggtccaggtgtccgtgttggagggctgggatcttgtagggcctgtgcgtcctggctgaggatcaaaccacatatgttattgggagaaacgatttctgttgacgtagatattgaaagaataatgaaggcagaagagaaaaacgaagtgtggaatttggggttgtcctgtgtaaattacacaataaagcaaaagtcagttattgtaa

SEQ ID NO: 8032 - DNA, 903 bp, Homo sapiens
ggggctgtcgcagccaacaccccggcctcggggctcctggtggcagcaccaggggacacacctgccaaacccaccagatggaggggccctccctggtctctggccaccctcccagcctctgcccagggacccctgccttccccaggccatctgctctgccgtcgacactcgtctcagaagcccctttcccagaagaggctggtcttcaagaagtctcgtttctttgcccctgaagtcagtttcaggggaaggatgtgaaatttttccgtgtagaggttacagccttttatgctgttgagctcccaggtaccaaaaagcttggccaacgcttgccagccagccagctgcaggtggcatctgccacgaaggaagcgccagcctcgccaggccagcaggggcgtcgttttgttgccattttgttgaacgttatgggtttatgggtgttcctggaacttgtctttgtgcattcgttgctgtttgtgttaccctcactgtccccatgtcccacccacgtcctacggcactcaggaagcacttggtgaggacgagccctcacccttcttgtcttccttcccggcagcgcccgcagcgggccatttacacgtcgaggctggcacctggcgcgctcgggggccactgtagcgtctgcctgctccctggactcgcaggcctcgcctgtggcgccttcccagggccagcctgggtcacgagatgctgtcactcagccagatcagtattgacccaccaggggaggtggggtttggtgagagacgccagcctcagactttttcccactgagggtccagagagcggggccacgtgtcacccacgtctgcgcttggtcacccgtcctccccaccctgtgtgtgtttatgtcatagttacattaaattccattcattg

SEQ ID NO: 8033 - DNA, 495 bp, Homo sapiens
ccgggacgcccccgcccacctgcgcgcggccgtggcgggtcccacgcgccgggcgcggccccctcccaaactgtgactggtatttattggacccagagaaccgggccgggcacagcgtggctacagagggtctccctcgatgacgacgacgacgacgccaccaccccagcccccgtctgtgactgaaggcccggtgggaaaagaccacgatcctccttgacgagttttgtttttcaaaatggtgcaataatttaagtggcatcttctctcccaccgggtctacactagaggatcgaggcttgtgatgccttgtgagaaataagggccttaatttgtactgtctgcggcattttttataatattgtatatagtgactgacaaatattgtattactgtacatagagagacaggtgggcatttttgggctacctggttcgtttttataagattttgctgggttggttttttttttaattaaaaagttttgcatctttt

SEQ ID NO: 8034 - DNA, 1259 bp, Homo sapiens
caaagcaccgcagcttcccagagttaccagcgcagcacttaagacaggatcttacggcggggtggggctcctggaccgtgaccggcgtcttcttcctggggagtacgacttggaccgggaccgcgactgggaccgggagcggcttctggaggagcgcgacctgctccgacttctgcagggaagggtgcccaagggtcagcagcagccaggcgtcgtggggaggccacaggaagaggcctcaggcactgccctgaggcagcctctgcctacctagatctggagcgggagtaggaacgggagcaggagcgcgaccttgaccttgagtacgagcctgaagacttggaggatcttgagttggagcgggaggaagaacgccctcgactcttggatctgctccgagacctcgagggtccgctgtggggagaggcctgatgatcaggtgccccagtggatgggctgcacccagcccaccctggccctcaggttcctagaccaccccagatgcaggggctctggctgtggatgtggcgccatagccacagcaacggtaccaagttcctaaatagtgtggccgagcctgctgctgtgtgaattcaggccttgtggaaaacaccgccccataggcacaggctgtgtgagggtggacgtgatgagtgtatctggggtctgctcccacccatcacaagctgtggaccctggccccccggccactgcagacatctgcgcttttacctgttcctcttctcctggcctttcctccgccgggcccgcatttttgctcggaagaactcatagaggccgttctgctcccagccttcactgtaagacacggcattccgtgtgtgaccacgtgacacccacccacaaggaagtcgtgaaaaagtcatcaggagttaatccacagaaccttggagagtacatggccctgtggctgtgggctccgagcatgggcgcagtagagcttggttcagtgttcccacagggctgtcctcctgcagcccagtggctcctctggtgcccacgcccttgccaccctgctgttccgctgaggtggtggggacccatggtctgtggaactgggaaacaggaacactgactcatgggtggacaggcctgcagcccagcacaggaaggaggggtgaccactgggaagggtgggctgagggccctgtggcagccggctgcttgagacgtgccgccgtgccacaccttccctaacttcttctgatgtgtctccattaaaacgcccttcattgagg

SEQ ID NO: 8035 - DNA, 632 bp, Homo sapiens
ggggtggcccaaggggcaccggggagaggacccggacccaggaccctctgagctgggaggcttcctgcgctcagatctatcctttcctggccttgacttccccatctgcaaatcagggtcattggctcaccctccagggctgatgtgggggttgagatatggggatgaggatgaagaacttttgtagaaatcggggttccctctttctctctgccaggaccccatagagtcacagcttttggaggggttcacagaatcctggcagcagctccagtcaagaatgtcactggttggcatgatattcttagttgtatttttccttctttaaaattgcatcttgaccaggcacagtggctcatgcctataatcctagcactttgggaggccgaggcgggcagatcacctgaggtcaggagttcaagaccagcttggccaacatggtgaaaccccatctctaccaaaaatacaaaaattagccagacgtggtggtgcacgcctttaatcccagctactcgggaggctgaggcaggagaatcacatgaatccaggaggtggaggttgcagtgagctgagatcttcccactgcactccagcctggccaataagacctgtctccagcaagaccctgtctc

SEQ ID NO: 8036 - DNA, 2621 bp, Homo sapiens
aaaaataaaaataaaaaaaccctgtgggggtatggggctccagtgagttagccccatttaatctagttaaagcaaaaagaatacgtttgctggtgtatatctggacccatggcttcagattatggcttcagaccttgtctcttctcatctttccattattctttcctctttttcattttcattctcagacttgccacccccaggttagcaacatggtggccaatatgctgctgtctccaatttcaatagaaaagagagcttctctttcccaacagtcctagcctcaactctactggtcccaattggcccatacgcctagccctaaaccaattattatatctgggagaatgcagagctctaatcggctagactgatccaatgtccaccactgggactgagaatagaagagattactcctgagatgcaaactggagttctggtaccagatgaagggggaacggatgaatgtgagatacagcaaatcactgatgtggaccacagaacctcacagtttataaagctgtaggtgctgtcatctgatcctcatcacaactcatactttagggagggcaggagtttctgtatctattttacagatgaggaaactgagccttgcggaagtagttataatttgattcaggtcacaagtccaaggtgcaagagctctgagagtgagccttctgtcccattcctgttagacctcactccaatttcagtctgcagagcacaaccatctcttccacaggcaccacactcaaatgctcacaggagctagtgactaatctagacacttccatgcacctgggtgagcagcagggagagacagagactggacatgtggaaggcagagattgtgtctagggtgggtatgagcagcctgactgtagcccagaatcaccatggccaaacaagcccactgctgtcagtgcttccagttgtaataagcaaagccagaaatccagacttttatgcaaaaatgttctgacttttaaagttggcgattggttgaatttatatctatagtgcatttggcatgtgcgtctttggttaatgagctgacttcaggactcacgctggcagtaaaacaatcaacatgttatagttcatccctctctattccttggctcccaaacttttgggataaagatgtgggtttttaatcttaaaaactggaggctcttggaagtagaaagagctgctgatctctccctgctttgcttttgaactgtctgccttgtgcaagttcaacagtcaaactgttttcattccacttaagtggatctttcttctttgcccacagccttctaaaagcccttctcagtcttctcaggcttttactttaatgctaggatagtctaaatcttcaaggtggctatcccttctcccctccgtggaattcctgatagagtctcaataaaagcaaccttagaaacagaggcttttgagctgaacaagaccctactgctgtcttattcatccattttccaaaccagttttccaaggcaggttttggtagttctgcaaatgttagtgtcaaatttcatttaaaaatattttaaactgtaattttaagatgtatgcttggatgtattgggcagcagcttctaaggtgttgaagattactaaggttggtgcaaaaagtaactgtggttttcgccattaaaaatattaaaaataatggcaaaaactggctgggcacagtggctcacacctgtggtcccagctctttggaaggccgaggcaggtggatcacctgaggtcaggagtttgagaccagcctggacaacatggtgaaacccttctctactaaaaatacaaaaatcagccaggcatggtggtgagtgcctgtaatctcagttactcaggaggctgagtcaggagaatcacttgaacccgggaggcggaggttgcagtgagctgagattgtgccactgcactccagcctgggtgacagagcaagactccatctcataataataataataatggcaaaagcctcggtggctcacgcctgtaatcccagcactttgggaggctgaggcgggtggatcacttgaggccaggtgttcaagagcagcctggtcaacatggtgaaactctgtctctactcaaaaatacaaaaattagcctggtgtggtgacgtacacctgtaattccagctacttgggaggctgaggcaggagaatggcttgaacccgggaggcggaggttgcagtgagccgagatcgcaccactgcactccagcatgagtgacagagactctgtctccaaaaaaaaaaaaaaaaaaaagtaatggcaaaaaccacaattaattttgcatcaacctaataatttaggattcttctgccattttcatttaactgatttaactgaagagcccaattaaattgtgaagggagccctgaaaaaattagctactctttgccactgcttctctgtgaatcaagggcttacccaatgcagaaataaagtagatgttgagaccaattaagatttcacctacaaattctgattttaaatgcctgtgtccatctccacagcctcagtgagaattgattgttttgtagataaatcctaatttaaacattggaaatgcctttttactaataaaatgctacaac

SEQ ID NO: 8037 - DNA, 1626 bp, Homo sapiens
cccgccctcatgggcaccgggcaggcgcctcacagagcacagacgtgccctcggccttggtcgtgtcggggccgttttcttgaacgacgtgagaggcatctcccagcccctctgctgccggacagcgcactccagggcaggacgccgcccccgtggctcccggtctcctgtgggcctgctgtgtgccaaacctgagctacctgcacccgagccctggggctcagccccaccacaggggcgggtggacgtgctggccgaggaacaagcaatcatgtttgcgtccccgtccgtcacatgtgccaaatccctggcaggcagatggctcctgccccatattcttgccgtgtcttggaaaagtcacaggtgacagccctcctgaggcccacactttggagggggtccatgtccaagagaccctgacaaggaaggagttgagccctgggtaggcttgcttgaaaagtgagtccttccagaatattctcagagctgccagaaacatcatctgagggtttgggcatcagctctgcctggctggtgttcaggccctcagtcactttggaagtgagaagaacccttcagccaaacctttgggatcccattttgaagtccagagctggagcaggcgggcagtgccctgggagaccccgctctggataagacacccaaccccaactccagcagctggactctgggcccacaaggggagggaccccagccagtattccctcagagccggcacgaccctgctgtggggcggcgggcccagtcgtgttcctgcagtgggcaccctaggcgtatgtgtatacacgcacagatatttattcctttcgcttttagtggttgttatttctgtagcagccaagtcctgcggctccctggggctgagatctccctttgtggaactccgagagccgccctgacagtcccagccgccacccaaggagccccatccgcccacccaccctgggacccacgcggccactccagggatcattgttgtccttttgtgaggggctgaggcgactgtcccatggaggcatccaaggctttctgtgccaagaatcccaagtgactggggctggggaccacttctccaggcctctctccccgaccatgagagcccctggccctggcccctgcacaccagtaggcccagaataaccgccacccttgccatcctgcaacagctggactcaagtttccaggaagtggagatgtgtttctagaagtttcctgtggaacctggaggctcctgatgcctttgactccaggctgggcgattccgatgctgacccgtcctcctgggctccccacccccgctccccaagtgtcacacaggcactttgtacacatcctggttttctaagaagggaacttgccatcaagattcctgtaccaggcccacggccgtctcgggcagagccacctgggccccgggtgcagccggagaccccgccgagcccctcctcccagtattcccatccccgcatgcttctagggagcgcctcttttccgttcttgaggaatttctgttctggggcttgtccttcctttgcagctgttttgaatgtagttttccttttctatttatttgcacattaaagttaataattgaatattgacatc

SEQ ID NO: 8038 - DNA, 1396 bp, Homo sapiens
cacaaagtggggaaggctgtactgggtcgaacagggtcccttcccccacttcacgtccttcctgggacctcagaatgtgaccttatttggaaatagggttgttacaactgtcactagcggaggtcactttggagaagggtgggccttacatccagtgtgggtggtgtcctcataagataaggagaggccaggcctggtggctcacgcctgtaatcccagcactttaagaggccaaggcggatggatcacttgagcccaggagttcaacaccagcctgagcaacatggtaaaaccccatctctaccaaaaatacaaaaattagctgggcttggtggctggcgcctgtaatcccagctactcaggagactgaggcagaaggatcgcttgaacctgggaggcagaggttgcagtgagccgagattgcgccactggactccagcctgcgtgacagagagcctgtctctaaattaattaattaattaatttaattcaattttaaaaagacgaaaagtgacggccaggtgcagtggctcacgcctataatctcagcactctgggaggccaagatggaggattgcttgaagccaggagtttgggaccagcctgggcaacatagggggatcccatctctacacacaaaaaaattttttaatgaaccaggcattgtggcatgcgcctatagtcccagccactcaagaggcacaggcgggaggatcacttgagcctgggaggttgtggttgcagtgagctatgattgtaccactgcactccagcctgggcaacagagcaagaccttgtctcaaaaataaacaaactaaaattaaaaaaagaagacgagagatagtgggtgtggtggctcacacctgcaatcccagcactttggaaggccgaggtgggcagatcatctgaggccaggagttcaagaccagcctggctaacatggtgaaatcctatctctaccaaaaatacaaaaattagccaggcgtggtggtgggcacctgtactggggaggtgcccacccagctactggggaggctgagtcaggagaatcgcttgaacctgggaggcggaggttgcggtcagctgagatggtgccactgcactccagcctgggcgaaagagcgactctgtctccaaaaaaaagagaagaggagaggacacagagacacacagagaagaaagccatgtggcggcagaggcagagatgggagtgatgcggacggacacaaactaagggatgccacgatgccaagcacagccaacagccaccagcagccaggagacaggcctgggacgggctctccctcacagcctccagagggaaccagccctgccaccaccttgaccctggacttctggcctgcagaactgtgagacaataaactctcattgtttt

SEQ ID NO: 8039 - DNA, 984 bp, Homo sapiens
gagccacagctgacaaagtctgcatgtccgaggacggcccctgcactggagctgggcgccagagctgcagagctagtgttcggccctcagagaaggatccagaatcaaaagctcaagagtgacgtgaggtgggcaccggccccaagtgcagagtcaaggcagggagaggccggctggagccaggccccctcgcacgcagcccccaaatcatggacgcacctgtggggagcaccacatctccacctgcggcctcacatctccccactcccctttttgtacgtttaactgtttctttgtacgtggtttacgtaactttaaactgtaacagccttaatggaagaccaaatggttttttatatgtgtatgtacaaagttttctattaacgctgcccgtctcccttataacctggacgtgagctgtcagagcagaagccactaggccactgcgcgtctgaggctcagaccctgctgtggttggcttggggtggccaatgggctgggaccctccatgagagttttggacacttgggtcacctgacccgtgcctctctgacacatgtctccggggggcagccacctggccaatgtgcatttttgcacatgctggaaccttccatgggggtctgggctattggctggagccaggacatgagtcaggggcaccatggacctcacgtgccagggagacttgaatgtggctgtcactcttccggacgccaagggctgcaggaggctgcttttggcactacccaccccgtgtgacagaataggagccagcgactcaggactgctcacgggtcaggagggcaacgcctgaagtcagacctccctataggtcaacagggacaacctggggatctctggagcagggccctcctctctcaggcttggcccactcccccagacacctggacacgtggccacaaatctgggacaaggggcccccgcacagcatgaaataaaaagtgcctgagaagtgtgtgc

SEQ ID NO: 8040 - DNA, 16 bp, Homo sapiens
agacccccgcccacct

SEQ ID NO: 8041 - DNA, 293 bp, Homo sapiens
gtgcccctgcagatgggcagagggatgcatggggatgcaggtcccttgcatttcttggtatctctcagcttttcctcttgcagctccccctaccaggggtcgctttctcctggattgcaaatgcctcttcagtttggactcagctctgacagcccctcctccaggaaggccttccaggacttcctcctctgggtcctctagctctgaccctacagggactccagatctcaacctgttccctggaagtagggcctgctctccatcccagtgaaataaacatgtattagacacct

SEQ ID NO: 8042 - DNA, 303 bp, Homo sapiens
accatccctgtacatctgcaccttcttgtgcaaggaagtccttggcctaaagccttggttctcaaactgggttccttgggacctccggggtgggggggttccaggaggcacgtagggtaccttgcagggtcctaggagggaaacccaggattccaggagggatcccaggaactgtgggcacccattttctgtgtctcccagcccatttccactcctagtttgtcatggataatttttgttcttccctgtgtgatttttgccatcaaaataaaaatttgagactcgttaaccgaagtccacgcc

SEQ ID NO: 8043 - DNA, 1093 bp, Homo sapiens
gtgctggggagttggccatccagcctggggagaaatgtttgaatgttccagctgccccatgctgacagcagcccccatctctggtttcagaaggggtgtgtgtgtgtgtgtgtgtgtgtgtgtgtgtgtgtgtgtgtgtttgtgtgtgtgtgtgtgtgtgtagggagcacccaggcagatctcccccaggctgagagaggactttgttacagatggtactgctggagaggtagtaagtagtgagctccccatcgtgggaggaggacaagaagggaagcagaaggtgctttggaacagtccggtgcttctgtaagaggcgtttgaacctgggcaactccacctggaataggagctgggtaaaatgaggctgaaacctactgggctgcattcccagatggttaaagcattctaagtcacgggatcaggtaggaggtcagcacaagataacgggtcataaagaacctgctgataaaacaggttgcagtaaagaagccggccaaaacccaccaataccaagatggcgacaagagtgacctctggtcgtcctcattgctacactcccaccagcgccatgacagtttacaaatgccatggctggccaggcgcggtggctcacgcctgtaatcctagcattttgggaggccaaggagggcagatcacctaaggtcaggagttcaagaccagcgtggccaacgtggcgaaaccctatctctactaaaaataccaaaattagctgggcatggtggcgcgtgcctgtaatcccagctactaggggggctgaggcaggaggatcgcttgaacccaggaggtggaggttgcagtgagctgagattgtaccattgcactccagcctgggcaacagagcgagagtctgtctcaaacaaacaaacaaaaaaacaaatgccacatcaacatcaggacgttaacctttagaccctatatggtctaaaaaggggaggcatgaataatccaccccttgtttagcatatcatcaagaaataaccataaaaatgggcaaccagcagccctgccctgtctatggagtagccattcttttattcctttagtttcttaataaatttgctttcactgt

SEQ ID NO: 8044 - DNA, 464 bp, Homo sapiens
ggatcgcgacgcagtcggcgggaccctcatggaagcatcgccctcgcctcggaccttgcctggcgctatttttgcagggagctggggagcaggaacgcctcggacctgagtgctctccatattgtggggttgaagtctggatgggagcttgccaagtccctttttaggctttttaattaggaagcatttcgaacctgcgcaacagaccaaagaacagtacaaagaacatccgtgtacccagtaccctgactaccgactacctacaacccgtccctgccccatcctgagttcttttgaagctgatctcaggcatcggattatttcttctgtaaatatttcagaatgtatctctccaagatgagagctcattaaaagacaattacaaagcttatcacatccaaaagaattatcaataattttgaaatattattaaacgtgtaataaatgttcaaagttccacttgc

SEQ ID NO: 8045 - DNA, 633 bp, Homo sapiens
gactctcaactccacaggcgcctcctgccaggtctgctcctcggtcgcccacccgcctgcccgccatgtgtaagcaccccgcccgcccgcctccctgccggcccatccacaccctgcgtccacaccacttccaacctcataggagccgatgtatttattttccttgagtttttatttatgctgtaacctgtatcaagcgttggttaaaggggacatcagacccagtagtgtgatgttggtagatgctttttaaaaaaaacaacattgtccccccgacccccgccttccatcgggccagttccccgattcctgcccccagttctccagagaaccagagtgtgtctgtgagagtctctagcgggggctttactgtggccgggcgacaggggcgggcccggggtggcctgacctaccaggacagccgagtggccttctcccccccaacaccggtccaggccattgagactcggtcttgtcccacgcttcgcccggaactttcccatgcccaggcctcactcagcgtgcacgcacgttggggagaagtcggcccttgggatctttctcttgagtcattttatttttatcatggactagtgcgtgctccgtgtccaccccaataaaagggtctttcct

SEQ ID NO: 8046 - DNA, 1018 bp, Homo sapiens
cgggatccagggaagtcgcacccaagctgcgtggagacccaggagcctcgggggatctggaaacagtttaggccaattgggattctcattcgcctgggaaagaacttgattctcaaatagtgaagcaacacagctgagaggtagtgagatccctgcagggactccctggagattcaggccctggaatggggctgaatggaggtcccgttcgacccttgatgctggggcatccgggttgggatggagataggaggatctcagtatatttgtttcgtagttttttatttattttgcaaataccaaaggaatgtaaaaaaaactcaggtgatctagaagtgtttattttcttcccttcccttcccttccctttccttttccctttccctttccccttccccttccccttccccttcccctacccttccctcctctgtctattgcccaggctggagtgcagtggtgcgaccttggctcactgcaacctccatctccggggctcaagcgcttctcctgcctcagcctcctgagtagctgggattacaggcatgtgccagcatgcccggctaatttttttctttttttgagacagagtctcgctctgtcacccaggctggagttcagtggtgcgacctcggcttactgcaacctccacctcccgggttcaagtgattctcctgcctcagcctcttgagtagctgggactacaggcgcacaccaccacgccaggctaatttttgtatttttagtagagacaaggtttcaccatgttgaccaggctggtcttgaactccttgacctcaggtaatctgcctaccttggcctcccaaagtgctgggatcacaggcgtgagctatcacacctggccccagaagtgtttcaacatggaaattttccttagcccttctgtggttgtcatggcttaatgtgtgtctttccagaactttgaatgtttgcatacttgtggatgtacctttcaaatatgtttgtcttgtgtatcatatataaatggtattgtgtt

SEQ ID NO: 8047 - DNA, 338 bp, Homo sapiens
tccctcacccttccgcggaaagagcccccttactccacctccccgccagcctggggccaccccccctcactgcatcctggggccacccccactcactgcatcctgggaaccttcgccctgcaaggcgtttgctatcttcagccactgggcggagctgcagccctggaggagggggcgggtcgaggctgcgtggtgatggggtctccgcccccacgccctgccgggcagggctggagctggacagaagccagtgcctttaagtcatttgtgtcaaaaccctctggggtccggaggctgtgcgggtgtcctcctggcaataaacactacccggttctcgc

SEQ ID NO: 8048 - DNA, 1556 bp, Homo sapiens
agctgttcctctactggccacaaactctgggcctggtgggagaggccagcttgagccagacagcgctgcccaggggtggccgcctagtacacacccacctggccgagctgtacctggcacggcccatcctggactgagaaactggaacctcagaggaacccgtgcctctctgctgccttggtgcccctgtgtctgcctcctctccctgcttttcagcctctgtctccttccatccctgtccctgtctggccttaactcttccctctttttcttttctttctttctttcttttttttttaagatagagtctcactctgctgcccgggctagagtgcagtggtgggatctcggctcactgcaacctctgcctcctggggttcaagtgatcctcccacctcagcctcctgagtagctgggattacaggcacccgccaccacgtccagctaatttttatatttttagtagagacggggtttcaccatgttggtcaggttggtcttgaactcctgacctcaggtgatccgctggcctcggcctcccagagtgctgggattataggcgtgagcctctggcccggcctttcctttttcctctcctctcctgccgagagtggaacacgcgtgtcctgggagctgcatcttgtgtagggtccagctgcttttggggactgcaggaatcatctcccctgggccctggactcggactggggcctccccacctccctctcggctgtgccttacggagccccgatccaggcctcctgtggctgttgggttccagatgctgcagctccatgtgacttccaagcaggccctccgccctccctgctgaatggaggagccgggggtcccccaggccaactggaaaatctcccaggctaggccaattgccttttgcacttccccgttcctgtcacatttccccagccccaccttcccctcctgatgccctgaaagcttccggaattgactgtgaccacttggatgtcaccactgtcagcccctgccttgatgtccccatttagccatctccatggagctcctgctggagggccctgaaccctgcactgcgtggctgcccagccagctgcctcctgtcctgggaggaggcctcctgggtgtcctcatctggtgtgtctactggagggtcccacaggagaggcagcagaggggtcaggggaggtctcctgccgggggttggcctctcaagcctcaggggttctagcctgttgaatataccccacctggtggtggcccctccgatgtccccactgatggctctgacaccgtgttggtggcgatgtcccagacaatcccaccaggacggcccagacatccctactggcttcgctggtggctcatctcgaacatccacgccagcctttctggggccggccacccaggccgcctgtccgtctgtcctccctccagcagcaccccctggcccctggagtggtggggccatggcaagagacaccgtggcgtctcatgtgaactttcctgggcactgtggttttatttcctaattgatttaagaaataaacctgaagaccgtc

SEQ ID NO: 8049 - DNA, 205 bp, Homo sapiens
ctggccagagggacgccgcagctgggaccaggcacgcggcccatggggctgggcccctgctggccgccactctccgggctctcctttcaaaaagccacgtcgtgctgctgctggaagccaacagcctccggccagcagccctacccggggctcaacacacaggctgtggctctggacatccggatattaaaaggagcgttgctgg

SEQ ID NO: 8050 - DNA, 276 bp, Homo sapiens
gatattcctgacctttccacctatttccctccaaccccaccttccgaaatacatttgctcaatacatttgcacttcataggcttctttagctgtcttccttttaccccggacgggatgtagatgttaattctggaacaattgcagctacaagaatttgtcatcctgccccttttgagaaaaacattgtttgcccttgggtctaaatccttccagatgggatgggatgtatcttgtcacctcctttttcttacttaatatgaaaagacctttcctca

SEQ ID NO: 8051 - DNA, 1712 bp, Homo sapiens
ggggtagcagccagaaagccaaagcagccatcggtggcccaggctccacgtgcttactgaggacatcaggtccacctctggaccccttggcaggccacagagggctctcgtgtggggtggtgtccagccagctcttgctaagcaatcacgtgcacacaggcagcattaatggagtgcctactgcatgccagcaacagggcttggccctggggaattgggaggaaccaagccctcttcatctgttcatgtgcccagcatttattaagcacctgctgtatgcaaggttcccatgttacggcagtgaatgaggcataattgttccctccatcagcgattgattcagtcatcaagcagttactgatcagattaagaatcaggcactagtgatacacattcatttttaaaattcattcaaggatttattgagtgcctactgtgtgttgggtgccattccaggctctgggatttttttttttttttttttaagagtagagtctgtctctgtcacccaggctggagtgcagtggtgtgacggctcactgcagcctgcgcctcccagcgtccagcaattcttgtttctcggcctcccaagtagctgggactataggtgcgtgccatcacatctggctagtttttgtatttttagtagagacggggtttcaccatgttggccaggctggtctcgaactcctgacctcaagtgatctgcccgccttggccacccaaagtgctagggttacaggcatgagccactgtgcccagcccaggctctgggaatattgagataaataagatgcttctatccatttattcaagcacatattggtcacctactgtgtgcctggcactcatgtcacaaagataagttcctgattcggtacacttactgagcacctgctgtgtgcagggagctgagctatgggatgggaatgggagtaaacaaggtactttttacttttttctttttttcctcactgctagacggtgtgggaacttctcactcattggcttctttcccacacacctgaagagcactgactgtgtgccgggcactagtgatacaaaagagtgtgacagttgttcagtctgcattttcgatcatgggctacatgccgagtgctggggcacagagatgaacaagatcggttccttcacttcttcatgccacaagtgtttattgagcacctgtgtgccaggcctcacagactcccagttgggttgaagaatggttgactgagtttgattcttcctgtaccctcggtcgtctgagctgtgtgcagacaacatccccccaccacccaagagggagggtagctcttccgccaccaggggcaagcacaggtcctggtggccccacgccacatgttagcccccctggagggggcgccagttggagacgggggctgggtgtccctggcccactcccggtcccctgtgctttacctccttgcccttgtgtctcaggtgtggtccctgcctgcttgatgaagttgctctgttcaagcctttggtgggatcatgtgtttgggggcttttaggggacccagctgcactggggcactgcccgtggcctgggtaggacatttcccagcaagggctggaggagttgccgtgccttcagcctgaatcgaatgtcagaaccagccagcggtgcttcaccctcttggggataacttgcttagttttttaataaatgttcctggttggttttc

SEQ ID NO: 8052 - DNA, 87 bp, Homo sapiens
ccccatcgccgacacgccccccactcagcccagcccgcctgtccctagattcagccacatcagaaataaactgtgactacacttggc

SEQ ID NO: 8053 - DNA, 240 bp, Homo sapiens
acccgcaaatgctgctgccccagctctacactgcgccctggtgctggctgaccaccccctgccctcctgccggaccctggggcctcccaccccagcctccctgaggcccatactccacggagaggagccccatgcccagcctggctgagcccgagattcgctcctccccctcatgccaaccccacacaggtcccggccttttaatgttctttgaataaacactttattttctaataaaat

SEQ ID NO: 8054 - DNA, 1454 bp, Homo sapiens
gtcagcatcagggtccccagcctctgggctcctgtttccataggaaggggcgacaccttcctcccaggaagctgagacctttgtggtctgagcataagggagtgccagggaaggtttgaggtttgatgagtgaatattctggctggcgaactcctacacatccttcaaaacccacctggtactgttccagcatcttccctggatggctggaggaactccagaaaatatccatcttctttttgtggctgctaatggcagaagtgcctgtgctagagttccaactgtggatgcatccgtcccgtttgagtcaaagtcttacttccctgctctcacctactcacagacgggatgctaagcagtgcacctgcagtggtttaatggcagataagctccgtctgcagttccaggccagccagaaactcctgtgtccacatagagctgacgtgagaaatatctttcagcccaggagagaggggtcctgatcttaaccctttcctgggtctcagacaactcagaaggttggggggataccagagaggtggtggaataggaccgccccctccttacttgtgggatcaaatgctgtaatggtggaggtgtgggcagaggagggaggcaagtgtcctttgaaagttgtgagagctcagagtttctggggtcctcattaggagcccccatccctgtgttccccaagaattcagagaacagcactggggctggaatgatctttaatgggcccaaggccaacaggcatatgcctcactactgcctggagaagggagagattcaggtcctccagcagcctccctcacccagtatgttttacagattacggggggaccgggtgagccagtgaccccctgtagcccccagcttcaggcctcagtgtctgccagtcaagcttcacaggcattgtgatggggcagccttggggaatataaaattttgtgaagacttggagatctttttttttttttaagcaaatttacaagtttcaacagacaagtccacattcatccctaaaagtctcattttccagtagaaaatatacactggtaaaaacggggcatggggccgtggctcagggctgtaattctagcacattgggagaccaaagtgggaggatcacttgagcccaggagttctggatcctgtctctgcacaaaataaaaaattactcaggcgtggtggtgctcacatgcctgtagtcccagctatacttgggaggctgaggcgagaggatcgcttgagcccaggagttggaggctgcagtgaaccatgattgcgccactgtactccactgggcggcaataagaagacaaaaacataaaacaggacatgtgtgaggcaaaagctgcaggaatttctatcaggcagatctgacctcatcccacccaccccctgctcagatacccttcatagctccttattgctttcagctcataaccccacat

SEQ ID NO: 8055 - DNA, 52 bp, Homo sapiens
gtgcagggccctcgtccgggtgtgccccaaataaactcaggaacgccccggt

SEQ ID NO: 8056 - DNA, 211 bp, Homo sapiens
ggacagggccagccgcgggactgacaccctgggatggaacctcaggatgggccaaacccagacaacgggcccatggccttgggctctgattggctggattgccttgtatgcaaatgagttcaggactacaataccctaccctatggggaggccctgcctccgggaggtcattttttaaatccagccccttgcttcaaccgtccccagtatt

SEQ ID NO: 8057 - DNA, 206 bp, Homo sapiens
tggccggtgagctgcggagagctcatggaaggcgagtgggaacccggctgcctgcctttttttctgatccagaccctcggcacctgctacttaccaactggaaaattttatgcatcccatgaagcccagatacacaaaattccaccccatgatcaagaatcctgctccactaagaatggtgctaaagtaaaactagtttaataagc

SEQ ID NO: 8058 - DNA, 259 bp, Homo sapiens
gcccagaacttggggagccagttcacccacgggtggtccaggtcacgactctgcacgcccttaggccaggtcagctgcgagggtcacagagcgttccgggggccaaggcgccgggccccggggccatgctcttatcaccagccacccgtcctcccgccagagggtccctgccccgagtgacaccccatcccctcccatcccccggcgcgtgtgtgtagagcctcagggctgagtgcccaataaaggtggcggcaaggct

SEQ ID NO: 8059 - DNA, 714 bp, Homo sapiens
cggccctgcccgccaccagacccctaaatcttggccatcgtgtggccgccacctccgggaagccttgtacagtggcgcctcttggagttcaagaagccaacgctgagtcaggctgagtggactgaggcctgccccgcccagactgcccaggcagagggcagggctggaccatgggtgagggcaggggagcccggagcttcctctggtcacctggtcccccgactctccccaggcccccggtgggcatggagcagcccggggaggggtccgtgctggttctgaataaagcaggacccgcctagtggctgcctgtgtgcatggctggaaggcactggtgatgtcccaggaggtagacctccagccctgggtaccaagatgaatgtgggaatcagaaaaacctgttcccatcaccggcctagcctagaatcctagcctagaagccctctctccctctgggctggagctcagtgagggacaactctctagggacacctgtaccagccccacctggcgctgagatccctcagacagcatggcccagccctggccagaagcatcgctccccttcaaccaaccgcgttgatggacacccactgtgtgccaggccccagcggggcccatgggggaggtgacctgggtgaggaaggtcatttgggtttttgtgagatttgtattgagcacctgctgtctacagagaatgtgatgatgtcaatt

SEQ ID NO: 8060 - DNA, 1130 bp, Homo sapiens
acggcacagggacccctcgaggaacaaggttgcacaccagctttcagccaccatgactgtggggagtggctggaccaagggctgacctccccgactgcatcaaagttggggaaccaagtctcagagtgaggcgggggcctttcggatatcacatgggacagaggaagagcccggctggaatctgacttacctggaccgctgtccttgtgaggcattgaatgcccagtgcagtatccgagagactgtttaataacctgtcttcccagccaattggtggtgctggaatcccctaggagccttcagtctgggagaaacagagccagacatagacagttccagcatcacagaaccagaagaagagacctgcaactgtgagagtccagacaggaagcagagaaggcgtccttgcggaaagggcattttagctgaggctttggagtacgaataggagctcagcaggcagacgaatgaggaataaaggtcagagaaggtcagagctgagtgacgtttggaatccaccccgtttattgtagaactgggggttcagagggcaggtgcctcagagttgaggccacacagtgaggtctggtgggtgaaaggacccaggaacgaggcgttcaggaaagcaggttgtcagagctatgtggagtctgtgggtggcaggggcagccgctccagcctttgaagactttgaaagccagagattcctggcgcaggcttggacttcctgggagctcctccaagtacccaggggcatcagagctgcctgggtgttacatggcccagggaacccaggttcagggtaggacaggcaagaccagatacccaatgtgcaaagtgaaaacactgggctccctgttaaacgatgaagaattcaagacagtgacagcattacgtcacccctggggacagaggtcagcctaaggtgacacacggggactactgtgcttccggaggctccctgtgtcctggaggagaaaagcattagagggggcagctggacaagctcccaactgcagagtcccagccctggctggggcagggccccggcctgggactcagcatttctgatatgccttaagaattcattctgttttgtacaattattttttaaaagtaaacgtgtggag

SEQ ID NO: 8061 - DNA, 1240 bp, Homo sapiens
gcaccgaggacccgccccaagcagagccgcccctgggcccgtctgcgccggaggctgcggcggcgggagccacggaccagaccagccacatccaggggtcctcatttctccggctctggctcttgtttggggttctctcaccctctttctctttccttccctcccccattctccagatctccctctgtctccttttctctgtctttcttggcccctgtctctctccatgttgggggtcctaactcccccaccccatatctacgtgtcctccgggcattgccctctccatggctctggtcaccctgaccctctgccctgcccaccgcaggtcccccggggtcccggaagccccttctggctgcacctgccatgtttacagagggcccctgggctgcgcggccccagcctgggcaccctgatttttaagccatagacctggggtcagggcaggaaggaacttcactctgctgcttccgagaacctcggccgtgacattcggggccgggcgggacccgccccacagactccaacttcccctccaaaccccgaagtgaaacccgccaccgggttacccccacaagggggccgctgcgagaagttcacccacccccgaaaaaataattaaactcgcaggccaggcacggtggctcatgcctgtaatcccagcactttgggaggccaagacgggcggatcttttgaggtcgggagttggaggccagcctggccaaaatggcaaaaccccgcatctactaaaatacaaaaattagccgggcgtggtggcggccgcctgtaatcccagctacttgggaggctgaggcgtgagaatctcttgaacccaggagatggaggttgcagtgagcagagatcgtgccactgcactccagcctgggtaacagagggagactcctccgtctcaaaaaaataaataaataaacttgtgagctggccccaacccctcctaggaatcacagctccccgtactggtgccgccgcagtggccaagttgcgacactgcccacggcccctccctctgatgcagattcagggcttctcttcgatcatgttgggttttgattctgtttttccttgactgcaaaaccctctttcctctcctcttttgggacaagagccctggttttctacgctgcccttggccaccacactgcctgccccacgagctgggaggcaggttttgtacggtacgttgttattgatatgatataaaacatcaaacgtcgt

SEQ ID NO: 8062 - DNA, 683 bp, Homo sapiens
actgtctgcttcctggaccagatgcaagactgtctcctggcggaccaccccctctgacagaaggggaatgggctcctgcagcaagctcgggtcttgagccacgtcccagcaccacttcagctccggagcattgggctgagccgccctttccaagctcacttctgggactgagtttcctcaaccggaacacacccatgaagatggatgatcatcccctagcccttctcagcaggaacctcatgcgacctgtgaccaagatgtcccatcctcagcacagggcccactctgccaaccagtctcaagcaccagcccctcaacactgccatccacctggctctgggccaagccaccaatccagagctccctcaggtcctgggactaaggcggggacatgactgatcccctcagagcaggctcaggcctggagtcggcccccaaaagtttcacatagggccaggcagcctctgtgtttctttccctggtcctgaactgtggaaatgccattaaactctctctataatgtaactgaaactgctggctgggcgcagtggctcccacctgtaatctcagcccttcccgaggctgaggtggaaggattgctcgaggccaggtgttcgagaccagcctgggcaacatagcaagaccctgtctctatttatattgaaaaataaaaataacaaaag

SEQ ID NO: 8063 - DNA, 6370 bp, Homo sapiens
gggacgctcaggtctcctaagacctcatcctgctggggaccccacgaggggacatccaccctctggggtgtggccaggaaaagacaagctcttcagcttggggatccgatctggaagagagattctgatctgcccacctcctcttcctccttctctacaaaagctccggttgattcgagggaagtggtgaaaatttttttttctcccattttcctccctgcatctggggacacagctgccgtgaccagggaggccagcctgggaggtccagatgcccagggagaatcttggtctggtgaatccatgagctgcgataccacggctggggccatatgttcacctgctttcctgtccgttggtgaaggaatttcagaattcattttatatccaagactggcttttaccaaatttaaaagcctctcaatgcgtcctcgaccttgaactgtgctcaacagcctggccctttctggggccaccctgggatatggctggctggctggctttctttctttctttctttctttctttcttgctttctttctttcttgctttctttcttctctctctctctttttttttttttttaaatagtgctagtttgggcacagagtaatttatattccctttggttaaaatgcaggctttttagccaacaacaaaagtgttttccccccacccccactcgcccaccagggtgatgccacttttgcctcctgccctgaaaattggacttaagatgccatgtcttggccaggcgcagtggctcatgcctgtaatcccagcactttggaaggccagggtgggcggatcacctgagatcaggagttcaagatcagcctggccaacatggtgaaaccctgcctctactaaaaatacaaaaattagccgggcatggtgatgagtgcctgtagtcccagctactcgggaggctgaggctggagaatcgcttgaacttgggaggcagaggttgcagtgagctgagattgcacagctgcactccagcctgggtgacagagcgagactctgtctcaaaacaattggacttaagatggcatgtctttgttttagggccaaaaatgaggcccccttgcttaaggcatggggtccgtggccaggcaacggggtgggactgctgccccagatgtggccatgggggtcgtggtcctttcaacaccaagctatgagctgtcgccatggagaccagggccacctgtggaaaggcggattttgtctgcttttgacttttcttttttaatatgtaaaactccacatcagcggaaacccccccctacttctggcctggagcttcagggttttggtgctgggacgagtttgttgttctccttagcggggtggcgcggggggctcaaaacgggggcgcgggggctggagttggcagagctctgcatgtcccggcatgtctgagcaggaggaattccgggcggccaaagggttttatgtagattgcttttggacactcgcccaggagtcaggagttgatttttatctcacttcctggtaaccttgaacttaccaggcagggatgagatgacgtaaacttcctcagatgatgtaagttcagccacatcttgctgcccattagggagagaggacgacccccacagtgaaagtaattgagtgaaatgcacgttctggaaatcagtttctattttggcctggaggaatgtggctatactgcttccctgagtgtgacacagttggaatctaatcttgttggtttcccaacatctaggtttttgtttgtttgtttgtttttatgatagggtcttgttctgttgaccaggctggagtacagtagtgtgatcatggatcactgcagcctctacctcctgggctcaagtgatcctcccatctcagcctcctgagtagctgggactacaggcatgcaccaccacacctggctaatttttaaattttttatacagacagggtttcaccatgttgcccaggctggtctcgaactcctggactcaaactgatcctcctttctcggcctcccaaagtgctgggattacaggcatgagccactgcacccagcccagttctttcttaaaacagctgagagttttgttttcttcagcgttcaccttccttgtctccagttccgatgctggcagtggttcctacctctgttgggtttctagatagtttgggaacggggttgatgggtttctgtgaaacacattttccaagtcttgggctttctctggaggggaaggtggatgctggcgggtgacttgcagtgggcgcctggcagtgggtgtggactgtaactgacaggtggaaatgagtagggacactattgttccctccatgccagcttttttttttgctggaaatgccccctccacacccctggtagctctgtgtcctgagaaatccagagtgtgggagacatcactgcatctgtccccccagcttctgtgaagggaagctgtggcctcttttgaatgtggggaacaactgaagactcaggggtcacccagaggtctggtggaaagcaacttcaggtttcatcttgctctattcctcaaaggtctggtctgtgggcctctgaggagaaaacaggtctagccaagacagggacaaaatggggaaggggatgtgccaggcctgaactgagctaagcacctgccccgggctccacacttccatctttcttttgtcttcatttcacctctgtgtttaaagcactgtgtgacatagctccttagagatataacctattgtctgctcattgtcacgtgtgtgtgtgtcatctttgtattcttgcagtggtttcacatttccttacccagtcaagccagtatcccatccttcctcataatgcacaacatttggctcattttatttttctcattgttattttttatttttattttttgagatggattctcacactgttactcgggctagagtgcaatggcgtgatctcggctcactgcaacctccacctcctgggtttacacaattctcctgcctcagcctcccgagtagctgggattacaggcgcccgtcaccacacctggctaatttttgtatttttagtagagatgcagcttcaccatgttggccaggctggtcttgaaatcctgacctcaggtgatctgcctgccttggcctcccaaagtgctgggattacaggtgtgagctactgcgcctggccaagttttttacaaatatttttcttttggtggaactcatctgtgcactctctggtgtgtttttccacctttgttgggtcttggcttaaaatatcctcatgtgggctaggtgtggttactcacacctgtaatcctagcactttgggaggttgaggcaggagaatcccttgagccaggagttcaagaccagcctgggcaacatagcaagagatcccatatctaccaaaacatacaagaattagccagatgtggtggtgcatgcctgtggtcccagatactcaggaggctgaggcaggaggatcacctatgcctgggaggttgaagccccagtgagccatgatcacaccactgtagtccagcccgggtgacacagcaagactctgtctcaaaaaaaaaaaaaaaaaaaatcctcatgcaagaagggaaggaccaagtcccattccctcttgcctcattttcagagcctggggtaggggctacaggtggcataggaagggtctgcaaggtgggtgggacttggcaggtgttgggaagaggaataggggtggcaagtgtcaatggtgaaaagacaggctgaggggtgtggtgggaaggctgggggagaaaggtgagaagtgattgggggggcttccctgatgagtcctcatggagggtgctgaggcagggaacaggggtgcagggacagtgatcagggcacctggtaccctgaccaacttgatgatggcatctcttttaagatgcccaagtctgcgcacttttattcctttattcggcccctagcaccccctccccaccccaaagaaggtcagttgcatgcgtgtggggatgtagctcaaaaaagaaataagatggagtggaaaggaaagaaaggaagaagcaggaattcaaggtgggtgggctgagcttggggccacctagcccacctgctccaatcaagggctggaacaaacctgaggccacttggagaggcagggctgggcagggacagggggtgggggccgaaatcacagcttccccatcagagccagatgtgtgaaggaaatgtcccagatggcagtagtttctcggcaaggaggggaatcctggagatggttcatgtctgtgatcccagtgctttgggaggctgaggtgggaggattgcttgagcccgggagttcgagaccagccctgggcaacatggcgagaccccatctctacagaaattaaaaaaaaaaattagccagttgtggtgtcaagcacctgtagtcccagctacttgggaggctgagttgggaggcttatctgagcccaggaggtgaaggctgcaatgagccatgattacactactgtaccccagcctgggcaacagagcaagaccctgcctcaaaattaagaaaaaaaaaaggggggccaggcgcagtggcttatgcctgttatcccagcactttgggaggccaaggcagactgatcgcttgaggccaggagtttgcgaccagcctggccaacatagcaaaaccccatctctactaaaaatacaaaaattagtcaagagtggatggtgcgtgcctgtaatcccagctacctgggaggctgagacaggagaattgcttgaacctgggaggcagaggttgcagtggtgtgagatcacgccactgcattccagactgggcaacatagcaagactctgtcacaaaaaaaaaaaaaaaaaagaattccctgctctgcttttctgctcgttgctggcatagaaacatctagaacagaaagtatccactctggggcagatgggagagctggaaaagtagattcaagatgccttttagtcttggaagtttcttccaggaagcaagaccagctggtatgtttacacctgcactccagtgccctggggaggtgaccaggtggagggggatggctcatggaaatctgtcccgcacagctggcccccttttggctgccactgtctagactgttggcctttgacctctctgcctcttgtggcgtctgaacctagacgtcccttttggagacagctggacaaagccctattctccgcagccccagcctctatcctgaggcctctgggagctgcgtgacggccagcatggggtgctgatcatggtcaaggaggcaggtctttgccaggttgccccatgcagccacccatcctcagcatcctaacttgagggggcaggagagggctttgtttttataatccggattaaatttcccttccctgggcacaagtgcctcatgagggcccggggctgctggttgggagggaaagcatccccgtttttgcagtgaggaggccggccgagggctggggttccacttagacccttggcagaatggctgttgaggggcaggcgctgcccagtgcccacgtctggaaagctaattcccgggtggacgctgaacatacctgctgagagactctgtcccctggtttccaggacagttgtcacaagctgagtggggggggactcccaggacttgagggacccagtcccaccccaaactgctccccctcccccaaattccctttctcctcctgctctttctccccgctgtgcctcccccagttacccacagaagtgcctgcctctccagcgctcacagaacacacaaaaagggacaggaattggtcactgggtagtggccgtggctcctgacgatccagaccagcgtctggcccaagccattcagaggtggggtctggggcctgggggttttgtgtcgtgacactttgtctcaaggagattccacatagggatttgaattaggctttctgcttgccaaggcctgtggcatctgagcctggctgagggccgggcaagcctcccctgagcctttggaagccgagttcactctctgcctgcccaggggagcaccggcttggttctgggggctcctctaacatctcaggtttttatcttgtcttaaatttctttctaggaaaaaacccttccctgccaaaggtgactgtgttttctgccgccgaaggagggcccggtccctccaggctcagtgtggcttctccctgacccccgccctagaacttttgccagtgccttttctgaaactcctgtgtcccgggccccccaggcggagaaggatatgccggattctgcctggggctgggctctaggagaccccaaatttgacaccacagaaagcaaataaaacacttgaaatacgcatac

SEQ ID NO: 8064 - DNA, 241 bp, Homo sapiens
gcagtcctggtccttccactgtgcacctgcgcggaggacgcgacctcagttgtcctgccctgtggaatgggctcaaggttcctgagacacccgattcctgcccaaacagctgtatttatataagtctgttatttattattaatttattggggtgaccttcttggggactcgggggctggtctgatggaactgtgtatttatttaaaactctggtgataaaaataaagctgtctgaactgtt

SEQ ID NO: 8065 - DNA, 403 bp, Homo sapiens
tggggcggcagccccgggcctctctgcgggcctaggcttctgcccagcgcccctgctcagggcgaggggctgaggtcacacctcgggcacctggactcctggccaatcaaggcttgcccagctgggaggccccacacgaaagactcttaccattttattaaaaacgcaaggacctcagagacgttcttttctgtatggacccttcctgccatttgtattttgtcccagagagaaaggctctttggggggcccctctccccaggacgtcagggggtggggcccataaataaatggaagctggttttggtttttggtagcttgtctcagattccctctttggccttctgccaccacactctccaccctgtggtcttgttccgtccccgcccccatctagccccac

SEQ ID NO: 8066 - DNA, 743 bp, Homo sapiens
ccctgctgcccggtgccttgagggggtctcagggcagcagcatacaaggtggcagcgggtaaccctgccttgttctgtcatccagggctcctttgctgccccgttctgtcacccagggctcctagggggacaaggctctctcccgaggggtgtggaattcctgggggggtctttaattctggctccttccttcctcagaacatctctattctgcaagacccctctgccatgccagggcacgcccattccagctggagtcgtggggctgggcacaggggaatttttccagagctgagcctgacgtctgctctgaagaatgcttagaaggttcccagacaccagagccagatgtcccccaccaccggtcaggacctccttgaggtgcacaagcacggtctcctctgagttcaccccagcccacccccgcacccactaattctgcttttcctgccccttgctccgtaaaagtatcaaatactttctccttggtatctcaaggaggtttctgagataggtagaagtcttgagacggaggctggccatccattcagccctgagcgtgctgagttctgtgtttctctgaatagaggtgtggaacctgaggggccagcaggcctctctgaaggcctccatggagcaaacggagccacctcgggaaagagtttaatggaatatttttgtacccgatgtttacagatgctgttgggaagttatcaataaaaagacaccattactaaaaaggg

SEQ ID NO: 8067 - DNA, 2309 bp, Homo sapiens
ggtggttctttccttgaagggcagcctcctgcccaggccccgtggccctggagcctcaataaagtgtccctttcattgactggagcagcaattggtgtcctcatggctgatctgtccagggaggtggctgaagagtgggcatctcccttagggactctactcagcactccattctgtgccacctgtggggtcttctgtcctagattctgtcacatcggcattggtccctgccctatgcccctgactctggatttgtcatctgtaaaactggagtaaaaacctcagtcgtgtaattggtgggactgaggatcagttttgtcattgctgggatcctgtcaggcactttgaggtgtccctcaggccttggccctgaagtgtctaggtgtgtggagatgggtagaaaattaggtacacccaatggtgtagaacgttgattctcaaatttttttattttatacaaatggggtctcactatgttgtccaggctggtcttgaactcctgggctcaagccatccgcccatctcagcccctcaaagtgttgggattacaagcaagaactgccatgcctgacccagttctcagttttttgtttgtttgtttgtttgtttgttttgagacggagtcttgctctgtcgcccaggctggagtgcagtggcgcagtctcggcttactacaacctctgcctccggggttcacatccttctcctgcctcagcctcccgagtagctgggactacaggtgcccgccacaactcctggctaattttttgtatttttagtagagacggggtttcactgggttagccaggttggtctcgatctcctgaccttgtgatccattcgccttggcctcccagaatgctggtattacaggcgtgagccagcacgcctggcccagttactcagttttgaatctgaggccgtgacatcactcatggtctgcagtcagtgctctgcccctgagctgtaccctctcctatgataatcactcttaagaagggcaacccttggtgttttccccttaaggtcacccaggctggaatgcagtggtgtggtcatggctccctgtaccctggaactcaggcttgggtgatcctctctcctttgcctccgaagtagccaggactacaggtgtgcacccaccaccacactcagataattgctttggtgtttttaaagcttgtaatgatcagtaggctgaggtgggcaaatcataaggtcaagagttttttagatggggtgagcacagaccaattcctgttttatttactgatttaaaattttgagacagtctcactgtcacccaggttggggtgcagtggtaggatcatagcttgctgcagccttgatctcccaggatcttgcctcagcctcccgagtagctgggactgcatgcttgtgccaccacactcggttaatattttgtagagatggggtcttgctatgttgcccaggctggcttcaaactcctgaacttaaaagcctcctgtttagttttggttttttatcactttttttttttttttttgagatggagccttgctcccatcgtgcaggctggagtgcggtggcgcagtctcggctcactgcagcttctgcctctcgggttcaagcgattctcctttctcagcctcttgagtagctggaattaccagtgtgcgccaccaccaccacgcctggctagtttttctgtttttagtagagacagggttttgctatgttggccaggctggtcttgaactactgacctcttgtgatctacctgtcttggccttccaaagtgctaggattacaagcgtaagccacagcgcctggccttgctacatttttttttttttttttttttttacagacatggtctcgctatgttgcccagaatggttttgcactgggtccaagcagttctgccgcagcctcccaaagtgctgggattacaggggtgaggcaccttgctggcccctgttttgattagggtgcagtgctggtgaagccggtgcacgaggccagtgatgcatcctaatgaggggtggagttggcgggacttcctgggccagtttggggactttcacaaaagacccccatgactcagggttttgagttcttaactgatcgaatgaaggattcaaaattaaccactccaaggggggattgaaggaagaaccactcttaatggacaaaaagaaagaaaggggagggagtaacagggatatgagctctagccgcccaagctagcaatggcaacccttctgggtccccttccagcatgtggaagctttcctttcgcttcattcaataaacagctgctgctc

SEQ ID NO: 8068 - DNA, 1399 bp, Homo sapiens
gcgctgctgcccaagccgcctggctatgctcgatttgcaccagggttggcacggtcaggacgctgccagcagaggaaccctctgccagtgcacaatggtgttctcacctggtggccctcagatgtacacttccccagagggcacagccgtgaaacttcacatcagtttcgctgtgcattgctgggacactgctgtatacctcgacacatgccaatcctgcacacgtggctgtccgtggagcttggacatgccccactgagcacagaccttcagatgcctgtcctcagcccccaagcacacacactcatgtacacacacatttgacaaagtcacacttcataacctcctaatggtacacaccccaccaagatggccttttcttttcttttttttctgagatgcagtctcactctgtcaccaggctggagtgcagtggcgcgatctcagctcactgcaacctccgcctcccgggttcaagtgattcccctgcctcagcctcctgagtagctgggactacaggcgcgtgccaccacgcccagctaattttttgtattttagtagagatgggtttcaccatgttggccaggatggtctcgatctcctgacctcgtgatctgcccacctcagcctcccaaagtgctgggattacaggcgtaagccagcacgcctggtcctttattttcttttcttttttctttcttttttttgagatagagtcttgctctgtcacccaggctggagtgcagtggtgcggtcttggcttaccgtaacctctgcctcctaagtagcttggattacagatgcccgccaccatgcctggctaattcttgtatttttagtagagacggggattcgccatgttggccaggcttgttttgaactcctgacctcaggtgatctgcctgcctcagcttcccaaagtgctggattacaggcgtgagccaccatgcccagcccagatggccttttctctcagcccactgtgacctatggggccaccccttctccctagcacctaagtgttccctcttgctgctagtgctgcctggaggtttggcggcgggcaggagggcctggggctcaccacagccacagccctcttgcagcttcgcggcagcagctaattcaccccatctgggttttatttatagttcccatccgctcttgtagggtaattaaaaccatggaggcgatcagcgaggttctccaggaccttaggtttgatgcggaatctgccgagtgatggcggctccccagggatgcgccgagggagatgggaaacggggcggatggcgcccagcccagccctaactgccagctggctggggttgcgccccactgcgctgctgaccttcctgcagttccagacacctcccacaataaagagctcctcctctgt

SEQ ID NO: 8069 - DNA, 503 bp, Homo sapiens
gcctccactggccccatcactgccaactgcagggggcccctcgggcctcacttgccctgagcccaggagtccaagggcagggtgggtccagccttgagcccctccacccccaaatccttcctctcctcccagtcccaccccttgccccacggagtcctggggacgcagtgccccagctgggaagagggcgggatcgggcactggttcctccttgtccccgctttcttgggggcttgctactttttgtcttctattgtgtggctttctgagtatttgaaccccagtcctgtgtcaccttcctttttccttctatgtcccctctctgcggggggggcgctgaggctgagggggagctgcgtcttgctagggcttcccccttctccccatcccggtctccagagacccagcttctgagagacagggtgtgggcatctccatgcccctataaagcgtgcctggggcttgtctggggctggggaggaataaaccatgtatataaaaga

SEQ ID NO: 8070 - DNA, 1247 bp, Homo sapiens
cccccaagacccccgggaccctggcctgaccgcatgttgtctccaagtggggcttggcgaatgcacgtctgcctgagaaccccagtgccccccttcgcccgggctgcccttgaggggcctgctgcgttgataagcccccctcccaggggtccctccctccctccttcccaaagcagatcctggctgcgagtccatccgagggagcctgccggcaaagcgtctgacatgtggtggcagcaaattcgtccccggggtggtttcctcgcctggcccccgagtccccacgggctggcgggtggaatcccaggtctccagggggtccctgtgcagctccatctcacttctctactgcctcccagccccacggtttcaggcattcagatgtgagctcatcaacattgaacccaaagtcggtggtatatgactcaccctccttccaagtctcctgcgcgcgtgtttttaaaataaactcacccgaaacgtccgtaacacacggacctccaggagcagtgagaggtggcttagaagcccctggtttggggtgggtggaggaggagggcacgtgtctgcctcccctggggtgccctccttcccccatcccaagctgctgaggggaggccctggtcatgcctcagttcctgccttcatctgctttccggaggaaaaaccatatcaactcctagaaacgctccttaggggcttgggaccttccatttggcactgagcatcttgtggggccttaactggctgagacatcccggccctctacatttgccctgttggccaggcagtccccttcccgcaattggagggcgacgctaacttcagaatcccatagtggcgcttgccgcaggtctggtggggtgtcttttttctcctccctcctttccacccctccgcgccctgccactccctggcctgccctgtttttgggtcaacattgctacggagccagcagtgaggcctttcccttcaagggctctgtggtatctctggccacatttgttctaatgtctgaacctctaaatcttttctttttgattggttttactgtttttaagaagccagcactgctgtctcatagatgggatttgtactcttggggcaacttaaagtgtctctctcgctgctaacagacgattgatgtcttgtctctgtgacccactcaccatgtaaagaattaacctcctatcttagcagacatcgtctcctaatatttccctttatttaataaaaatgttatggtg

SEQ ID NO: 8071 - DNA, 4951 bp, Homo sapiens
gcgggcacgccggcaccctgccgctcagccgtcccgacggcgcctccccagcccggggacggccgtgctccgtccctcgccaacggccgagcttgtgattctgagcttgcaatgccgccaagcgccccccgccagcccgcccccggttgtccacctcccgcgaagcccaatcgcgaggccgcgagccgggccgtccacccacccgcccgcccagggctgggctgggatcggaggccgtgagcctcccgcccctgcagaccctccctgcactggctccctcgcccccagccccggggcctgagccgtcccctgtaagatgcgggaagtgtcagctcccggcgtggcgggcaggctcaggggaggggcgcgcatggtccgccagggctgtgggccgtggcgcattttccgactgtttgtccagctctcactgccttccttggttcccggtcccccagcccatccgccatccccagcccgtggtcaggtagagagtgagccccacgccgccccagggaggaggcgccagagcgcggggcagacgcaaagtgaaataaacactattttgacggctgtcttttatatttctgagcacacacagagccctggcgtccaccggggcaggcgcaaagtggacagagcatgcagggcggcggacccccccacgaccctcctcgccctgtctccatcccctcgaagccctgcctcaccgcaggcaggcccatcggtggccacctttgccgggaagtgaccggaaggccccgtgaggggtcgaacgcggaggcaggggttacctcttggggctttacaatccgtggcccctcctgtcctgcactgtggtcaccggtcctgtcatagatgctgttaatttaaggtacaggcagaggtggccaggggagtttcattgtggtttttttttccttttagtttctagttacattttggttgtagatgactcgcttaatcttttaagccaacacttgcctgagagcatgtttttatttcagaaatccaactttacctattttttaagctaactggaaatggaggccatgcgccccaaagcagcccgccacccacctgagtgtaagaagtgagtccggcttttgggtttcaccccaagttatctcaaaacaaaagggctggtcaggctgggcagggccttgtcaggagctcacggtaggcagaggtgcctctgccagggccacagaacagacttccgggaaggggccttggcttttattgagggtctctcaaagacccagcctgccagcctctcccagaggtgcctgctagtccttagagtgtgtgtgtgaagatgccatgaccagtggcagctgagacctctctgccccaagagtgtgggggactggcagggagcgagggtccccgagacgaggaccacggtcctccctgagaacctgggtggaactggcatttcatcccctctccaccctaccctctggctcctagcccacaccccctctcttgggcagcgtggtctgctggctgccccttcttggcagctcagggtcgtggcaggtggacttggagacacacagcagtgtgtgttttagtggcaggtttcaggagcacctctaagaccagggtgacagggtacttgggagctgtcctggaccctccccataccacgggccctgcaagggaggcatcagggctggctttgttttctgctgttcttggaataggaactgctgttctgatccccccaaaactgcattgcggctctcgctcgctcctgcctgccgggacagcgccttctgctgagtccgtttatttgtagtgtcatggctgctgctttcactggggtcctgggcaccctggcttctgtcctcagagctgggtttgatcctagcaaccatcccttcctctctttgcccggcaatgcctttggcatgtgtctgagcagccaagtggccactcataggagaaggctccctggtcacgttgctcctgctgccgtcttgttccaaggtgcgggggggacactgttggtctgtccaggtcaaggtccctttctcttaccatgacagaggctgggggcagacagcggggacttttttttttttttaagaaaaactacatgtacataggagagtttcattaccattagacttgtatgtaggacttaaaaaaaaatggccttaataaaattacaagcaacccgcctggatgcggttttcaaaagaaggcattgaggaccatgctaggaaacctcataccccatccgtccaacctccggcgggcgccactgcttgtcctctggtcttcggtgtggacagataggagaggagggatgcccacctcggagcatcccaggcccgtggcccattttcagcatcctgaagccagattcacagtgacattgtgttaacgtgacgaccttggtccattatggagttctttttccaataagaacctggtggaccgaggtccgagcttgccagggacagtggggcccacgcgagtacccggggcccagccaggagccagcagccaggcgtccctgtgttccagaaggattcacgcccctcctggacctgggcgggcctcccagggggtctgtatcacggccttttgtgtgtgcgtacgtgtggtttttttaaatatcactactacatattcttgaattgccaagactttctgaaacaagacagcttaagggaatcagccttttgctttgtgatgtgaaaatactgtgatttgacgagccgcttcctgaggggcaggcccacgtggggaggttgcgccgtgtacatagacccgccgtctgtgtccttggtcaggcccggatgcttggtctacactgggttagaggctgctctccccacgcacccatgtgctcatggcttctgcagaccctctgctgggtacatcggtcccctacggcgaagttcagccagggctctccctcctgagagcatggcgtccccaccttcctgtttcgccgacgtcactacccagggtggcaagtcttgcaggcagagggtgtagcccaagttcagcctctctctgtgtcctccagagaagagggttctttgccctcatcagggccctgcttgtgggttttcggctctggggaggagagtgttggcatcagtgtgtttggcctgatttcttcagggggccaagctcccgggaggacccctagccaggagggccccccatgtccatccatccctcctgctggggcttggatgtcaggcttgggggctgtgagctgggacctcgcctgagcccggtcaggtgggacaggagcctgccagaagcccatggggggccaggccgggtggcttctattttatttttttagagatggggtcttgctgtgttgcccaggctggtctcggactcctgggctcaagcagtcctccctcctcggcctcccaaagttctggggctacaggtgtgagccacttctgcccagcatcccaggcctgaacagccttggcaggacccgtccctagagggggctctggtgcctcccttaggtgggccttgagctggtttttaaccaaacatccttccaaactcgggctgcgacctgcttcctgagttttctgtatttccaaggagccctccgaccagggagaggctggtggagtaaggtccagcggtattcgggggtcctctgtcacctcgccctgaaaacagcagctcccatcaccttcactgggtcccgatggagccgtctcagaggccgaggggccctctgtgtgggggtgggacgcaggggctctcagagcaagggccacaaagccgatggcacagatgtgcccctgggcctggcccgtcacccacatgtggtgccctgggccagggcgtgcgggcgccagagccttccctacacagcctaagagcaggggcaagactcggcccctcactcaccctgggaggcctgcctgggctacatggacacctgggtctctttctacccccattcaccatggaccaggggcctccatttcctgggggctcttgcggcatgtgatttgggggtccctgggacattctcccgtcagctccacctgagccaagtgtcctgttccctgcggcccttggccttccagggtcctggccaggcaggggtcaggcaccccatactcttccgtgtggcacaggtgtccacccacccccactggccacagacaccattctccccctgggagcaggaggtggagtaagttgtacccccaggcctgggtgctggggagttcctgagggcatgggtggggcaggagtgagtgcctcgtgatcccagcctcagtttctctcttgtcactttctcaaacctgcaggtctcagggccccgggctcctcctgggcaggatggggggcaggggctgggccttggggtggtgctggctctgatgattccagagcctgtatccaccttctgggctcctggccagcaccccacccccaggagccagggacaggtggcatgtgttggggtcgggggatggcccccatctcgaagtgttctggaatttgggggcaacccttgcccagcccagccatcaagaacttctgatctcctgcccaccaggaggggacttagccatggacttggccagtaggcctggggagggagggctttggcagccaaagtccactggccctgccgtgcccctgagtaggaaactgtcccctaggggctgggtggccccactgatatatgcaaacccgccggtccgagccctgttcctgcctgtgctcctctgtgcccaggctggctctcccccaaccctagcatgtatactctgccacggacgtcccgtgggccatgattgtgggcggccgcagcgggcgggggcaggcggctcagggcacactcggccgtccctgccccatcctctggcagggctgcttttgtctttgtacctttgcatcctttgtaatgaaacgtaataaaaatccaacgttttcgtca

SEQ ID NO: 8072 - DNA, 1709 bp, Homo sapiens
gtggcggcggaagagctaagcaacgtggcttagtccatcagcatcttattctgggtaataaaaaataaaaataaacggatacctgttttccactgctaaaactgaagcaccactgtgtgagcaacaggaagggagagcgcacgagggagaggagccgaggccgagcgccccctgctggcccgcggcggcgaggagcagagggagcggaggaggggccggcccgcgggagccgcggccaccaggaggccccgctccgtcccatcggggctgcggccagggcggagggaggaagaccctcatctcagagtagccctttcctctgttcttttatttctttttctctttgattgaaaggggactacgtcttagcaggaaaaaaaacttcgcatttctgtgcccgagcaggctccttgcaaagacagcagcgtgcggggcagagccccgggagggcgcgtctgtccacgcctaccggacgcgccgaggtcgcgctgcctgtgttctccgagggccttcatttaaagaaaataagggtgttttgggtttttctctttgtttttttcaagattcttttaaaggagtactgaagaatactttcctaagtttgtctgtaaaatcttagcggtggacctgggagatttgagaagcttccagaaacagtttaaacaagccagcgctactggagaagaggagcaacacctgtgccgcggccggaggagttttgttgttggttttagcttccagtggcttctttctgcggggcatcaggctgctggggtagccgcccgccgagcctggaagctgctcgttctccgctggactcagaagccaagctgcttcccgcctagactcggcgcagggccccgcaccggtgaggaaggtgcttttggccccattgcgaggggccttggccaggactggccctgtggccaggaggcgagaaggtggctgttcccggattgacggctttttcccgggggcctttggaagatttggtggaaggacaagagggcctgtccctgtccccgtccccaggaggtaccgacagtccctgtgctggttagacacggagcgctgcacaccgaaagcccaaattgggagctctgcctgccggcaactttgctgatggggtgattgctgcttctggggggtaaggaaacaagttacagaaattaccgcgttctgtgtgaagggactgagggtgtggtgtcattggcagagggtcattttaggagagctgccccagcccctcgaacgcctggcttggggtgtcattctgcctggcggccaggcctccagcttcccctgccccgggcctggggctgtcactggccctgatccgaacacctccagattccggcttctacatgggacagacggggacgcacaggccaccttccttctggcagggactcttatttattcccattgctctagggctttcggtttccccttcttccggtaggccgcgtagaggcatgcaccgggtaggtttccgcggtgaccccgcggcggcctgagggacgctccctgccccatcccggctgttgggctgggccgctttgcctctgcttcgccctgtgctgtgttctccagctttgtagcagcagccttgacaaacccaggcgcactgtaccaaggcaatgtaacttttgattttcggtcaatttaagttcttttgtcaccaaatattaataaacagttttgacttc

SEQ ID NO: 8073 - DNA, 311 bp, Homo sapiens
gccccacacggccatctgcccagtccttgactcgtccatggagctgagggtcggaggaaccttccttgggggcagcagcccttcccgggggcctacccagtgccccacagcagaacccgtgggcgctcgtgttgtgcgggccctgctcctctgccccgaaaccactggctggtcccttccctgagccctggccaagattcaggctgcaggggaagaaagaacatgaccgggaggttgtgaccccaacccaaggtcaccccccaggggtgccgcatacaggaggtgcttaataaacgggtcttttgacttcc

SEQ ID NO: 8074 - DNA, 541 bp, Homo sapiens
ccccaggcccagtctgggccgtgactctgggtgagtcgtgtgactcaggaatgggggtagatccatgtcctccactgtcccccattagttctgtccccttcacaatgagaagtgttttctggcaggccctaggtaaagggtcgggggaggggggagccttgtagggaggcctctacacagaagaaagcagcccccatgtcccagccacttctgggtcccagccagcagcacggatgttactgtcctgctccttcccccagccccacgccctaccagagggggcaaagggcacgtcccatcactcactgccctgtctgaaatgtggcagccactgtgggccaggctcagggcagggcaggcgattccagtggggttgggccccctggcgcctgctgcttactgcagtttcatgcaggcctctgctccttgtctttcttacctgtaaaatgggtctcagatgctccgccctgcttggccccagcttgtctgtctctgggtcctgggccagccaggatacctgataataaaagatcattgggtg

SEQ ID NO: 8075 - DNA, 2012 bp, Homo sapiens
gggaccctgagctgctctcaggacggtggaccggtgacccctttgtattctgggcccatggaacggtgggggggtgcgcttgattctacttcaggaggcacatggggcgctttatggaacgagcaggtgggcctgaggggcctgggctcagagtccacgtccaaacgcaaagctggcagccctggaagtgcagtgttggggcgatggtgtggggggtcccgcagctcccctcttccttcctctgcagacgctggcgctgtctgccggaggtgttgcccaaaaggccctagtggggcgtggtcagctccacctcctgatcctgtgtgtcctccgacatgctgctgattctagtgacccctgtccccaccaggctcagagccagaccgcgcctggaccttcttgttctgactccacgtgcctgcccggcctccagggtgcgggggcgcctttcttgcaggcggaccctgcccaggatggggccagcctcgtgctcagctttggccacaaatgcagcccctggcccaccccaccctgccggccctgccttctccagtatttcccacatggccacgactcctcagtcactagagcctcctgctgggaacagtgtcccccagagcctcatgtctatcctagaccctgcaagcagctgggtccccaagagtgcatctccccctagagttgcctgcccatgcccacctgctttgtaaccttcccaggagattcatgcttgctctgcacagcagggctcgaggcccaggccatgacacggaactgcctcaggtttgggtcagacctgcatcctggggcatctgctgaaatgtgagcacacaaaccacctcctttggcccagaagccccccaggcctagcatctcagtgccccaaccctctgcccagctgtggtatccagcaggtccttgggtccccacttgagcaggcacttggctgggatatggagcaatttaaagcccacaggggttgttcagtttctatgaaatggagcatggggtgcctgctagcctcaatcccccgaagtgggagcctcatgatagagtatagcttgggggtgggaggtgaggaaaatctgaggtacccaggggaacccccagctaactggtctctcagaggagtcccccagggcccgccagctatcacagggactcagaaacacccatttcctaatgacatggtgagtttcttgatttcttttttttgtttgttttgttttggttttcaacttggctgaccccgggtctatgatctattcacatcgaacccctgactggtctgcctggtgccagggtgagcgtgaccgtgagtgttgctttcgacagctggctcagcacacgctgtgtgaagggatctgagcttgttcatctccagtcgtgacttcatttcccttccttctgtcctcctcctgttcttgccttggacctgcaggtgtgcagaccgctctctctgccttccttgcatgtggccaccagccatccctgatcttgtccccagaggcccaggcagcctgtgatggctgtgaggggctgtcccactgtgtgggtatcccttacccagcacttaaacttggcaggagaggcagggcaaccctcacagggagatgggagggcacccaactcccacaagcatgcaacagcagtaggaattgggggtctgccccaggtgggtgagaccaaatgagtggatttggggccacaggctaggcaggagagacaaggggtaggtgggagggtcccccagtccctgctgaccccagtgtgtctccccggagatggctcctagctgagtgggacccggcaggagttggggacagtgctgtcccccacccctgcacacagccaggccctcaggctctgcggtcactcgcctccctgctggtcactggtcttggtctggagttatattttgatgccatgaagacactgtttatatctaatgtttatatattttaaagatttgtgccaagagagtatatttaataaaaacttaaatgacttct

SEQ ID NO: 8076 - DNA, 149 bp, Homo sapiens
aggccgcctgccggggactcagacactcagggaacaaaatggtcagccagagctggggaaacccagaactgacttcaaaggcagcttctggacaggtggtgggaggggacccttcccaagaggaaccaataaaccttctgtgcagaatg

SEQ ID NO: 8077 - DNA, 2340 bp, Homo sapiens
agaaccagaaaaaagaaagcacaacacctttcccatgcctcctctggagccttcgcctggggagacagaacccagagagaaacaagagagtccagaagtccctgaaccccaaaccacatcccccacacacataatcctttgtacaaagctcctcttttccctttttttacatacacaagatcctcttggcaggtggagccaggtgtctgaaaagttcattctcgtctggctgaactctgggagtgtgtcccagctgagggaagcacaagtagcaaagctcattggtctggtctcttgtttgccaggctgattgaagcaggccttgatgagggtgcatgagtgtatgtttgcattcacatgaaggaattgcttttcacaccagaaattcagacttagtcaatgttggctgaattcctaaatccaggaagaagcctggacgtagggtcattagctttgggaatagaaggctacacagaagcacactgtttttgaacttgacaacagctctccctttaccctggacttcagcccaagttccgtctttggtcttggtggataaacacacagtgtggagatcccacgtactgcattttagggatgtttttaggacaacctccctccatgccttcagagttaggagtgagaatgatcaaagcaatatgtaggtgatggagggagagtgtattgctaacccttccaggtctagtccagcgctgagatttggtggttctgcatgtgtgatgaatctctttcacacaaatagacgagaggatatttagggctagatgagcccagatttcttccccctccatctctcagggagacaaagaacctccttcctggaccaaggaggtgctgccaagttttctagcccagtgcacatacccagtccttaagcagacattggtagtgcccctgccctgggtcccactcctgccccaccccacccttgtccctggccattgcctggtggtctagaaacacttaaaacttgaagtagtgacacctacctgcggtcatattgtagagagatgctcagtgttaaaactgaaacacacaaacacacacacacacacatttttctcttgtagattttaattttttaagtgggaaagaactcaccttgccttcctcccccaaatgtgcaacctgtaaaaggtctctccacaccaggggccaggatccagttccctcatctctggcaggaaagatccacagcttttcctccatgtctgttactcactttcagcagtccgggtaaaatctgtggatcagggttaaaaaagcaccgtggagaatggccctcttcaggaaagaaaaataagcaaatgaatggtccacctaggggttcagtaaagaaagaaatgtgttaactgagcctgaatcccttctgggaagtaataatgaccattgacaactaagaagtagacaccatgctaaagacttacatacaatctccttgaatcttctcaatagcccattgacttagaaactgttactttcccattttacacacagtgaaactgaggctcagatataaaggaaaggtactggcttgaagtcacaaccacgacaggagtaaggatttggaataaggatttggtcctgttttctggaccaaatccttactctggctctgcttacactttctctccatcaccaaatccttactccaaatccagaagtcagagccaactcccatcttggttctgacccaaatcctgctctggactctggagaggagattgaaatataattgcaccctcatacacatttaggaaatggttaagaagtgtaaactgaacccttatccttgtcttcaatcttcctccctgtagacatctatcttattatggttattattcagaaaacccagggatacaggtttgtcttcttactttgataactcttcttagtttaaaataataataataacacatctttggtcatctatgtcacacaaaaattttcctttgtttgcggggggctggggatgcagtgttttttggggggtcttggtttatgctccctgcccttgagcccctcagccgtttgccctgcccccacctcggctccatggtgggagggggctctggtcttttctaaagtgggcggtttgtcttttgatctttcccttttggatgtgcgtgtgtgtctgcgtgtgccatgtgcgtggcacgcatatgagtgtgtgtgcgtgtgaacggctttgggtcctgctggttttgctgtgagctgcagtgttctgtgggtctgtggtatctgacactgtggacattaatgtacttcttggacattttaataaattttttaacagttcaacctgcccgtcaccacctg

SEQ ID NO: 8078 - DNA, 2972 bp, Homo sapiens
ggccttgatggggccatccagctccgcagggcctgcgcgtctccggcttccacccagacggcactcaagcctgcccccgaggcgtgcttccttcctgattgtctctagagcttccaagtcctgggaatgtgcggggccagtccctgccctcccaggaggggtggtagccgttcccacctcgcagcaggacccccagtgcagaggctcacaggtggcacacaggcgctgtctctccagagccatccttcagagtggacctcagtgccagtcctgcctcagcatctgggtcacgtcggccaggagtagggtgcaggcctccagcaggtcctaatcctgtgtgccagggcaggcagtgccccaggggcaccacgcctgactctccatcacccaggccttgatgccgagcgggagtagagtgtttcctctgctcaaggcaatttccagagcccggatgccagtttctggcctgaatttggagggaagaagtaatggcgctagtgtgggacgaagcacagatcccagcacttttcccagctttctctccagcatcagtccctgcagcagctggggcctctggtcaggaaccctcagggacccaggaactcagcttccaaacatctgcaccttgaccggactcgccatcccgccgtgggggtgcaggtgattgtaaacacgggtgtgcatgtggatgcacacgggtgtgcggtgaagatctgtggagatggagctgggagctgaggctcctgttgcaccagccaccttcccccatcttgtggctgctgaggggcaggaagcgggggagtgggctcgtctcctaaatttaagatcacctcctcagctagcttagagtgcgtggcacgggccccccgcccccgagatctggagcccagggactttcttcctggcagatctgtggccttccctgctcagcctcttggtccccccactccctccaccgcctcaccttccctgctgggtctctggggcacagtgtgaaacccgcaccctagccaggccccagggagcctccgctgggcccagacagcagcgtttggttttatccacttttcttggataatcaggaggtgccccagtggtcacagtgtggcattccgagttggggcgggtggtcgggtcaagatagcagcagcaggtgtcagggctcaagacaccaccccctccagcttctggggcccaggagcctctccctgctacagggggtgggggtcctgctcagcagggtaggtggtggttttaggtcttgtcaccctcactcagtggaactgcctctgggagctttggcgtctgtgactaaagggacgctggattgctcaggtcagctgcttggggctcccaggctgggtgtgccttagccacaggcagggctgtcaataacccccttcctcactggccaccacctgacatcagcaccagtgacaggctggtcagagggcggggctggtgagggtttgtcctaagaggaccaccgccatctctgggtctccagggggagagcctggccctgtcctttgctacccagggctgcccccaggcccatgaagccaataggagagcgtgtggcactggcccacaaactgtccctgtcctgtcttcctcccgagccatggcctctgctagctccaccttgaaggagccccccacatcctcccctacatcccagagatgccaccacttgtgtctccacaatgtgctcctgcccacccgggttccgcactgtccgacccctgcacaccactcatgtcaccacggcgtgcatcatgttcatccccatctatttatttaagcctttctttgcttgtagggcattttgtatgtagagcagttgaaaacagaacctcagaacttaacatctgtcctgatgttaaagtgcttttcatgaccaccctgttatctatgtatatgtaaagttaaggatgagatcttaagtttacaattaaaaactcagtactcaatatttaatattctactcgagctttatggaagccaaatcatgtgcatgtgtgtgtgtgcgtgtgtgcaagctttgaacctccttccacagccgcatcttctcatgacacaaagcttttgataagtactttcctgtgggtcgctcagcgcctcatagcatctcattcaattgcaagaatagaggccagacacggtggcgcatgcctgtagtcccagctaactgggaggctgaggcaggaggatcacttgagcccaggagattgaggctgcagtgagcatgatcgcgacactgcactccagcctgggtgacggtgagactttgtctcaaaaaaaaaaaaaaaaacaatggaaggcagacagcaagtccctgaggacacatcacacagtgtcctgtagctaagtgtctaggaaaaaacaaaaactccaaacccttcagtggatgaggacaaggtcgcagaaaggcattctgttgacagatgaacagccgaaagctggccagaccctcctgtatgcctctgcccttgtcctgtgggttgagggggtctgaccaggaggccacctacagcaggaagtgaggctgccatgtttccttgagacacagctgcctctccccagctctgtccctgtagtcacctgccggtgggcgaggatcctctccctgggataagcactcccagccccgtttatcagaaacacaggcaaggaaattggaactgccacccagcccagcatggtggctcaattggttggttgcgttgtcagttgtctcttcgttttgttaaggtttttaataagtacgtttggcataatgtcttttaatgggtttgtaatatttgtaacggttttagcagcctataacttttcagctggtgcttttacttagggaaaaaaacaatttgtaaatacagaacattgtttaaaagacataaccatagaacatagcttcctgtttgtggattttgtttcctatatattcaaagtaaaatgacttacaggagcca

SEQ ID NO: 8079 - DNA, 1506 bp, Homo sapiens
tgcgagccaggccccgtggaagacgggctccctcctcccccacctggcccctggtctagaaggacccactgcaccaccctccgctggctcgggaagacaccgtgcccgccccaagagcaagcaccggccatgctgcagaggcaagacctcaattcttggctgcaaagtttcatcagggctagggggctggtgccgcctcataggcagacgaggatcatcgctgggggacctttcccgtgggctttcttcctttctctctttgcctttagtttgcccgacaccagcagaaaagtggaccttgggggctggttctgctcctggcccccttgttcagcccctgccggcacacgggcggctcaccctggacactgtgatgcgcatgggcaaggccagcgcccggggcttctgaaccgagcggggtgtttcatttttttgcttttccctgtcttaggctcccagtctttgactgccttcccatggcgatctataagttgaaagattttttttttttttaatcacctcatgatgatggagttaaaagtaaaccgtgcagaccctggggtccctgttgtacgctgcatcatcccgctggccctgtgccctggagggtgggcggctcatggtgccacagcccctggcagggacggccggcccgcccccgtgactgactgacagatgcagggatggccgaggcagccctcgctccagctgaacgcctccattgctgcttgttctggagacccccgcccccgcaccttccagacttagcagaagaacaaactgaagaacagacccagccagagaagcagggattccagaagctgcccattaagggagaaggagaggatccggtcggcagcagccctgagcagaaagctggaggggggactgtcgcggggtttttctgttgtggtttattttattaaattttttccttttttctattcatttcgatggacgcaatcttaagccaccctggccttgctcctgggaggtgagcgtgcacaggtgtgtgcaggtcaggaggtgccgtccaggtgtgcggcgagccgctgcgcacagatgtcaggatttccgtttgggtctagtttagaacctgtccttaaacctaggggttgctgtcaggatttgctttcagactttttttttttttgtaattccctttagagtctacaaaaatgtttttaaaaggatcaggtctgcttttagtttcatttttgtttctttcccgtcccactctttaaaaactggttccgtgaggaaaggcagaagccgttccgtgtctcttgcaggctgggccggcttcatgccagtgcgagggcgtcccgtgcccacgtacatacgtatgtctccatgagttctgggctccactggttccaattgagctccagccctggttttcctacccatgcagttagggactttaatttaattttttttttgtagggccaccgccttcaaacacaactgctacaacattctaataaaggctcatttaacccccag

SEQ ID NO: 8080 - DNA, 72 bp, Homo sapiens
gccctgtgccctccggccacctggatccctgcccctccccactgggacggaataaatgctctgcagacctgg

SEQ ID NO: 8081 - DNA, 60 bp, Homo sapiens
ccgccacccgcggccacaccgcagggaccctcgccaataaacagccctcccaccaccgcc

SEQ ID NO: 8082 - DNA, 643 bp, Homo sapiens
cctgggcaggggcctcgctttcccacctccctccagactcctttgaccccaggaagttttgcccctccttcttctccagacagccccctccccaggtgtctgggtcccctttcccgcccctttccagaactcagagtcagacaagaacccagagcatccgatggtagaaacaccaggaagacaattgttgctgtgtggtatggaatggagtttgcggtgactctggggccagcacccaggggacgacgttcaaccctagcctgaagggacccgctcccagctcagaagccgtctctgacttctcgtgcgtattttgaccctgatttcaatcttctacccttgggagttctggcgtttggcacaaagtcccctctgcctgtttggagctcagtgctagaccaggtcccctgccccgagctttgtttttggggttatttattgaaacaaagtgtggggagctggttgtgggtgtgagtgggggtgtggggtccaggctgggcccagtgaaaaggaggaaggggttcccatgcgggggaggctctggggctgaggggaacaattctcacgtgtttggtgcttagagacctgcccggggcgttgggcaggccctccgggggctgaattaaaaatgctttatttccaa

SEQ ID NO: 8083 - DNA, 29 bp, Homo sapiens
gaccagcctgggcaacataagaaggcccc

SEQ ID NO: 8084 - DNA, 736 bp, Homo sapiens
ttcatactggagagaaaccctatgaatgtgatgaatgtgggaaagcctttaaccagccctcgactcttagtaaatttgagagtttatatggaacacaaaccctacaaatataaagaatgtgacaaagctttttaaggaagttctcaacccttattacacataattcataccaaacagaagccctacaagtgtgaagaatgtggcaaaacctataaacctataacaagttctcaattcctttttttttgagatggagtttcactcttgtcaccgaggctggagtgcaatgacatgatctccgttcactgcaatctctgcctcctgggtttaagccattcttctgcctcagcctcccaagtagctgggattacaggtgcccaacaccacgcctggctaatttttggatttttagtagagatggggtttcacaatgttggccaggctggtctcgaactcctgacctcaggtgatccacctgccttggccttccaaagtgctggggttacaggcgtgagccaccatgcctggctacaagttcttaattcttaagagacaccatgcctggctacaagttcttaattcttaagagacatggcgataattcatgctgaagaggaaatctggaaacctgaaagatgcgacattgcttttaccaacacctccacatttcctatacataaaaataaattatactagtgtaataccctagaaatgtataaaatgtgacaaagccttt

SEQ ID NO: 8085 - DNA, 138 bp, Homo sapiens
aagtgtgaagaatgtggcaaagccttcaagtggtcctcacaccttactatacactgagagttctgaacttactctgtaaccatcccaaactcctcccaggcacagtctggcagaggtcctgccatttcggagacctgg

SEQ ID NO: 8086 - DNA, 395 bp, Homo sapiens
aaattatggcaaagctttaatcaatttacaagtcttactaaacataagaaaatttatactggagagaaactactaacctgaaagatgtgacaataattttgacaacacctcagacttataaaagtaatcatactggtgagaaattctaaaaatgtgaagactatggcaaagtctttaaatggttgtcacactttaggtaagataattcatattggaacaaactacaagtgcaaacaatgtggcaaaacttaatttatgctcacaccttactgcacagaaaagaatttttagttgagaaaaagtatacaaatataaagaatgtggaaaagccgttaatatctgctcacatcttactcagcatcagaaagtacttaataaaagcattataaatggaa

SEQ ID NO: 8087 - DNA, 825 bp, Homo sapiens
agattgtggcaaagcctctaacccgtcctgaattcttactaaacataagaacattcatactgaagaggaaccctatgagtgtgaagaatatggcaaagccttcaacaagtcctcaattcttaccagacataagataattctggctgggtgcggtggctcacacctgtaatcccagcactttgggaggctgagacgggtgaattacatgaggttgggagttcgagaccagcctgaccaacatggtgaaatcctgtctctactaaaaatacaaaattagccatgcgtagtggtgcatgcctgtaatcccagctactcgggaggctgaggcaggagaattgcttgaacccgggaggcagaggttgaagtgagctgagatcgcgccattgcactccagcctgggcaacaagagtggcactccatctcagaaaaaaaaaaaaaagataattcatactgaaaagaaactctacaaacttgaaagatgtgacagtgcttttgacaacacctaaaacttttaaacataaaaaatcatactggtgagaaatcctagaaatgtaaagaatgtgacaaggcctttaaatggttgtcacacttcattataggtaagatagttcatactgaagaaaacttctacaagtgtgaacagtgtggcaaaacttttaatgaatgctcacaccttattgcacaggagagcatttatacttgaaaaaaattgtacaaatataaagaccatgaaaaagccattaatatctattcacatcttaccactggagagttcatacttaataaaaggaatataagtgcaattactgtcaaaagatctttcag

SEQ ID NO: 8088 - DNA, 6748 bp, Homo sapiens
tcccagctacttgggaggcagaggcaggagaatcatttgaacctgggaggcagaggttgcagtgagccaagatcgcgccattctactccagcctgggccacaaggcaagactctgtctcaaaaaaaaaaaaaaaaagaaaagaaaattcatactggaacgaaaccctacaattgtgaagaatgtgccagtgctttcaaccagtcctcgaacctttttaagaaaataatttatactggagagaaattctacaaatgtgaagaatatggcaaagcctttaaccagtcttcaactcttactaggcattaaaaattcatactgtacagaaaccctacgagggtgaaaaacatggcaaagcctttaacaagccctcaattcttaacagacataacataattcatactggaaagaaactctgcaaaccagaaagatctggcaatgcttttgacaacacctcaaacttttctaaccataaaagaaattatactggtgagaaatcttagaaatctgaagaatgagacaaagcctttaaatggttgtcacacttgattgtaggtaagataattcatactggagaaaacacctacatgtgtgaacaatgtggcaaaacttaaccagtgctcacaccttattgcacaggaaagcatttgtacttgagataaattatacaaatataaagactgaaaaagccattaatatatgttcatatctcaacaccagatagttcatacttaataaaagcattataagtacaattactgtcaaaagacctttcagaaaatacaagcttttgaccaggcgtggtggctcaggcctataatcccagcactttggtaggccaaggcaggtggatcatgaggtcaggagtttgagaccagcctatccaagatggtgaaaccccatctctactaaaaatacaacaattagccggttgcggtggtggtgcctgtaatcccagctactcaagaggctgaggcaggagaatcacttgaacttggggagggagaggttgcagtgagctgagattgcactctagcctgggccacagagcaagactccatctaaaaagtaaaaaaaaaagaaaatatgaactttacagtgaagaatatttattttgaagatgaatgttacaaatataaagtgggtagtagtgcctttacttgtatcacagatcttattgtagacattttttgtagaggaaaaactctgaagcactttcacactttgttcaatatcagggaatttatattgaagaaaaatcatgcaaatgtagtaaatttggaaaaacactttttcaaaaactacagcttagaaaacagagttcatactagaatatatttttgcagatgcagtaaaagttaaaaaaaatttaatccataagtaagtctgtgtaaatatcagaatttatggtagaaatacataaggcactgacaacatcagatatactaaatcagagggctgagtatagaaaattaaagttggtagaaaaattatttgtatataactttaagaggatcagaaggttttttgcagttataattacattcaaagtatactttatttcttgaaaaatattacagattttttgaaaagtgaataatgatgtcattcaactctgaaattcctgccgtttcttcattcctattggattcacatgtgaaagcatgggatcaattattgctgtatcaaagatatgaaagattctttctttgttttgttctgtttttttgagatggagttttgctctttcgtccaggctggagcacagtggcatgatctcggctcactgcaaccttcaatttccagtttcaagcgattctcctccctcagcctcctgagtagctgggattacaggcgcatatcaccacgcccagctaatttttatgtttctagtacagacaggatttcatcatgttggccaggctggtctcaaactcctcaccttgtgatccacccaccttggcctccaaaggtgctgggattacacaggcatgagccactgctcctggcaagagattcttttttattaggtgggcattatttgtgatcttttctattgaaaagtaaaaacattagaatgtaagatgcataatgaaaatgtaagtggagaggttctttggggttaacttataatattgagtggtgcatgaggttggtgttcagagtaatattctgcattatgaaaaaacatttaattttatttaaaatttagtttatcatactaattgtacttttatataagatgcagtacatttttaaaattttagattgtgtgaagttaatagtttaacatttttaacatgttaaatactattgtgcattcaatgaagcattattataccacaaactttaccctgttccaccttactgaagggtataggtaaaagatggtaacgatatactatttagtaacataatggattaacatctctagtaattttttttgccagtggctttaaaccgcaaataagttaaagaatattgtttctgtaggttaaatttttattttgtttttaatcatttaaatttaattttggtgggtacataatatgagtatatatttatgcacttatatggcatattttagtacaggaatacaatatataatagtagcatcagggttaagtgaggcatccttcacccatagcatttctcctttgttttacaaacaatccaaacctacactttttaaaaattttttgttgttgttgttcttgttgttgttgagacggagtctcgctctgtcgcccaggctggagtgtgcaatctcggctcactgcaagctccacttcccgggttcacgccattttcctgcctcagcctcccaagcagctaggactacaggcgcccaccaccatgcccggctaattttttgtatttttagtagagatggggtttcaccatgttagccaggatggtctcaatctcctgacctcgtgatctggtctcgatctcctgacctcatgatctgcctgccttgacctcccaaagtgctgggattacaggcatgagccaccgtgcccggccactttttataaattttaaaatgtacaattgttatttactatagagttatttttatggtcataatacaaattatatatgagtataaataaaattcatttctaaactattaatattttttccaaattgttatatatttttctttgaacatgtggcctgtctgcctgcaaacatgcagactttttgattcacatagagttaaatatgtattagtctaaagacaaactttaggtgtaagaaaattatggaataagtgtgtgtgtgtgagtatgagtttgtacctattttcagaaaagaacaatatgggaataaaaatcattttaataaggtggctactataaaactaaaaaccttaaaaaatgctgaaagcaaatgtatactttgtgctttgtattgaatttattactgtacaatccatgacttacagttctgaaccttttcatgcaaattctctgtatatacttgcctggtactcatgctagacccatactttttttgtttcttacattttttttgttttatggtttaggaagtattcattatatgagctggtctgtgattataagaatttttatgaaatttagtgcacacaaaataatttttagatgtaattccaaaagtagtgtattaagttacattttatttagtgagagcactccattttgttcttttaaggggagaacaatatataagttttcttttctttagtgattgttcctttcactttttataattgacataagtatatttatttattgagtcaatttgttcaggtaagtactggggggcttcataagtcatgaggatgtttttatatataaatgtagcaaacatacattacagttcttactgtgtaatcgatgctccataataattcacaaatattcctgctggagttagtttgtaatttcaagtcagaaatgaaagatatcagtggtgaagaaataagattgattcttcatatggagtggacattttttccagactataaaactgaatcttgctgaatttaaagagaaattctggccgaggcagatggatcacctgaggttaggagtttcagaccagcctggtgaaacccggtctctactaataaactacaaaaattagctgattgtggtggcatccacctgtagcccagctactcaggaggctgaggcagaagaattgcttgaacccaggaggcgaagattgtggtgagccgagattgtgccattgcactacagcctgggtgacagaatgagactcataaaaaaaaaaataaattctgcttcttttattttctacttctcttcagatttgtttctcgtatgtattttccaactatgtatgcatcacagcccttctttttctgagttatagctacagttttctgactgttctcttcacgccatttcatttcgcctggtattttgtagattttgatgacaaaattctatttttagtgcacttaaaaatggattttaactggtgagttcgcttatcaatataacattcagattagttaattaagataaaagccaggtgtggtggctcacgcctctaatcccagcactttgagaggccgaggcaagtggatcacttgagctcaggagttcgagaccagcctgaccaacatggtgaaaccccgtgtctactacaaatacaaaattagccacatgttgtggcgcatgcctgtaatcccagctactcgggaggctgatgcaggagaatcgcttgaacccaggaggcagaggttgcagtgagccgaaattgcgccattgcactccagcctggacaagagcaaaactctgtctcaaaaaaaaaaaaaaaaaaagattaaaggcgcacactgtccacaggcaagaggattaaattagcattgcatttctttgtttttaaaagaaaaatcttattagattcttatacaaagtgtggcaaatataaaacttgcttgaaaatatggaaattaaatttttaagagagttaatagtaaacgaatttaattttctttttttatttttactttttattttttagagacagagtcttgctctgtctcccaggctagagtacagtggtgtgatcttggctcactgcaagctccgccttccgggttcacgccattctcccgcctcagcctcccgagtagctgggactacaggcgcccgctaccgcacccgtctaatttttttgtatttttagtagagacgggatttcaccatgttagccaggatggtctcaatctcctgacctcgtgatccgcccgcctcgacctcccaaagtggtgggattacaggcatgagccacagtgcccggccacgaatttaattttctatgatataattacagcacaatttacatttccgtgcagaatcttttaagtgtggtggtaaagattgcaaaataataaaatgacctctgaatttaaaatttagaaaaatatgtcttttctatattgattttacaatttggagaaatttctcttattttttatattttttcttttagtgggagaagtttagtctacggtttttatttttagtcaccaagctgtagccaactcctgggtcattttctctgaaaaacatttggagatcatgacaagttttggattaaaacattctgttattttgcatgcaaactagtttactgtgttcacagactggccagtcatgggaccataagcaacacctgcccctttagtggctttcataccattaccaccagtaccagaaactccaggtggcccaagcttaaagtaaaaatcctaaagtacattggcttctcccatgcaatgtgctgggtccaaaccatgctgttaaatatcagagttcctatggttatgactgacaaatgacaataatagccccaaaatacatatttttgatactatttagccaagattaccacaaagatacagtatttgacacattcttattctataacattttgaaaatattttctcttgacagataaaaatgtgtactttttctgtagaacataatattttgaacatgctgttaaatatcagagttcctatgattatgactaaaaaattaaatgacaatagtccccaaactatgtattttcatactatttagccaaagtaatcacaaagacacagtatttgacacattgttattcttttatgtcttaaaaatattttctttcaacttgagaaaatgtgtgctttttctgtagaacatattttgaagtatatatacattgttattatttctaggtaattaatacctcacatagttaacatttttgtggtgagaccacgtcttatcatttttcaaaaatccaaatacattattatgaactatagtcaccatgttgtacaataaatctcttgaacttatttctcctatttgactataattacttattatttgacagactttccaaacccccatttcttctaaataccttggcatctgatggtcaccattttactctatacatcaatgggattaagatttttggaatccatgtataggtgaaatcatgaaatattaatctttctgtgcctggcctatcccaactaatataatgtcctccagcttaatctatgtaatttaaaataatataatttttttcttttttttttttttttttaaggccaggtgtggtgtcttacacctgtaatcccagcactgtgggaagccagggcaggtggattgcttgagcccaggagtttgagaccagcctggtcaacatggaaaatccccgtctctacaa

SEQ ID NO: 8089 - DNA, 1968 bp, Homo sapiens
gcagtcctcaactcttactaagcattaaatattggccgggtgcggtggcttatgcaaaatggctcccagcattttgggaggctgaggtgggtggatcacaaggtcaagagatcgagaccatcctggccaacatggtgaaaccctgtctctactaaaaatacaaaaattatctgggtgtggtggcacgtgcctgtattcccatctactcgggaggcttaggcaggataatcacttgaacctgggaggtggaagttgcagtgagccaagattgtaccactgcactccagtttggcaacagagtgagactccgtctcaaaaaaaatttatactgtacaaaaaccccacaagtgtgaaaaacatggcaaagcctttaagaagccctcaattcttaacagacataagataatttatactggagagaaactctacaaatcagaaagatgtgactacttttgacaacgcctcaaacttttctaaccataaaagtaattatactggtgagaaatcctagaaatctgaagagtgagataaagcctttaaatggttgtcacacttcattgtaggtaagataattcatactggagaaaacgcctacatgtgtgaacaatatggcaaaacttaatgctcacactttattgctaggaaagcatttatacttgagataaattatacaaatataaagactgtgaaaaagccatcattatctgctcacattttactcaacacagagagttcctgcttaataaaagcattataagtgcaattactgtcaaaagatctttcagaaaatataagcttttttagtgaagagtatttattttgaagttgaacatcacaaatataaaaagggttgtagtgcctttacttgtatcacagatctttttgtagacattttcttctagaggaaaactctgaagcagttgatcaaactttgttcaacatcagggaatttatattgaaaaattgtgcaaatataataaatttggaaaaacaatttttcaaaaactacagcttagaaatcaacagttatactagaatatattttttccagatgcagtaaaagtaaaatatttaatccataattaagtctatgcaaatatcagagaatttatggtagaaatatataaggtactgacacttcagatatactaaatcagagtgctaagtatagaaaatctgaaactaaagttggtagaaaagttatttgtatagaactttaagaggatcagaaggttttttgcagagttataattacattcaaagtatactttatttcttgaaaaatattacagattttttgaaaattgaataatgtcatcattcaactctgaaattatttcctgttgtttcttcattcctattggattcacatgtgaaagcatggggttaattgttgctacatcaaagagagagattcttttgtttgtttgttcgtttgttttttgagactgagtttcactctttcgcccaggctggagtgcattggcatgatctcagctcactacaacctctgccttctggtttcaagcaactcttctgcctcagcatcccaagtagctgggataacaggtgccagccaccatgcccagctaatttgtgtatttctagtagagatggggtttcaccatattggccaagctggtcttgaactcctgacctcatgtgatccgcccgcctcagcctcccaaagtgctgggattacaggcttgagccaccacgcccagcctgtagcatattttaataggagaatacaatatataatagtagcagggttaagtaaggcatccatcatctgtagcatttctcctttgttttacaaacaatccaattctacactttaaaaaaaaatttttaaatgtacaattaaatttttatttaccacagtgttatttttatcgtcataataaaaattatatacgagtataaatgaaattcatttctaaattcttaataaatattttctcatgc

SEQ ID NO: 8090 - DNA, 2508 bp, Homo sapiens
agaatgtggcaaaggcctttactgctcctattcccttactaaagaatgtggcaaagcttttcaccagtactttacccttaatacacataagataattaatgctggagagaaaccctacaaatgtgaagaatgtggcaaagatttctattgattctcataccttactaaatataagataattcatattggagagaaattctacagatgtgaagaatgtggcaaaggctttaattagttctcatcccttactaaacataagagaattcataccatagagaaatcctacaaatatgaagaatgtgacaaagcttttaaccacttctcaaccctgcctacacgtaagataattcatactggaaggaaaccctacaaatatgaggaatgtctcaaagctttttactgattcttataccttactaaacataaaataattcataaaggagataaattatacaaatgtgaagaatgtggcaaagcttttaacaaatcctcatccattagtaaacataagataattcatactggagagaaaacctacaaatgtgaggaatgtggcaaagcctttagcctgtccctccaatttactgcacataagataatttatactggagagaagccctacaaatgtgaaaaatgtggcaaaccttttaaccaatcctcaacccttactacacattagataattcatgctggagagaaaccctacaaatgtgaaaaatgtggcaaagcttttaaccaattttcaaaccttactaaacataagataactcatactggagaaaaatcttacaaatgtgaagaatgtggcaaagcctttatccagtcctcaactcctagtaaacataattaatgatggagagaaaccatacaactgtgaagaatgtggcaaagcttttaaccagtcctcaaactttattgaacaaaataattcatacaggagagaaaccctacaaatgtgaagaatgtgacaaagcctttaaccagtcctcaatttttactaaacataagaaaattcatactggagagaaaccctatgattgtgaaaaatatggcaaaggctttaactagtcctcagttcttaacacacatacgataattcttactgcagagaaactctacaaaccagtaagatgtgacagtgcttctgacaacatctcaaacttttctaatcataaaagaaatcatattggtgagaaatcctagaaatgtggagaatgtaacaaagtatttaaatggttgtcacacttgattataggtaatattcatattggaaaaatttcctacaagtaagaacaatgtggcaaagtttttaactaatacaccttattgcacagaaaatcatttatatttgagaaaaattgtagaaatatagactgtgaaaaagacgtcaatatctgctcacatcttactaaacaccagagagttcatgcttaataaaagcatgataagtgcaattactgccaaaagatctttcagaaaatattatcctttaaagtgaaggagagtatttatattaaagatgaacattacaaccataaagagggttgaagtacctttacttgtatcagatcttattgtccacattttgtactacagaaaaactctgaagaggtcactcaaactttgttcaacatcagggaatttatattggagagctgtcttgcaaatgtaataaatttgggaaaacaaattttcaaaaactacagcttagaaaacaccagagtttatacgaaaatatattttcaaaggtgtagtaaaaataaaaaaaattttaatccaaatttgtctatgtaaataccagaatttatagtagaaatatatgaggaagcgacacttcgaatattctactaaatgagagttctgagtatagaaaataaaactaaagttggtagaaaaattatttgtatataatgttaagaggagtaaaagattttttgtagaataataactatattcggattatactttgtttcttgaaaaaattacagattttttgaaaagcaaatgatgtaactcaactcattattttctgctgtttcttcattcttattcacttgtgaaagcttgtgatcatttgttgctgcatcagaggtatgagagattcttcttcattagatgggcattatttatgatcttttctatggatgagtaagaatattaaaatgtaagatgcatggtgaaaatctaagtggagaggttctttgtggttaacttatactattgagtgatgcacaaggtaggtgttaagagtaatattcttttgcattatgagaaaactagtatattattcatatattttactaattgtactttttttattatactttaagttttagggtacatgtgcacaatgtgcaggttagttacatatgtatacatgtgccatgctggtgcgctgcacccactaactcgtcatctagcattaggtatatctcccaatgctatccgtcccccctccccccaattgtacttttatataataaaatgcagtacattttaaaaaatttt

SEQ ID NO: 8091 - DNA, 199 bp, Homo sapiens
catggtgaaaccccgtctctactaaaaatacaaaaaaaaaaaaaaaaaaaattagccaggcgtggtggtgggcacttgtagtcccacctactcgggaggctgaggcaggagaatggcctgaacccggaggtggagcttgcattgagccaagatcacaccactgcactccagcctgggtgacagagccagactccatctc

SEQ ID NO: 8092 - DNA, 1659 bp, Homo sapiens
tggagaaaaaccctacaaatgtgaagaatgtgtcaaagcttttaactgttcctcaatccttactaaacataagggaattcataatagagaaaccctacaaatgtgaagaacgtggcctggcttttaacaaatcctcaacatttactaagcataaaataattcatgctggagagaaactcttgaaatgtgatgaatgtggcatagcctcttcccagttctcaactcttactaaacatgagaacacatgtggaagataaagcctacaaatatgaagaatgtgacaaggcctttaaaagttctcaacccttattacacataatttatactggacagaaatcctaaagtgtgaagaatgtcacaaagcccttaataagtcctcaattcttaacagatataagatgtttcatactggagcgaaactacaatcctgaatgatgtcacagtgcttttaacaatacctcaaacttttctaaacataaaaaaaaattatactagtgcgaaactctagaaatataaagaacatgaaaaacttttaaatggttttcacacttgattgcaggtaaaataatttataccggagaaaactccaagtgtgaagaatataacttttaaccagtgttcacaacttattgtacaggaaagcatttatagttgagaaatggtgtacaaatataaagaatgtggaaaagtcattaatatttgctcacatattacacatcagagagttcatacttaataaaagtattataaatacaattactgtcaaatgatctttcagaaatataaacctttaaagtgaagaagagttcattctaaagacaaacattacaaatataaaggggtttgtagtgcttttacttgtatcacagattttattgtacacattttgtactagagaataaccctgaagcagttgctaaaattttgttcagcattaggaaatttatgttggagaagaattcagcaagtgtgattaatttggaaaaacattttttccataactatagcttagaaaatgccagagagctcatactaaaatatacttttgcagatgcaataaatacaaagaaatatttaattcaaattgagtttatataattatcagagaattaacagtagaaatagctaaggcactgacacttcagacattacactaaatcagattgctgagtatagaaaatccaaaactacagttggtaagtaaattaattttatgtaactttaaaatgagtagacatttctttgagaagtcataattaaattcaagtatacttttttgataaaattataaagctttttaaaagtaaataatgatgtaagtcaactctcaaattacttcatgctgtttcttcatttctattgtattcacctgtgaaagcatgtgatcaactattgctgcatcagagatatgagagatactttattaggtgggaattatatacgacctcttctataaaatagtaaggacactgaaatataagatgcataagagtctaagtgaagaggttctttgtggttaacttagtgatgtatgaagtagttgctcatgttatgagagaaaaacatttttaattttagttaaatgtaagttaaaattaaaatagtaccatataatgttagtgattgtacttttatttaataaaatgcagtacattttaa

SEQ ID NO: 8093 - DNA, 1870 bp, Homo sapiens
ataatgtgccaaagcctaagaaaaccctcaattcttaatagatataagattattcctactggagagaaactacaaacctgagagaggcgctaatgcttttgacagtacctaaaactttaaagaaaatcattctgctgaaaaatcctagaaatgtgaagaatgtgaaaaagcctttaaatgattgtcacacttgattgtaggtaagataattcatactggagaaaactaccagtgtgaacaacgtggccaagcttcgacaatgctcacaccctattgcacaggaaagcatttatacttgagaagaaatgtacaaatattggcaaagtaaaaaatccattaacacctgctcacatcttactcaaaattgtagagttcatagtaaataaaagcattaaaattctaattactctcagaagatctgtcagaaagtatgtctttaaagtatagaagagcatttattttgaaaaaaacattacacatatgaagaggattgtaatatctttacttgtaccacagatcttattgtacacattttatactagagaaaaaccctcaggcagttgttaaaattttgttgaacatcagggagtttaagaaaaccctgcaagtataatgaatttggaaaaacattttttcaaaaactacaaattataaaacaccaaagtgttcatactaaaatatatttttgcagatacattaaatatgaaagatattcaatccaaaattaagtctatgtaaatatcagggaataattcacagtagaaatatctagggcattcaagctttagacattacactaaatcagagtgctgagtatagaaaataatacaaacagatttgtctaaacatttgtatataactttaaaaatagaatattttttggagggttataattacattcaaagtacttttttttgaaaatacagattttttttaaaagtgaataatgtgttcaactcttaaattcatgctgtttcatcattgctggtgtattcatatgtgaaagcatgtgactaattgttgctgcataaaagatatgagattcttttttattaggcattatttatgaccttttctatgaaaagataaggacattaaaatgtaagatgcgtgaggaaaatttaggtagagaggctctttgtggttaacttataatattgagtgatgcatgaggtaggtgttcagaataatattcctctgcattattatgaatgaaaagcattcttaattttagttaaaattaagttagtcatatgttattttattaattgtacttctatgaaataatatgcagtctatttttaaattataaattatgtgtgaacttagcttttcaattcaacatttttaacatattaaatactattgtgaattcaatgaagtgttcttatgccactaactttaacctattcccttactcaaggatgtaggtaaaagatggtaacaatacactatttggtaagataatgtactgacatctctagcaatcttttttgccagtggctttaaattgccaataagttaaagaatattgttcctatgggttaaatttttattcttattttcacatttaaatttatttttcttaatttttgtggatacataatatgtgtatatatgtatgccatatatggtatattttgatgcaggcatactctatataataatcacattagaggaaatgagatatccattacctctagcatttattctttttattacaagcaattcaattgtacacttttagttatttttaaatttacaatgttattgattacagggtcatttttatggtcataataaaaaattttatacaaacgtgtaaaatctatacatttctgagttctgaataaatatttttaaaaatttt

SEQ ID NO: 8094 - DNA, 419 bp, Homo sapiens
attctttgccgtctaaggcagttgtttatgacagctgaaaactggacactccctaaatgtccacctttcagtgaagagatagttaagccaattccatttatagaccacctccagccagtgacgctccgagttgaggatgttgaacaacatgggaaggtcgcagcgtactaagtgaagaagtcagaggacagaggaatttctctttctaggagattttcattttgtgtgactcccatggggaggaacagactggcaggaagcacaccggggttaacactggttgacttgaataggattattcgatttttaaaaatacttttccatgttttctgagtgctctatgataaatcagttgcatctgtgataatacagtacatatgtggacataaacagggatcaaataaaggaggtattgctgc

SEQ ID NO: 8095 - DNA, 797 bp, Homo sapiens
cccccggcctgcagaacatctgtccccaagccagctccactgcccaggcccccaagagggcagctccagaagctgcccagggctccgggaccccatcccatggtggcaggtgcagcggtggggagtggctctttctggactcccagtgcctttttgctggacactgtgtccttatggcttcactgcaggtaatgcctttcccttcaggaagccccagaacacccacaggtcttggtaacaaacgccaccttacactctgcaggctgcagcggcagctccagatggcctcctgagctggacgaccccaggtctccagacatctagggaccagagcaggtttgggaacacagagggaagacaggatgggagtgtagccacagaacccacctgcaccctgacaggcacaccccactgaagagcctgagtcccaggaggcctcctggaagcccaggactgcccacccaccacgctggtgcccaccgcctggccagccaagccctgccgatcagacatgtgggctccccgaagcccagccagagactgccgtgctgtgggtgccaccaggcccagggactgcagcctgagctccccgaggcccagggcagccgggtgaggactctgtcctgtgtcacctctctccaggtgtccagctgtctcatgcctttttgtcctgtcctcagctctccgtgtggtcagcgaaaccattgttttctgttaggactcagttgcaagaacagaaaccctgcccccacttaataataaaaaagaaagtttattgatgggtggttgcaaaacaa

SEQ ID NO: 8096 - DNA, 534 bp, Homo sapiens
ccaccccatccttctccaccaaagacagttgcgcgcctgctccacgttctcttctgtctgttgcagcggaggcgtgcgtttgcttttacagatatctgaatggaagagtgtttcttccacaacagaagtatttctgtggatggcatcaaacagggcaaagtgttttttattgaatgcttataggttttttttaaataagtgggtcaagtacaccagccacctccagacaccagtgcgtgctcccgatgctgctatggaaggtgctacttgacctaagggactcccacaacaacaaaagcttgaagctgtggagggccacggtggcgtggctctcctcgcaggtgttctgggctccgttgtaccaagtggagcaggtggttgcgggcaagcgttgtgcagagcccatagccagctgggcagggggctgccctctccacattatcagttgacagtgtacaatgcctttgatgaactgttttgtaagtgctgctatatctatccattttttaataaagataatactgtttttgagac

SEQ ID NO: 8097 - DNA, 635 bp, Homo sapiens
gccctgtctaggaaatgggaatttacatcctaaaacctagttgttcatttgtttagagtatctatagcaaaataggttacatgtagtttgaaataaggtatcctgagttactttggcaacaagttcttttacccttacccgtggtatttgaaaaaaatcaaggtaactgtctgaatactttaatatcagcttgttttgtgaattctctgaatactgtcaacactcttatctaagtttgcctttatgatgcagtggcagcattttgaattacttttcaaagaatactgttcatatgcattgtttttgtgtttcaaactaaatacaggcagttttgtgccagctgtgatattgtgcataccatatggaccattttaaagaaaattttaaaatttcaaatagattcaacaattacattacttgctttcacattttaaaggcactttaaaaaaatctacttctcttgtaggttttgcggctagttggctattcaagaaacctcgcccctctgaatgtcatactgtaatctttaaggaagaaagctacatgaattaattgtactctatgggaaaatttctttggaaagatattttgtaaaacttttttttccaagtaaaaactttatgaaacttggtctc

SEQ ID NO: 8098 - DNA, 894 bp, Homo sapiens
cactccctgtcctagtcggtctatctggacttgcccttgtctgttcgtggtcctcggtggttatctgcagcttgttaatcgtgtaaagtcaagagaagaatgtatacacatatgtgtgttgaataattactattggcataggtatgtgtatacacacggtgcaccaatctacagtatatatagcagagaatcagaggctaaaaatattaccccatatgttccagtattagtcatggattgcaaaggcttagtaacttgagcaggagagaaaactccctcaaagtcataaatcctgagtgacaactgctgctggatgacagatcccttcacctgtggacaacctggctgggggtggggggctgttccaccagctcacctgagcatgtagaggtgggtcctgcagtggtctcgtgggtattactgcttgtgtctgattgtcctgtattttgtaacactttagaagaatacagaaaagtgcagtaattctctttctccatagtatttaagcagaaatattgctagtttaatattgtgtcaggtcgtcctattaaccaggagcagatgacagtaaaatttcagtgaatagcaccttgacatctacaacttaaaaatggtgattgaagcaaaatatgtaaacttgtacggggtgatcgtgtgctttggaacagagtattgttgaagtaattagaagatatattaaggtgttcctggtaatgaaggcatgtaagttataataattgtagctttctgaataagtgtcaaactatatctttaagtgtgctgtatgctgagttacaagttaggtcatttatgaatggaatgtaaaataatactaaaaatgcttcaataacttatcttggtattgctaataaaaaaaaaaagctgtgaaacatt

SEQ ID NO: 8099 - DNA, 4582 bp, Homo sapiens
gtggaataatgactcgagcaggaaagcagtagaagaggattccttcaccacagtttcacctttacgctgtcagacaacttcctgccacagaagaagtcgttgatgtgatttttgaggaaatgacagatgtgactttggaaccaaacttgtaataaaaggaattccaaatggacaagcagtaatgatatttaaatattttgagtgagggggagtgggtcaaagaggaagtagaggtgtaatcctgtattaaccctctgtcaccccttcttagtgtcgagtgtatttattaataaaagcttattagagtgtagaaatgccagcaagagttaagaaagggcttttcaggaactattctaaaagtcataaaagggtcacagtcttaagcagagcttagttttcttctcacttgtcaaatgcagactgtgaggcctccagtgagaaatgggaggcagttctgggagggggttttttcagtgtcaccaacagagtcaacaaggaaacataattagagggctttgaaatgatctactgaaatacctaaattgatagaaattaatcatactcaatctaggacatgttcctttactccttaaaaaagaaaggaaagatctctaaattcaaagctagattgtaaataggcattcaagaagtattgtcttaaatttacgatgaatttcttgtgagcagaggacgaaacaggtgaattctcaccagactcaaaccagatctcaattcgtagtaatgctaaatcgtcttccgtgttctcagaggttcttttcagtgtctgtcagaacttggcatactttctccatagtacgtagaccttctaatactctgctaaatgaaaccacacttgttatctgaaagtgtgtgaaagaaacaatgtatgaaaatttacatttgatcatccggcattggaaatagtttgaactatttccaaaaatcccttaggggatgaggggtgaaatttaaaagctcctgaaaatgagtactgctgtgttgagcttttctttcctggggtatattaatttagttatatttagcagaagaggaatataaccaaatgtgactaaaatatagcagaaattcaggttgtttgtaaaaattttaataacaaatagcatttggcaagtctataggattcttcctatctggaaattctattttgttagagtgcgataggacatatggaaaaccaacacaaagtgctttagcattaaaactcaccatcaaatagatgtaatcttattaattacacattttgtattttaattatttcaaggagtgaagaaaacagggtgtttttgtttttgtagttctgattactcatttatgcattgttttgtttaagtaaattctgcctacaagtgaaaaggtcggtgcgctcttctgtgcaccatcctcacggtgctatttccgaatatctgaatattgatttctaacacctggatgaggctgtgaccgatcaacttggaacactgtaaaggttttcgaatgggatacgctgtaggcacgttttaagaagtattctgttcctaaagtccaggtatgattggattaatatttataaaattattattaggaattatttaagtggggccaggcatcttgcaacattttctgatttttttttctttctttctaatctcattttggtgatatttaaacaaacataaatgattgtaactttgcagcttttttatttaggtagctttaatttatttatgaaagttaatccatttctgatacgtggtttttaaaaatatgaaatggatttatatatactatattcctcaaatccactgtatgtggacttatattcattttctccttttttcggaattgaaacattttaatttcaaattcaaatagaacatttaaaatgatttcattattattacccatactgttgccactcatattgtaagtcagttttttcattgctggtacaatgactcagtatttctttataaaaatctgttgttctgaaaatcaacaaccttagaaggattttgtcttagaaaatttccttggctttagttttatatcatatttagaaaataataatgaaaagcatccccaaaatttcaatgatgtgaatttttaaattacctttatttctttaaactaattccattgattgttacttaaattttccacctggaatcatggatttaaaatttccccacctcatggggaaaaaactaacccagaagttcaaagcctttaaagtttcatctgattctggccttagaattgtccttaaaagctttctcctggccgataggaggaagcatatatcaaggaggttctttcccttcccattatcattttgtggcaagccttaagttaacaatgtgtctaccaagaacaattgagttttctaaaagtaataatgaagattatgcaattctaactgtagaagagatagctattaaaataatcagtagcctgggcatagtggctcacacctgtaatcccaatactttagaaggccaaggctggaggactgcttgagtccagaagtttaagaccagcctgggcaacacggggagaccctgtctctacaagaaattaaaaattagccaggcatagttggcacgtgcctgtagcaccagctacttgggaggttaaggtgggaggatcacttgagcctgggagatagaggcttgcagtgagccgtgatggcaccattgcactccaaccggggtgacagatgaggtcctctgtttacctccccccccaaaaaaaaaattcagtaggaattccttcatagaataacatgttatttattggtattgacttcttattagacagagctcatagtatttgttttctgctccgaacacttaaaaaatactaagacgtgatagtgaaaatagctttgaaaagaaactacatatggcaaaggtggggaggggggaagatgatgcattctgatcattataaagaatacttttcagggctctatcattttctccctttctctaatcatccagaatatggcgggtgtcccagtgttcaacagtatcatgctaatattccatttgatcggtagtccaagttctttggccagatagtgcaatgttgtgacaccgaccgaagcctttgttctggatctttcttcctattgaaggtggctgctggtggcttcataattttctgttttttttctcacaaagtaaatggtgggcatccatgtttacattgcaccttcccgtgctgtaattggcttgacaaagacaagcaggcttctctgttgagacttattgtgtttttagttttcatagacacttatttaatctttttaaattgtacagcaaggtgctctaagtaatattcgataaaatatatttaatagaaatttgcgtttgatattcatgaacatgaatacatgtatttttttaagaaataagtattgtgtaacactatggcattgcttctatagccaaagtataaaaatttctggaatactgacatgtaaagactacagttaattctgacactgtatcttattaaaataggatgatttgcattttgtaaaattatcctgcacatcaagctgcatgccttaaagcggaaactctaggactgtgttcatgggagagcagttcatctgttcagaacagtgaggcaaggtctgtagtgcttctttaactacctttggaaatactgtacaatgttagaataatttattttgctttacaggagtttgtcatgtattgactttaatattgtattttggtaataaattttttgttaaaaaaaacttggctccaagttctattaaccacaggttgtgttcattcttttcctggaaatgatgactttattgcttagaaagttgtaaataattaaaagcttcccaagagttaaatgaaggttatgatgactcttgataacttgttaatctgttgctgactagcattagactgttacacgaagataaactgaataagcatttagctttttaaatcattttaaaaattaagtctaattttgaagcttttttccttgctacccagttcagtttctcttccaaatgtgacacgcttatatgctttcaattctgatatagtcaaagtgctaaagactagttctgctattgacgaaggaattagcattccttagtgaaggccaaaaactacagtgatatgttcacaccttgatcactctgtcgtctatacagacagctattgacatatttgttgcattgacgaagctaacatcatctgactgtatcgtgggtctggttatccatttgtgccctagaatcctgggtcacctcagttgaaagtgaccaaggccaaatatttcgtcccatgcttcccagggacaacataatcatatcccctgtctttgaaaaacccaatctgaaactgtgtcactaacctccaaattaaagaatccgagcatggaagctctagaacgtatggtccagtgtggcagccactataatatctaagtgtaaaatacatagcagttgcaaagacttagtacaaaaagaatggaaatgtattaacagttttttatattgattacatgttgaaatgatattttggtttaaataaaatattaaaat

SEQ ID NO: 8100 - DNA, 2090 bp, Homo sapiens
cgcagatttctgcccagtgtctatttttgatacggagaaactgcatcatgatgaaactcaatagatgacgtttcctatgtaagtaggtagcccaaaccttcaagctgtgatatgagtaagttctacagatgtttacacaagtgttgccatctttgaaagcatcttctacaagcagaagtctttttcgttgtgtgtctatctttctcattaatgttctttagcctaaatgttaacaactttctaagagtgacctagaattatgttgttggagagaatgatgtgtgttccatggatacctggataggcacataacatgttggaagatgagcacctgctcaggatttgaaatacgtttaattttcaggtgacttaagacagctatgattgaatcaactagagatgatgatcgacttatttaatatgatttcactggtgaagaccaattggtagctttttaaaaagcactttagtgtcctgttttaccttaaaatgttataatattttccagttgtcatgctgtcaacattaacaaaaaaaatcatgttaaggctttgtatcaaacattttgttacactctgtctgaaatgtaatgtggagtacttcagcagtatgtgtcatgtattgtgtgtgtctgtgtgtgtgcatgtgcacacatgtgttttaatgctgggcacagaaaagtgttacaagttccatatcgtaagtccttaaaggggcagaaatatatgtagccaagtagaatttattacattttagtgttattattttaaaacttactgatactctttaacctctcctgcagtaatagttttgctttatttcttactcatttcaatttattgggtttgcaaaattttgtaaactttttgtgtttttagcctttgtattttttacagcctagaatcttgcaaagtctgaatattttttaaatgttctatcttaactagttcactaatacagtatttttagcagacagcattttcagacagcattttcataccaagtttgacttgtggtctccaatcttactgggaaggccctggtagtgtaattcttttccttattaaaaggtaaccaagtgcctctaagtcatgcttatttgtaaacaacaaagaagagtatatgtacctgctcaaaatttttttgataatcgcttatataattaatttctaatgatgaggacatgtaaaagttgccagtaagaacatagtatgcatttaattaaatcaagatggctaatggaattaactttctcccctgttcttgccaggtggaaatgatttaagcatttctccttgcagttgtattgaagtaaattaccataggcatcaagatggctgcatcacattttcaaatgattttatattcagttgctacttataaagcagcattcaaaaagtcttttacactgtcatgttggacacaagcagactcagcttttatcaaaacttgtttaaataaaaaattgacagtagctgggttattaaattatgcaactgaaactcctgaattatatcttttctgtatcccttaataagattggagaccactgccgtttaggataatacaataataaaacgttttaatcagtactaaaactttaattaagccaataatgatgcatgcctgttgtagctgacagcatgggtcagtacatccttcagcgagtgccttactctaattgaaaccaagcacacgtaaggtacaatatgttagactctgtgattttgttttcaaaatcctctgttatggctatatttaaatttattttaaatattcctgtatgtattcatctaagcatttgggcatttggagtcttaatatacaagaaacacgtacttaaatttttatgcttatcaccgcaatgatggcaaacagtgattttttttttcatagtttaggtgtcattgttgccagcacctttagtgctcagtcttcagtgaaaaatataaagtgccaaaaaaatcttgcaagacagaatccatacttaacactctttccaagacactgtgaccatgtacagtagctatttcctgatgaccaaatctctcaacgaatcatgttattaataaatatttttagcactcatc

SEQ ID NO: 8101 - DNA, 1740 bp, Homo sapiens
ccaaggcaacacagttttgccataaagaatccaatctctagaaaggttggactatagagtgaaataacttttgtgtttattattttaaaataacatattagaatctttttttaaatttttctttattatttatttatttttgagatggagtctcactctgtcacccaggctggagtgcggtggcgcaatcttggctcactacaacctctgcctcgcaggttcaggtgattcttctggcttagcctcccaagtagctgggactataggtgcgtgccaccacacccagctaatttttgtatttttactagagacggggtttcagcatattgaccaggctgatctcgaactcctgaccttgtgatctgcctgtctcagcctcccaaagtgctgggattacaggcgtgagccactgcgtccagccagaatctttatttttcattttaattttttgagatagggtattgctctgtcacccaggctagaatgcagtggtgcaaacatgggtcactgcagcctcaacctcctgggctcaagtgagtatcctgcctaagcttcctgtgtcactgggaccccaggcatgcaccacctcaccaagctaaatttgatttttttgtagagacagggtctcactttgttgcccatgctggtctcgaactcctgggctcaagcgatcctactgccctggtcttccaaaatatgagaatgagccatagcacccagcccagaatttttataatcaagtgagttttttctttttcattaacttattccatttatttagcagttattctaaattagtatttttcaagttatagattgtgaaattagtgcagtaggtcatgagtaacatttttcttaatgaaatcaaaaagaaagaatactatcacatctagtagggttgaggattgttttgtgaaacttttaattttatatatatatatatatgcacaaactgggtcacagtatacaaggtacttccttttcttttttttcttgttggctacaacaggaaaaaaaaaaaacagaaaaggaaataaaaaagccactgctttaaatcatggggtctaaatgtggctccacagagggtcctcagcatgttcatgactatctaatactctgtgcaagtggttttgcagggcatagggcgatggggaagccatatgtttccagggaaaggaactgtaattttaatcagattttcaggagggttagccgggcgtcacgcctgtaatcccagcactttgggaggtcgaggcgggcagatcacttgaagtcaggagttcaagaccagcctggccaacatggtggaaccctatctctactaaaaatacaaaaattagccgggcatggtgacacacacctgtaatctcagctactcaggaggctgaggcacaagaatcacttgaactcgggaggaagaggttgcagtgagctgagatcccaccactgcactccagcctgggcaacagagcaatactctttatcaaaaaaaaaaagaaaaaagttgagggggtggtctgtgactctttaaacacgtttccttgttttctttctctctctctttttcaacatttctagaactcctcttggcattgttttcagaactcgtatataacttacatgtggaaatttgcatccaaatataccttacattttaatctaatatgtcatgatctttaacctaaactgtggtgtctaatgactagttgcttgtaaaaataaacaaacaccttcaaagcc

SEQ ID NO: 8102 - DNA, 116 bp, Homo sapiens
actacaagtgctcacagactagaacttaacggaacaagtctaggacagaagttaagatctgattatttactttgtttattgtctatatgccttttaaaaaaataaacttgttatgc

SEQ ID NO: 8103 - DNA, 1329 bp, Homo sapiens
cggacacccgacggccgcctgctgctgccgctccctcccctgagaaaagactcgggatgggtgtggggtctggcctgtgcaaggggagtggtcctaaaaccccgtgtgtgcatgggtacacgcgcgtttccagtgcacatctgcctgggcaggacacggtttcctcttgctggcccgggaggagttaactttgcgccggccgtcagggcattaccgctaacgtctgcaggagctttattccctattaatagaaaaccgtcacagtgaccctagatccctccgagttaatgagttaacacatgtgctgttggggcgtctttacagggagtccgagttcggtgcccacccctgccagcgtcgccccctttctgcgtgggacagtttgaaaaggtgggtggggtggagtgaagtttggagagggacgctgtttggttctatgtggttggtctgtttcccggacaagaaaaattgcaatcaaatgtcagcagcttttattaccttaatctttcagggcctaaatttaggagagtgtcccgagagcagttcatacaaagggctttctctaagacgcgctacagcccttcctagcagagtttatccattcgtccccaagagcagctagaagagatttgaggtcatgacctcccactgccgctcaggggctgaccctatttaggaaaccaaagagggtgggttgaacctactctcacggacttggatccagtgcgcacacttgcctgcggaaaagggctctccccagccacccggagatgggggtaagaggaagagcagaggcttggggtagggccacctggtgtttaaacaggcactttctccttctctggggcttatttttgttcagaactagaccagagtgtttgaacctcctttgcaggagggctgggaatcctctttagagcacttaatcctatttatcccctggaatgtgcgtgctggccagtaggagggctggctttggcagctccctgacccccgcgctgcccgcccctccggggtaatgtggcattactggcccacagaggttttgagccaatcagctctgagactgggttagaatgtaacagctttaacttgggatttaagaagcttttaaaaggtaataatactctgaaagaaaaatgacgtaaccacagcgtgtactatgaaagctgttattttaataaagaacgctgggccatgaactcatacctgccaatgagtcaaacatagtatctttatgtagatacttagattactaaatatatatttcatctacttctgaagttgatagtcttcccccccccccacttttttcttttttgagacagg

SEQ ID NO: 8104 - DNA, 372 bp, Homo sapiens
gggctggcctcagggccacggcatcttctcctgagaccacaaacaccaggatcttgttttcagctttaaaaaccaagagaatgggccgggtgcactggctcacgcctctaatctcagcactttgggaggccgaagacagcggatcatctgaggtcaggagttcaagaccagcctggccaacatggagaaacccctaaaaataggaacaattagccaggcatggtgacaggtgcctgtaatcccagctacttgggaggccgaggcatgagaatcacttgaacccgggaggcggaggttgcagtgagctgagatcgtgccactgcactccagcctgggcaccagagcgagactccgtctcaaagaaaacaacaa

SEQ ID NO: 8105 - DNA, 252 bp, Homo sapiens
ttgaatgctgccctggctcgtcctagaatcatttctcctccatgatggaagcccagtgattgttcagttaacgcattgtacagagtgtatttatatgtaaattcctgctgtaaaataatttttaaaaccttgacatttcaaagactgccttgaaaggtcgcagaaattgatttctatttttaatttcagttagtatcgggggaaaaaaatccagactgaacagtttaattaaagtggaatttttctattttc

SEQ ID NO: 8106 - DNA, 223 bp, Homo sapiens
cagccacaggcccctttgagtgactccagcacaggctacctagcatgtaggtttcggggctttgcaggggctttctcttgggcccctcccaggctcagcaggcctgtcagactggggcaggacccaagccctggctggactcagcacagtgccacctcctcagctctcagcttggggagtgaacactttccgttttcatgcagaataaatctaattcctttgg

SEQ ID NO: 8107 - DNA, 62 bp, Homo sapiens
ccgctgggctcgctggtgaccgccacagccccgctttgtaaccagggaatacacagtcattt

SEQ ID NO: 8108 - DNA, 2993 bp, Homo sapiens
acctcaccctttccagactttagagcttgtggcttgaatgttaaaggtgtgaccaccgacaccactcatgtcaatggctgaaagttgtccatttccatgactcaaagacccattggaggctattttctgggatcagcactgaagagttgattagctaaaaatgttagccttgtaattcgaatatctggttttaaatgatagaggtttttgtgggaatcaaaatcccccaaatgttaaggtatatggtaaaaaaagaaatatctgggatcccgatgttcttaataaatcctgacttcccaagaaatgcttcttttttaagttgacaaaaggaatggggaactggcaggccgcgcagaaggttcttggttttaatggataggctgaattggattaagaaaagttgaatgccacctatggtaatctatttgtgattttcttctaaattatgtattataaattcgtagagctatagaaagcaatgagtgtgtaatttggagtgattttatatatggcataaactttgttttaacataattagtactgttttcccccaaaagtacaagtttttgagtagcaatgtcaggttaagtaaagaaacttcatcacatcttataggtagtgtgtggccaattgacttaaaaaatacaaataacatttaggaagcaaatagattaaacacaaaaataaaactaaagcataggaattatgtttttgagatacctttgggcttagattggcattgttttattctaaaaacccaactcagtggtgtagagaaacttgtgtaccaaaattttagtttctgcagatgctagtgtttttttggatacaattttgacaaccaagttagtaaacaaaatatcttaacagtttgatgacacaagctactgatgagggtttggaatattaattcagaaggtagtttctcttgtgttcaaaatagctgccatggggctgttacttttaaagtcaaaattttcttctgaaggctcattttggtatttgatcttaaccaagtgattattagagaaatgtatcaactccatgccatctcccaaaataattgtctaagaaaacttgaaagtgtaaggttttaacctttaatttatttctcttaaatacatcttttgatattgttgttgtgacatttctttttctggttagtgggctttccagactttgtaccactgcttctgtttattcatttatatgcttttgtgtcccataaattatttcagaaaatgctgataaaactcaggatattgacatttttgttgagactaaaaaatggcagtcgctaaagtagggactctagagtctggcttacgtcagtgttggtagtttagattgtctttgtcaacgttttttcttctctcttttgctttcttttctttctctttttttcttagcacagttctagctcaaatttgtgtattttttgtgtgcctgggctggagatgagagactgagtcataactgatttaaaagtttgtgttatcaggtatcttatttgaacatggtcatttttggccacattgctgtttcatactaggacttgggatgatgtagccagaataaaactcaagttgcaccctccggttggtggaagattgctgaccgtgccgtttctgggcaggagaagacatcatggtgtccagcaactcagcaaagccattcttaagagtcgtgaggtccttctgaatgtaaaactggagcccaggagaagctgtcccaggagggctgttaactccctatagagccaggagacaggataggggtttctagggtccaacaccagcttaccttggagtatgaatctacccatgaaggatgagagatgttttgaaaaactagccaggacacacccacaggatcctactggctccttagcagctgattggtgttacataattaacttaattggagatgcattaggtcacttgaatgtataagcaagcacctatggtaggcgctacagacatttaaatctcttgggaattcgatgctcccatggaatttataccagttatatgaattgacttaagtatcttgaaaaagaaactttagagaaagcatcaggggtgtgtactcagtatttcaaatcagaacacaagattggaacttttggaaaaatgggttcaagctttcctattagccatggaaatgcaaagtttagcagaagcaagcaattaggcagagaacaaaaatgttaagcatggtgttgtctatcttattgaagtggttggaaatgaaagcttttaatttgatagatttatcagtataaaattagggaaaccacgtgtggggaatgaatcaatttagagcttcgggaattgtgaggtgacttttgtaacttttgttctgtgtgtgacctgtgaaccactaggatgtgatctgcccttgtgggcaggtccagcatagttaggagttaggctttagcataaatttctagctgcatctgagtctcctgggatgggtgctctttggctggttttggctgcggatggtgagatcagagcagctcttcctgctgctggcccctgcaatcagttgttgggatgccagtgcagatcactaagtagtaagattttaatcaaacacgaccaggtccgaaatgcaggtcatgagtgtgaaattctcaaatttacataaaaagtagaagtatagacagtttaacatttggtattaaaggagaggaaattgtagcagcttttcacgtttcccagtccccattagagggcttgagaccttgtacctgaacaacccattttgcactcagtgctttctgatgccttaggagaattgttttgtttcacaaaagctgggaaggaagaagtccattctgcagctgttagatctgcctctcaggaaaaagtactaacttgttctttttgttcctggctttcatcagtttgtgagatttctctattttttttaaatataattttatttctttcaacaaatataaaataaaaaacaactttggaacaatg

SEQ ID NO: 8109 - DNA, 445 bp, Homo sapiens
ggggcgccgcagctggccggggccgccctgccccggtcactcacctgtgctcccgggcatcctcctgtccctggctcctcatcctgggagcaacagggctctgaggacgtgaggagccatcgctgtgggaggcagcaggccccgggtggggggcagaggcgcccagccttggatggggaccccagcccctggcctgtacctgtttcctcattccttggctgagggagaggctgagaactgggcagacacccctggagctcagccgacagttttgatgagcagggaagtctgaggcccagaggacggggggcccagcggtaagggatgtcccgcactcccttagccattgccttggaccaaaccacgtggtttgcagcttttctacgagccaggggggaggttcccttggattaaggttccaaataaagcacatggtttccagagc

SEQ ID NO: 8110 - DNA, 2437 bp, Homo sapiens
aaatggcccagagtattttcaacaaagcgtgcttcatttgacacccagagtctgactttggattcgaactaaacccaggcaacaggcgaggcaggacagaggctgagtggaaaggtggtctggagccccttccctctccctgctgacctgggagtcgcaggcacccaccagctgccaagagaatccctggaccggctcttcctggatgggtccaagaattggacagctcagatggagtgagggcctattttccaacagctcttcgcagacccaagagcttggcacatttccgggttagggtggaatgggctttgcagggaagagggccccctgtgcacgcattccacagcctgtcggtcagaacttgctagttgcaggagacgggtgttacacgcagtcatcagacctcaccctcacagaggcacaaacccacatagttgtggacgcctgcagagactcaaatattgagaggacttctcctttttctctccctccagagctcccacgagctgatgcacccccaggcttcaaaccacctggaatgcacagctcagggaagctggtggatgcctagaggctgaaggacagggaactctccattattggggcaggactcagggaggacacttggggccatgtgtctggagagagggcataggttacaccctacagaataaagaagggacccaaagcctctttttgcctcccggaatcaaggccctgagggcagcaggatggtggcctgggtggggtcgtccaactaggtttgctaacctgaggggtcactgggcctggccacttctgtccctctggtggtggaacccagcacgtggttctgtagggacctttgtcagtgagcaagactgagatcgtcacaggagaaggtgcccttgctggctgccccagcaggcacccacctccctgccaggccaagccaggtgtcctcttgcagcttggccttgatgacctctgtttcttcctgggcaggtcctggagcggctgttccagaggggtttcagcgtggctgcgtcctgtgggggcggtgtggactcctcccagttcagcgagtatgtgctttgccgggaggagcggcggccgcagcccacccccactgctgttcgaatcaagcaggaacccctggactaggccctgcttcagtgcccacctgggcccccccagggacctggaaacagtgctggggagttctgcctgtgtatacttggccgtgggcatgagaccgagggtgaggctggagggtccaaagctggcccagcgagcaccagggtcccaggtgtcatggcaacagaacgtgggatgctggaggcatgcctgcagaaggactgttgatgcgacccaaagatacagcggtgggatctctgctgccagctctcccagcccctcagcttcgcagcctggcgcagcatcctctgaggccccggggcctgttggggcggggttggaagagccgtctgcagctacttcagaggagctgtttatccctctccacgcggggcagactctggcgggtctcctagcgtccgagagatggcttattttctacagtatttaaaatggatgcagccctaactgcaaaagtcagagaggctgacaaggaccaatgcttctttatctggtgctcagttctcagtcagacgtgcagcatggctgcagggtggaccagctgcctggcattcaggcccagatgcctgcagggctggggctctcgggacagatgcagggatgtgtgctgcagggctgctgggaggagagtggtgggggcctgagggctgagtgattctgtaaccacctgagaccttcacgtttgctgccgttgggggctcaggctgcactccccgggtcacctgacctgctgcccaggggcttccagtcctgtctgtgtggactggcacctgggctgctggagaagtctcctcccgttcggaccagcctcagggctgcacgttacctcaggaatgggccccaccatgaaggggcccatctgtcagcagcgtcttctaggtccccagctcagggagccatccccagctccagttttctcatgcgaatatgcacagttttaattcacgttgttacactagcctgccgatgagacccagacacaggcagacctggcgctcttgacccctgattccagtgaggactggccctgaggagtccttgcagacctgctgcctcccccacgacaggcccaaagatggaccccccctggccttgtgacagctccccaagtgttctccggtggagaaactgcagaggactggtgggcggggctccccagccatcaccatcctgtgtacaatggctgtagacttgtatatggctcctttaatattgtaaagatgctgatgtacaattgtcgtgcatttgtgtgaacacattgcgttcccagtccatgccataaatgatgctctcaagc

SEQ ID NO: 8111 - DNA, 1915 bp, Homo sapiens
tctacaaacaagtctctgaaaataggtgaatttctagctcttcatggtcctgaacattgatttcagtctttgcaaagaatgaagaagtgaattcgctgtacatttgtcaccagcactgggtttttgttttttgtttgtttttccgcttaatttcaaagataaaatgcagttacttttgggggtggaaggctcatcttaaaacatgagcattaaatatatttggaatagcagaaggttaagtaatttcttatgtatagttaaactaaagcagtacttcagtgggacttaacaagtattttttcatcactgaaaggttttttttttttatcactaaattgtatttggcaattgcaagttgcctgcagatagggccgtgatactgtgttttgagccacagaaggttgtgtgtgtgtgtgtgtgtgtgtgtgtgtgtgtgtgtgtatgtgtgtgtctttttcctcctttcttttggggaatcctgtaatatgaggtagcttatttcgtcaattaattagggtgctggatggtagagaattttgtcagtcaactatgtacacacagtaaatactgtttcttaggcaaaggtaacttttttatatagttgtaaaattccattatattccattgccaaagaaacattaagaactttgtatagctgtataaaaagcaactaattttttaaagaataaacattttaaagtcagcaaacatactgtgtccttgcagaagttgatgtgctgagcagcagccttatgggtgggtctttttttcttagttttccaggcttaacatttttgattttgttttttaatgtttggaacataaatgaagatttgatacattatttcattatctaaaaaggattaattattcatgctcattgtaagaacttcattttgtagcaaatggcatatcacaggatctgtccagataatcgatattttcagtatacaaatgtaaataatcacagatgagaatgtacttagctgtattttcaaataagtaatcttccccccttttgtaggactttaaaactaggcatcaatgaacctgtttttcctattatgcctggaatttagtcatgataccttgactcattccatcatatttcaagaggattcagagtgctagaaattattttggtagcctgtaacacacggcaacactggtccttgggcctatgatgacccacagatgactcagtatagagttcattgctaattataaattactagtgaatctttttgatattttaagctctagtgggaaaaatctggccacttttgtgtttttatgaaggccatggaataaaaggatccaaagatttaaatatttttatctaatattttgattgttttcttaactttctccttaaaacattcagtagtgataaagatatagaaactgcactgtaggagaattggaatatttaaggctggttgacattttttattttcattttatatcttttgtatagctctacaaggcagtgttttgtaatttggtttcattatgaagatccagtacttggcagccatagtttagacaatattgttcagtgctgtttgcttgcatgttaacaacaaaaccttttagaggacccacaaatcatgatattgaacacagttccgaggcattcagagcatcagagcaagtaccatggcaatacatgtgtagactgttggagatgtcccgggccaatttcaagaaagaaaactgtaaatactagttctacttgctctgaaattatgagtttatgcgttttcccagccctccgaatcactgactggggcgttttgtgccccagcaataactggcagcatggcatacctgcagtaccccttacaatattaaagcaaagtttttattctaaaacagaataaaactgttcaataaaaaatgctcgtcaaagttc

SEQ ID NO: 8112 - DNA, 2611 bp, Homo sapiens
ccccaggccagccagcctgcctgcctgcctgcctgcccgcccagagctgtggggatgagtgtccccaccccagggccacttagctgacaccagcccctcagaggaccagtgcgccccatcccagggagggttccttggggacaagggtggttggcagctccaagcctttaaacctggcttctgaaacgatggcatcagagccctggagagccagctggagacacaggcgtctggccttcaggggcttgctagggaacctgcatgcctagtaagcgccacaggtgactctgatgcaggcgccacagccacacttgaagaaacacagctcttgggtttttagtcctgctgtgtgttgggaagacatcaggcctgaaagctgagggcataactgaccattttttggaaaccctctcctccctcctccacaccttgagtgatgaccacaccaatcactgtattttatagctttttttttcatgtaggtttttagttaaaacatctcctgcctaaaatgcattgaatattttaagataacagatatactggctggaggtttgtttaacactatctatatttaagcttatacaaaatgggcaaaatatagaatatttgtgattggaagcagtcacctggggtttctgggggtggacagttcctcgccacccagcagcaccctgggactgcggcctttcccagctttattgaagcagaatggtggaacttgtgccggaggtacactgctgaaggtgcgtggcggtggaccagccagctgctgtccatgtgcagagcaaggctgcacctgctgcccttcgatccttccacacatggccaggacactgccacaatcctcggggtgtggtcaaggggcactcagagacacctgcactagaaattgcattgacattgtgagctggctcagaagacaaaccaattaagatgtagatagaaattaatttaaggtcttttcttaaaaaaaaaatccacctcattttcagttaacatgtgccattaaatagataacatcctgtggatttagggatattttccagccagaatggatccagaagaattgaatggtgcttaaattgagaaataataataaatatatctatatagaatagacatatcccactgtatattaattgaggttacagaaagttctttatataaaacttatttaaatttttcatatttcatctttgaaaaagtctgagaaaaatccataatattttctggtatgaaagtttgacagtattaatattttttttatattttcttaaatcattaaaccattttaatatatgttaactactaataaatggtttattctttctaactccatataagcttttccagcaaagattgtaataacacatttatgttctcgtttttctacagatataagtaaatttatatataaaaataccaaaaagaggctgggcgtggtggctcacgcctgtaatcccagcactttgggaggccgaggcaggtggatcacctaaggtcaggagttcgagaccagcctggccaatatggtgaaaccccatctctactaaaaatacaaaaattagccgggtgtggtggcgtgcgcctgtagtcccagctactcgggaggctgaagcagaagaatcgcttgaacccgggaggcggaggttacagtgagctgagattgtgccactgcactccagcctgggtgacagagtgagattccgtctcaacaagaaaaaaaaaaaagaatatatatatatgtatgtatgtatgtatgtaaacacacacactaatttgagaggacccgtagggtgtctgagcccagccacctgagtttttagtactgtgttgtcaggctcttcccaggcctcaggtgttgtcttttgtgctgtgtggggatgcattgctgcctgtatttatgatcttttgccgtggttctgagcattcacctcaccatgtttacaaagaactgttttgtatatagacattttcaggcacgtgctttgcaccaaccctgcgtggctcttgtctgtgttagctgtcacggtgtgcacactaatctctgttaaagttgtctatggctgttctacttgtaagatagttttctatttccttcagtaatgtgtccacagtaccctgtatttcgagttccattatactgaagtactcatgttttaatagtgcctctccaaaggcctcaccttggacagaggtcaatccttgatgctccagcacaggtgacgtcactaattgtcactttccagtttgtttttctctattaaggaagacattttctaattgcatctccatgggctgtgagactgtgtgaagccgtttgtgtggtctccatgtaggtgctgtgttcccggcaccgccttgctctgaacactggtaattccaggtgctgcgcttggcagaggggtctcgccaaagcgcatgtgtgtgcatgtgtgaacgtgtgtgtcctttgcatggttgggcgtgggtgccttgctagggcatcagcaggacattgtgtgtatagttacaatgcttccaaactggaactctacattttgtatcttttaaagctcctataagtaaaataactattggctttattaaaaatatacatttaataata

SEQ ID NO: 8113 - DNA, 295 bp, Homo sapiens
actcgtgctcatctgcagcctcctctgtgactcccctttctcttctcgtccctcctccccggagccggcactgcatgttcctggacaccacccagagcaccctctggttgtgggcttggaccacgagcccttagcagggaaggctggtctcccccagcctaacccccagcccctccatgtctatgctccctctgtgttagaattggctgaagtgtttttgtgcagctgacttttctgacccatgttcacgttgttcacatcccatgtagaaaaataaagatgccacggaggaggt

SEQ ID NO: 8114 - DNA, 45 bp, Homo sapiens
agcatttccttttattaatataaattaaaacaaatgtttacatcc

SEQ ID NO: 8115 - DNA, 671 bp, Homo sapiens
acagaaatgcctctaaacagaaccctcttactatttagtttatctgggcagaaccagattgttatgtcctttgttccaaagggaaaaaattgacagcagtgacttgaaaatgattctgctccctttgaaagcattcattttgctagaactgttagacacattgcagtatgctgtattgaaagtaggaatatagttttaaaaaccctttgaacaaagtgtgtgcataaccagtcatgagataaaacaacacaatgcatgttgcctttttaatgtaaatacccgtaggtatcattaatagtttcaaaatattgtggtttagtaaagttgatacctggttataaatattatgcctttatttttggctagaagaagaattatttttagcctagatctaaccattttcatactcttaactgattgaaacagattcaaagaagtatcgagtgctatgcattgaaacttgtttttaaatgttagatggcactatgtatattaatgtaaaacaatgttaatttactcaagttttcagtttgtaccgcctggtatgtctgtgtaagaagccaatttttgtgtattgttacagtttcaggttatttatattcgatgttttgtaaaactcaaataacgactatacttatggaccaaataaatggcatctgcattcttgttac

SEQ ID NO: 8116 - DNA, 1160 bp, Homo sapiens
aaatgcaggaaatccttcaaccagcttgaatcactgaatatgcatttgagaaatcacattagattgaaaccctacgaatgcagtatatgtgggaaagcctttagtcataggtcgtccctgcttcaacatcacagtattcatactggagagaaaccttacgaatgtattaaatgtgggaagaccttcagctgtagttcaaaccttactgtacatcagagaattcatactggagaaaagccatataaatgtagtgagtgtgggaaagcttttagcaaaggctcgaatcttactgcccatcaaagagtacataatggagagaaacccaatagtgtggtaagtgtggaaaagcctttagatcatatgaatccctatacatgtgagaaatcttacagaagagaagcagtgtttatcacggtaaacttcattcatagatcctcccttatttaacatcagaaaaatgtatactggggaaaagttgtatgaaggtggtgaacatgggagacttttagcaatgatgcagatttttttattagagtttatactgtagagaaatcatatgaagtcaataaatgtgggaaagcctttgtcagtattaatcccttaattgacctaagtatactcacactaggaaaaatctgtgtacatgtagcaaatgtgggaaagactataggcaataggaatctcctgcaaactcctacaggagaaaagttgtatgaatgtggaaactttagaaattgaaggaatttttcagttccaagtgcatcccttattctataggaaataaactggagacaaatctcatttaagagatgcagcaaagtgttcactaagagtgtttatcttgccagacataagaagatgaatggtagagcaacctgaaggatttagaaattacatataaatctttgcagttatgctatttgtaaacaggattatataggagagcaaataaacataagtatgcatttcttagagcagtagcttgcagtttcagttgagttctacttagaaattctttttagctagtgggcatgtgaagatatttagtcacccagaggagccagtaaatgttataatgttaaaaattaaagctgcaaaagaaataaaatggtgttaataaaaatttggcatctaataaaatcattttgtatatcatgaac

SEQ ID NO: 8117 - DNA, 771 bp, Homo sapiens
agcagtggttatcatggtaaatttcctagattctcccttatttaacattagaaaaatttatactggggaaagtcttatgaatgtggtgaatataggaagaccttttagcaaagatgcaggccagtttgtttattagactttatactgtagagaaatcatatgaagaccataaatgtgggaaagcctttgtcagtattaatcccttaattgacataagtatactcacactaggataaaaccctgtacatgtagcaaatgtgggaaagactacagacaataggaatcttttacaaactcctacaggagagaagctgtatgaatgtagaaaatttagaaattgagggaagtcttcagttccaagtatatcccttattctacagcagagaactcaaaatggagagaaatctcatttaagagatgtagcaaagtgttcactaagagtgtttatcttggtacacatcagaagattaatggtagaacaacctgaaggatttaggagttatgtgtaaatctttgcagtcatgctatttgtaaactggattctacaggagagcaaataaacattataataaaatatgcatttcttagagcagtagcttgcagtttcagttgagttctacttagaaattctttttagctagtgggcatgtgaagatatttagtcacccagaggagccagtaagtgttataatattgaaaattaaagctgcaaaagaaataaagtgatgttaataaaagttttggcatctaataaaatcattttgtatatca

SEQ ID NO: 8118 - DNA, 334 bp, Homo sapiens
gagtctgaggagtgtgggaagtgcttcgtgtgtggctcaaacattgttgaacatcggggaatttatgctggtaggaaactttcaaatgtgaagaatattggcaggtctattctcatcttataattcataatataactcagaaaacataagaatattcctttgtcatttataggtttgtaataccaatatttatactggtggaccattcagaaaaagtgggaaacgttattacttaatggttacagcactgacagcatgaacttttatatgatgcatttattctaatgtgattgtatgaacaagtgaataaaaaaccttggacctcctaaaccac

SEQ ID NO: 8119 - DNA, 328 bp, Homo sapiens
ggaccccggccacgcagctgttcccccacatggacagatggacacacagagcctcggcggccactgctggcacggtgtgagcgccaggcatctcccacccgcccctcccgacggcccaaccaggggctgtgcagacgtggggaccacggaaccgagatgcactttagaccagggagctggcccggcctctggcaggccccccactaacttattttgcccggctgaggttgtggggggcgcctcctggggtgcacgattccctcagctctgggtttaatgtattatatttatttggggccgacagtgccccaataaagggtcagaagtg

SEQ ID NO: 8120 - DNA, 747 bp, Homo sapiens
ccctggtaaggcggatgggctggcagaggggaaggggattgggaggggccgaagtcccccaggtccctaattccccctctcttgctccccttcaggccctgggccccgcctcaaggaagagccagccgtaatggggactctccaggcaccgcctgcccccagcgtgggggtggccactcctgggccccagaaagcctcagagtcctgccgacggagccactggggtgggagggggcagggggcttggctcgcacccccactttcgcctcctccagctcctgccccgccggccgcgcaccgccatgcatgatgggtaaagcaatactgccgctgcccccaccctgcttctgctgcctgtttggggaggggggcggtgaggtgggggcagcggccccgcacccctcctccttgctgatttgcacacattggccgcttcagacacgcacttctggggccagcccctccccgcctcctccctgcctggcggcaggggtcgcgatgatgggctggagcagtttggggcagggggttctgggacccactccgactccccctccccggcatcatttcccctcccgcttcctccggctggacctggggtcccccctccctgtaatgcactcctgccccggcccaacctcgccctctctcaccagccttgaactgtggccacctagaaaggggcccattcagcctcgtctctttacagaagtagttttgttcatgaaataaagactcttggacttg

SEQ ID NO: 8121 - DNA, 172 bp, Homo sapiens
gccattcttccatcatggggttcatgaggattgagcagctgcaggcacacgcctggcttccagcagagccttgcaggtggtggcgagggtggcggttcttactgttcgagtagctcagccctgctgccctctgtggtgatgaggcaagagagcgtgccacctagagcagagt

SEQ ID NO: 8122 - DNA, 284 bp, Homo sapiens
ccggtggcttctcgctgcgcagcctccagggcccgaggtgatcccggtggtgggatccacgctgggcctaggatgggacgtttttcttcttgggcccggtccacaggtccaaggacaccctccctccagggtcctctcttccacagtggcgggcccactcagccccgagaccacccaacctcaccctcctgacccccatgtaaatattgttctgctgtctgggactcctgtctaggtgcccctgatgacgggatgctctttaaataataaagatggttttgatt

SEQ ID NO: 8123 - DNA, 866 bp, Homo sapiens
tgaggacagaccagctgaaattgggtggaggaccgttctctgtccccaggtcctgtctctgcacagaaacttgaactccaggatggaattcttcctcctctgctgggactcctttgcatggcagggcctcatctcacctctcgcaagagggtctctttgttcaattttttttaatctaaaatgattgtgcctctgcccaagcagcctggagacttcctatgtgtgcattggggtggggcttggggcaccatgagaaggttggcgtgccctggaggctgacacagaggctggcactgagcctgcttgttgggaaaagcccacaggcctgttcccttgtggcttgggacatggcacaggcccgccctctgcctcctcagccatgggaacctcatatgcaatttgggatttactagtagccaaaaggaatgaaagagagctctaaccagatggaacactggaacattccagtggaccctggaccattccaggaaaactgggacataggatcgtcccgctatgatggaagtgttcagacagtttataatagtaagcccctgtgaccctctcacttaccccgagacctcactttattacaagatctttccaaatacccaaatgtccctgcaagcccgttaaataattccctatgctacccttaataacatacaatgaccacatagtgtgagaacttccaacaagcctcaaagtcccttgagactccccaatacctaataaggcatgcgaaatgttctcatgaactaccccacaacacgcctaaaactcaaaacacccaaaaatatctcctccaatgtcctgaaacatgaacccaaaaagagacccacaataaactcgtgacttgtcccctc

SEQ ID NO: 8124 - DNA, 133 bp, Homo sapiens
gactcccctggcacctgacatctcccacgctccacctgcgcgcccaccgccccctccgccgccccttccccagccctgcccccgcagactccccctgccgccaagacttccaataaaacgtgcgttcctctcg

SEQ ID NO: 8125 - DNA, 386 bp, Homo sapiens
caccttcccgaggaaactccgctgccgaccctgcctgagcgcgggagcctgaggaccgggtggaggcggtggggacccagccgcgcgccgggagcgctccccggaatgagccgccccacccaccccaaggctggagccgctgcaccctgctgtccctctccaggccttggcaatgacgatcccccaaagagcccgtctgcaccccagacccagggcctcaggcctccagctcctgggatccgggagtccatcccggcccagcacccccagcatccccgtgtatggcccccctgcacctccttgtctcatccccgaagatccgtccccctggcccctcagtgtccatgtcttgagcttaataaatgtgcatttggttttttcctctg

SEQ ID NO: 8126 - DNA, 267 bp, Homo sapiens
gtccatcagaaacaggagctgacaacctgctgggcacccgaagaccaagccccctgccagctcaccgtgcccagcctcctgcatcccctcgaagagcctggccagagagggaagacacagatgatgaagctggagccagggctgccggtccgagtctcctacctcccccaaccctgcccgcccctgaaggctacctggcgccttgggggctgtccctcaagttatctcctctgctaagacaaaaagtaaagcactgtggtctttgcc

SEQ ID NO: 8127 - DNA, 103 bp, Homo sapiens
tctgacgttttctacgtagcttttgtatttttttttttaatttgaaggaacactgatgaagccctgccatacccctcccgagtctaataaaacgtataatcac

SEQ ID NO: 8128 - DNA, 559 bp, Homo sapiens
cgcccgccaccaccacgcagccgccgccgcccacgccggcctctgctgcccccttccccagcccttagcacagagagggacacatgcccctcccccagctgcgtttttttatagtagatttttaacaaaaaacggggagaaataatgcatttctgtggatacagtgcccaccgccctcctccacttggaaacggtatcctccctgcccatccgtctgtctgtcgcccttctcccggccctcactaagccccggcacttctagtggtctcacctggaggcaagagggaggggacagaggccctgccacgtcccgctgcctcctgctctctggaggtactgagacagggtgctgatgggaaggaggggagcctttggggggccacccggggcctggacctatgcagggaggccacgtcccaccccacctcttgtttctgggtccctgctcccctttgggggtgtgtgtgtgtgttttaattttctttatggaaaaattgacaaaaaaaaaatagagagagaggtatttaactgcaataaactggccccatgtggcccccgc

SEQ ID NO: 8129 - DNA, 98 bp, Homo sapiens
aacctacctgccctgcccccgtcccctcccttccttatttattcctgctgccccagaacataggtcttggaataaaatggctggttcttttgttttcc

SEQ ID NO: 8130 - DNA, 515 bp, Homo sapiens
agcgagaggcgcctgggatctgagaggaggctgctgggccttcggggtgagcccccagagctggacctgagctattctcactcggacctggggaaacggcccaccaaggacagctacacgctgacggaggagctagctgagtatgctgaaatccgggtcaagtgaaggagctgggggcagcctgcgtggctgacccccctcaggaccctcgctggcccccactggctgtgggctcccttcctcccaaaagtatcgggggctggggcaggaggggagtgaggcaggtgacagtgaggtcctgggggcctgacctccccctccttcccagctgcccctccctgccagcacccccacgccctcattacggctcctctctaacctcctttaccctcatctgtctggaggggagctctgtctgtccgtgttatttattgctacttcctgcctggtctcctgcccccacacctggccctggggcctgtacaaaagggacatgaaataaatgccccaaagcc

SEQ ID NO: 8131 - DNA, 662 bp, Homo sapiens
cactggatgggctgcagcagaggcactgggggcagcgggggccagggaagtccccgagtttccccagacaccgccacatggcttcctcctgcgcgcatgtgcgcacacacacacacacacgcacacacacacacacacactcactgcggagaaccttgtgcctggctcagagccagtctttttggtgagggtaaccccaaacctccaaaactcctgcccctgttctcttccactctccttgctacccagaaatccatctaaatacctgccctgacatgcacacctccccctgcccccaccacggccactggccatctccacccccagctgcttgtgtccctcctgggatctgctcgtcatcatttttccttcccttctccatctctctggccctctacccctgatctgacatccccactcacgaatattatgcccagtttctgcctctgagggaaagcccagaaaaggacagaaacgaagtagaaaggggcccagtcctggcctggcttctcctttggaagtgaggcattgcacagggagacgtacgtatcagcggccccttgactctggggactccgggtttgagatggacacactggtgtggattaacctgccagggagacagagctcacaataaaaatggctcagatgccacttcaaag

SEQ ID NO: 8132 - DNA, 554 bp, Homo sapiens
gtcctccgggggaggagggtgtagctggcatgtcatcctcagggcgcttcctcgctcacgccaggagggacttggagtggcgagctggggcccgatggggcttgggggcagagtagacatctagcctccctaagggtatgcgcgctaaagcccagctctcgatctcacctccatccccatccacccacacactatggattgggctctgggaaggggtcagggtgagaggctgctctggagaacaatgaggtcctcatagcagcaggcagctcctgtgttttcttgagggtggcagaggagctaagagcagtgcccagggtctgagggggctgcccagtgagtggcaggggcaggagaggggagaaccccatcctcagagctgctcccagccagcgagtcaggagcgggggagacagggctccagggatgaggccgcattctgctcccacagcgccttttccagaaagttcccattgctcaataaatgtggatcatcagagacatttatgaacaatgacagaagaaaaattacccaaataaatgtggaagcaagc

SEQ ID NO: 8133 - DNA, 149 bp, Homo sapiens
aacgggaaggtcctttctttccttcccaggggccggggccggaacatgtgcctcccgttccagcatctggctgcccgggggaggaaggacacccggggcgggcgccccacgccgatgggtccatggtgaaataaaaaacagtgctcacg

SEQ ID NO: 8134 - DNA, 79 bp, Homo sapiens
gcttggtgtctcagacattgatgtaccttttccctgcctcactccaggttttagtgaagtaaacagtatttggaaagtt

SEQ ID NO: 8135 - DNA, 130 bp, Homo sapiens
ggtctgtggccaggcacccgctcccacctggccgggcgctggctcctccctcagttctctttggaaaacccccagctgtccacccatcccctgccccaaaaccagtttcaataaatttacgttcatttcc

SEQ ID NO: 8136 - DNA, 19 bp, Homo sapiens
aaattcccggtcaaacctc

SEQ ID NO: 8137 - DNA, 134 bp, Homo sapiens
actggctgcatctccctttcctctgtcctccatccttctcccaggatggtgaagggggacctggtacccagtgatccccaccccaggatcctaaatcatgacttacctgctaataaaaactcattggaaaagtg

SEQ ID NO: 8138 - DNA, 444 bp, Homo sapiens
gggacaggaggggaaggcaacatacacaccccggactcctccgcatcctcctcctgcttcctccgctgggcctggatggctgcctcacctctcacctcccaacgtccctagcccttacgtccttccacttccaagatctttttccaggttcctgagccctactgtgtctcaggtgtgccctgaaaccccagggcttgtgtgcacatatccttagcccatctttcaagggacctctccatgatcccacctcccattcacagatacctctcttgtagctctctgacctcctccttcatggcaggcatcgccattcttgctgaaccgtttgtgattgccatttgagctctggaagcctctattgccatgagagttctgtcacggtcactttactgtccccatcatcacccagcacggggctaagcatatactagatagtcaataaat

SEQ ID NO: 8139 - DNA, 285 bp, Homo sapiens
cggggtgtcggtagcgtcttagccaagagtccaattaaagaacgaaaagcgggccggctcggcttctgacctggcaccgctgctacggcggcctagcaaattccgccccagaagcgccccaggaagggcgccgagtgccctctcctggacgatcgcgggtcgcagaagcccaggccagcgagccctacagagtgaggacactgaagtgtgcaggagcgaaggttaacagtaggggagattgtcgatctcatcaccataataaagagtttcctgtgccctcccttc

SEQ ID NO: 8140 - DNA, 320 bp, Homo sapiens
ggccgtggctgcccaccacgacccctcacacctcctgctgccgtcgctgccatcttgcccctagcctgggggctccctagcccctcccagagcatctcacccccaccctcatgttcagggtggatgtgggcatgcaggtgacaagggccctgcctccacccctccagcccatccagcaatcgccccctttctgccctgggggcccaggatgtagatattgtacaaaggtttctaaatcccttcttttctatgcacttttttatttaagaggtggggtcccaggtgggaacccccccacaataaagtctgtcaatgtttgg

SEQ ID NO: 8141 - DNA, 155 bp, Homo sapiens
caacttctgcacatactggggccctgcttattctcccaggacaggctccttaaagcagaggagcctgtcctgggagccccttctcaaactcctaagacttgttttcatgtcccacgttctctgctgacatcccccaataaaggaccctaactttc

SEQ ID NO: 8142 - DNA, 44 bp, Homo sapiens
tgttcccaggtccccccacaccagtaaacatcccccagctccac

SEQ ID NO: 8143 - DNA, 393 bp, Homo sapiens
gcaccagctgggaggggccgtccttccttcccttcaccctcactggatcttggcccaaccaaatcccttgttttgtattttcttgaaccccgaccactaccccaggtttctaactttgtaacttgcttctgatgtgggtccctaacctataatctcagcttccctaccctggactgaagggtctgcccatccccccaccaccctccatcctgggggccctcgcacaaatctggggtgggaggggctaggctgaccccatcctcctctccctccaggagcccccagcatgtcctgacctgtgcacggggatggggggacaactcctacccttctttccccacatgccccactaaaccatctgacaacattaatgaataaaatggtgaaaatgtg

SEQ ID NO: 8144 - DNA, 654 bp, Homo sapiens
catctttccaatggaagagtcctgggatctccaacttgccataatggattgttctgatttctgaggagccaggacaagttggcgaccttactcctccaaaactgaacacaaggggagggaaagatcattacatttgtcaggagcatttgtatacagtcagctcagccaaaggagatgccccaagtgggagcaacatggccacccaatatgcccacctattccccggtgtaaaagagattcaagatggcaggtaggccctttgaggagagatggggacagggcagtgggtgttgggagtttggggccgggatggaagttgtttctagccactgaaagaagatatttcaagatgaccatctgcattgagaggaaaggtagcataggatagatgaagatgaagagcataccaggccccaccctggctctccctgaggggaactttgctcggccaatggaaatgcagccaagatggccatatactccctaggaacccaagatggccaccatcttgattttactttccttaaagactcagaaagacttggacccaaggagtggggatacagtgagaattaccactgttggggcaaaatattgggataaaaatatttatgtttaataataaaaaaaagtcaaagaggcaagtgtgtctta

SEQ ID NO: 8145 - DNA, 355 bp, Homo sapiens
cccggcccccttcaccccttcagccgagcccagacctcccctcttcctggagccccagaaccccaactcccagcctagggcagcagggagtcttgaagtgatcatttcacacccttttgtgagacggctggaaattcttatttcccctttccaattccaaaattccatccctaagaattcccagatagtcccagcagcctccccacgtggcacctcctcaccttaatttattttttaagtttatttatggctctttaaggtgaccgccaccttggtcctagtgtctattccctggaattcaccctctcatgtttccctactaacatcccaataaagtcctcttccctaccaggcc

SEQ ID NO: 8146 - DNA, 111 bp, Homo sapiens
ccctcctgcagcttggacctttgacttctgaccctctcatcctggatggtgtgtggtggcacaggaacccccgccccaacttttggattgtaataaaacaattgaaacacc

SEQ ID NO: 8147 - DNA, 174 bp, Homo sapiens
ccaggcgcccccccctctaagggtcctctggccccacggacagcaggacccggacaccctgtgggacctggcctcaaactcaccaaatcgctcatggtttttaaaactctgatggggagggtgtcggggacaccggggcaaaacaagaaagtcctatttttccaagcttgggcg

SEQ ID NO: 8148 - DNA, 82 bp, Homo sapiens
gggcgcagcccctccaccgcagccctgctgcttctgaggacttaggtattttaagcgaataaactgacagctttgaggaatg

SEQ ID NO: 8149 - DNA, 165 bp, Homo sapiens
cacctaaggaattcccctgcttcagctcctagctcagccactgactgcccctcctgtgtgtgcccatggcccttttctcctgaccccattttaattttattcattttttcctttgccattgatttttgagactcatgcattaaattcactagaaacccagaaagt

SEQ ID NO: 8150 - DNA, 513 bp, Homo sapiens
actggagccccagacccgccccctcactgccttgctataggagtcacctggagcctcggtctctcccagggccgatcctgtctgcagtcacatctttgtggggcctgctgacccacaagcttttgttctctcagtacttgttacccagcttctcaacatccagggcccaatttgccctgcctggagttccccctggctctaggacactctaacaagctctgtccacgggtctccccattcccaccaggccctgcacacacccactccgtaacctctcccctgtacctgtgccaagcctagcacttgtgatgcctccatgccccgagggccctctctcagttctgggaggatgactccagtccctgcacgccctggcacacccttcacggttgctacccaggcggccaagctccagaccgtgccagacccaggtgccccagtgcctttgtctatattctgctcccagcctgccaggcccaggaggaaataaacatgccccagttgctgatctct

SEQ ID NO: 8151 - DNA, 1454 bp, Homo sapiens
aaaccccatgaaagccttgaaagtgggaaagctttcattagaaatttgcacctcatcatgccccagaaataatccttctgaagcaaagcaccacgaatgaggttaactttaacaagtactaaaaacttaagggacaccagaaaatttgtactgaagagaaagacatgcatatgattaaaaccctgtgtccaacagagaaacctgcagcagagataatggtgaaagtttaggcacattttcactaaaagtgggaacagaaaatggaggcctgttttttattgctaccaccatagatctggagatcttcgccagtaacaagaaaaattaagttgtaaatattggaaaggaacagacaaaaatagatgacatggtcatctacaactaatattaagactcctgtggtattgattgagcagagcagaagagatttcaaaaaaagacctatgcatttattagaatttggaatatgatacaagtggcatcaggaaatgaggaaataatggaactattttttttaagtggaggtagtttgttctccaagggggaaaaatagaccatgaactatacacaaaagtgaatccagagattaaaaacagaaatatggaaaagctatgtactaaaatgcatatgaccttgggaatagggaaacattccttggaacaatttgagaaatacttagcggttctacttatgagtatgaatgctcaggaaatacgcactaggatatttactgtggcttgatttgtagtagccaaaaattagaaacaactgagaaagcccatcacgaacaatatgggaaattcttatgtaatactatatatctgtaaaatgcaacaaatgaaatccacatgtattaacagaaagatcccagaattgttgaggggggatcaagttgcagaatgatacagatagtacaatgacttttttgtaaatttgaattaaaagtttcctcataaaactcagtactatctattggtaatggatgcatatatgtatgtacatgtttttgaaacggattggaaggatacagaccaaactcttgatagtggtcacctgtgaagagtggagaagggaaaataatgagtgtgggaggtgggatgggtattggttaaaggggacttcagctttttatataaacatccacttctctttcaaaagacttcaagtaaatataagaagatactgattgattctggattgtggtatagggatatcttgtcttattttttgtacttttctgtatttttaaaatttctcaaaataggaatgggagtgaggatgggaatgctgtatctgtggaagtcatgttatactggattcatttccaattaaatactaaacattttatagaaaatatttctaaaattttatcacggatgaatggatggacttgctctctatgtaatatgaaattaatctattttattaaaatttaaaaggacagcacaatccaa

SEQ ID NO: 8152 - DNA, 1046 bp, Homo sapiens
gtaatgtggctttttttgtaaaaaaatgttaagtcatagtaaaccctgtagatgatgttgcttgcaagcgtaatatccaacagtttaaggtactataccacatggtaacctactgtttgccagcctgtaaaacacacacacacacacacacacacacacaaatattattagacaaattagatgacaaaaatcattaagaagtccaaactttttttttattactagcttcagcagacaaaaacttcctctgtcaaggtgttataaacatttaaaatcacattttccatttccatacatatctttttgttcatcagtaataactagttggccaactgactgtggtccatggactacacagtgagtagaggttctttaaaagaaggaggtatgaactgtatttctcattgcaaatacaaaataaaaattagttgttacctcctcacagttgaccatgattctgacttctaacattacaaattagtttttactattataaacctttctataaattggattatatatcatgtattctttcatatacagcttattaccttcatcatgtccgtgagtctaatcattagtacgtgtggcagaagtttatttatttttatccagtatagaattcaattatatgattatatcacaatttatccattctgctgttgatggacttttacattgtttacagcttagggtcataataaatcatgcttctgagaacatacttgtcttggtgtacatacatgtatttctcttgtgtatatacttaggagtggaatcgctgggtcttagagcatgtgtgtattcagtcagatactggcagacaattcagaactttcaccacatgagataattgacactgaagggaaacagctataaattttatcaatatggtgctggttcaaaccagagaattcatgctgcagggaaactcaatcaatgttattgtgaaaactgggaatgtgaatgtaatatatgtagaaaaacatttagccacagcccaaatcttccaggcaaatgtaataaacgtgacattgccgttagcc

SEQ ID NO: 8153 - DNA, 653 bp, Homo sapiens
atgatgtggtttcttatatgaattctttacaagctgttgtaaacatttagttttaaaaagaaaagcatgctgaaacatgttaatgtaattttaaatcacaagtctaataattattaaagtaccatacggaataactgtctactgtttactagcatataaaataagtatgatcattattattgaactctatcagctatgaagctaaattttaaagtcaactgctcttcctactgactcaaatagtttattttttaaaaatacttatataatacatgcagagacaagatacacaatgattataagtattaatctccataagagaaaatatttatgaactatatttctcattgcactctgtaataaaaagcagttagttgttacttacctaagagttaccacttccgtagcctataacatcaaaacgtagtttttgcatgttttcaattttataaatatatattttatcagacatcatgaattattttgtgtcttgcttatttcactcaattttttaagatctgtacattattgcatgtggcagtagtgtattttcattttgcatactattccattttaagaatatattgctgtttatcctattgatggatatttgtattttttatacttttgtgtaataataaaaatactgctgt

SEQ ID NO: 8154 - DNA, 1271 bp, Homo sapiens
aattatgtgctgaaggaaggactctaaacatatgacttaagaaaattcatagtggtgaaaatctctacaaatagaactaaggtacaaatgccttacttatgcttcacaggttagtcagtctaagaatatttatacaggaaaaaaatcaccccaaataaaataaatatttgaagatccttatctatattcattccttcattacttttggaaaattcttacttgtgaatgttaaaaatgaaaaaaaaatcatttattatattttgcctcaactttaaacattggaaaactcatttctgggttaatcctactatattttttcaatggtcttttttttttgtattatacagaattactgattcattgaaaaattattttatttattgcaagtctaaatttatcctttttttctttcctgattatcctaacaccatttattcaataaccttgtccattttcatattttttttattgactatttgatggtaagttacatttttattcacataaagcttggatatcaggtcagtgtttttttgtttttgtttttgtttttgtttttttgagatggagtctcactgtcaccaggctggagtgcagtggtgcaatctcggttcactgcaacctccacctcccgagttcaagtgattttcctgcctcagctccccagtagctgggactacaggcgcccgccaccacgcccagctaattttttgtattttcattagagatggggtttcaccacgttggccaggatggtctcgatctcttgacctcgtgatccatctgcctcggcctcccaacgtgctggaattacaggcatgagccaccatgcctggcccagtgtttgttttttaaatttatatatatgtatctatgtctcatcctgtttatggtcaataactgttacttttaagtatcctttaatacctgtaccttttgttttagaagattgtttactttccttttataaaattatactctccattttagcaaaacagctttccctcatcataatgtagataaaaagaaaaaaaggatatggttacctgtaatcttaccaatcatagataatcactgtcaaacttttggagcaaatcctttaatactatctctcattgttttggaaacaaggtgtgattatgctatactataaccagcccttaatattttttgtctgtaaatatgttgttaccattttattggctttatagtattcacctgtctttatcaaaccccaattttgtcaaatattaaaaattttgccattataa

SEQ ID NO: 8155 - DNA, 459 bp, Homo sapiens
atgaaagaaggcctcttaaattcaacccatgttttacttaaaatatcttggcataagctcaaaaaagccaggatctttatggaaaaattttaatactttgttaaaaggtgtaagactggaataaatggaaagaaataccatatacatagatggaaaaacccagtattataaaaacctcaattctgaaaatctatagactgaatgcagttccaaacaaaatcaactaagaattttctaggatctttcaaaaatgattataaaattcatgtgaaatagaagtgtatgaattgctgcgacaattttgaaaagaatagaggaaacaccctcactgtatgatataaagttatagtcatttaaaaatgtgtgatattagtacattagtaggtaaatgagcagattttaaagaatagaatatccagaagcagattcatgaatatatgtgaactcagtgtatgttag

SEQ ID NO: 8156 - DNA, 689 bp, Homo sapiens
attgtctgattatttgagatcactatgaagaggttctctggttgttagcagcaaagaattctcacaaatgtgaatatgggcgcacatttgcctcataaagcacagcatcagataatttatgtgagagaaaatggtagtgtcattcatatagaaaaacatcattactggaaacctattaaacattagcaaattggagaatagttttaatatagtaaatgtaggaagccctttagccatattgaaaacaaatatctttttcaacgttatcttagctctactagttgatctttttgttatatgtatcatgatacttaacctctaccttggtttaatcattttaagatagacctaagtatattacctttattgtaagattcttggaagtattatgtaagttattacatgtaaaagctcttagaatggtgccttgaacgtagcataccacaaatattagctaccattttcactagtgttattttagagaatttgcatgagaggagagtacttatgagtataatgaatattgagaaatcttttatcaacacatccaagatgacttggttggggggcactgtatgccataatgaatgtgagaaagctgtcatttaaatctcatccattattgctataagaggaaattcatactgttaaaaaaaaaaaaacccagtggatataatcagtgtattatt

SEQ ID NO: 8157 - DNA, 678 bp, Homo sapiens
aaactttatgtgtatagggaatgtggtacagcctttagccaggagtcatacttcatcagacaccagaggacacacacagtgctgtggctttttcagccattgctagataccaaagtggagacattctgtgtgtgattatgcatgagactgtactggtaagacttgtatctccatccacctgaaggagaattgctggctcattttcaggagccctgcccttcctcactgtggatggtgggttgtggaaacccggtcaggtaatgatagtggcaggaggcagtcaaatgcccaggcagataggggtgggtacctggtgaaacccaaccttaaagctgaagacagtcccggctaaatcctcatactgaattgagaacctgtcttcccatttggtgtgctttcctccgattgatcccaacccttcacctattttacgtatacctgccctttcctaattggtttttacactgctgtgcccaccttttgagtggtgcctttgcatacttacaaatcagtcaacgtgtattcccctattctgagcccataaaagacccagactcagctgcagtgaggagagaaatcaccctgctgtgggggttggggaccactccctgcatcccctctccactgagagctgttcttttgctcaataaaattcttttctacccatcctcacccttc

SEQ ID NO: 8158 - DNA, 107 bp, Homo sapiens
atcctgagtcctaaatgtttctagaatttatactgttttttatctttaatgttgtcaccttggtctgattcatctcactctgattactaatatagctttcaaacagg

SEQ ID NO: 8159 - DNA, 5458 bp, Homo sapiens
gcaaaatatctggtttcatggtatgtagggaattttttttttttttttttgagttggaatctcactttgtcacccaggctggagtgcagtggcgcgatctcggcttactgcaagctctgcctcccgggttcacgccattctcctgcctcagcctcccgagtagctgggactacaggtgcccaccaccatgcccggctaattttttttttgtatttttagtagagacggggtttcaccgtgttagccaggatggtctcgatctcctgaccttgtgatctgcccgccttgtcctcccaaagtgctgggattacaggcgtgagccaccgcgcctggccggtatgtagggaatttatccttaggagaaatcttatcattttaatgaatttgaacagtgtgtttttattttatttatttatttattttgagttgtattctctgtttcccaggctggagtgcaatggcactatctcggctcactgtaacctcagcctcccaggttcaagcagttctcctgcctcagcctcccaagtagctgggattacaggcacctgccaccacgcctggctaatttttgtatttttagtagagatggggtttcaccatgttggtcaggctggtctctttggctaggctggtctcgaactcctgacctcgtgataccccccaaccccccgcccttggcctcccaaagtgttgggattacaggcatgagccaacgcgcccaaccgacagtgttgtatcataatggaaatcatgatctaattgtgatacaaacttttctagaaaatactttctcaaacataagcatggacaccctggcatgtaaacgtttaaaaatgtattaaatggaataacagcagaatacaaaatatctgtgaagagacttaaaggcatactctggtatattccacagtgagccatacaatcagcattatttgtattttggagttgtaaatgtgaaattaacataaaatgtgaatatcagacacatgtcacacaacatatagaatgccattcagaaaacttttccactttaaatatcatcattgtcttttgatgtcttaacaatacaaaaaaataacaacaacatggcccactattgttaaaagaactttattataccagctacatttttccacctttttgtaatacatgtaaatggctatagaggttgttactgtcctctgcagaaataataaagcagtgtttttaaatgtatttggataatttggccaaaaattttactaaaatgtagttatttatattaaaaatgcaagctaaggaatagtttaagaacctgatactgggtaaatgaaacactgtaaactatttgacaaaatgtagtgtcaccctggtgtacagtacactgttcatattttcttagtcttgcttaaaatatcttgtagcaaattagtagcattgctacactattctagatacactattctatatacaggttgtataactcagaaatgtttcatgcgtagaccactgaaggagaatttcttttctctctatccctctgcaaattaattcaagaatattcatttttttcatataaatttccttgcaagtgtcctagacactaaatcccaaggttttaattatttcaatgtttggaaagaagtctgcttccctgagttgctatgtcatccatattagaaaataaatggccatgtggaatctacatttttcaagatttccctccatgtaagactgcctgatccagaatgagaaaggagacataaccacagatatcaatatgattttttaagtgataaaaagatacctcatacaactctaatcaacatattttttaaaaagaggaggtggatgcttttctaataaacttaagttatgaaaactgcaataagaagtagaaaacttggtaggatagttaacattgaaaaactcaaaaaagctattaaagatctataatgggaaaatgctccaggctcagaagagttcatgcttagttctatcttttaaagaaagagtaataccagtgttatttattatatggatgtaatacaatccatgaactgtactcatttattttattaagtcagaataaattttaacaccaaaatcaaatacagatagttgaaaaaagaaaacttctgctgggtgcggtggctcacgcctgtaatcccaacactttgggaggccgaggcaggtggatcatgaggtcagaagttcgagatggtgaaaccccatctctactaaaaatacaaaaattagccgggtgtggtggcacacacctgtagtcccagctacttgggaggttgaggcatgaggcaggagaattgcttgtacccaggaggtagaggttgcggtgagccaagatcgtgccatccagcctgggtgacaagagcgaaactccgtcaaaaaaaaaaaaaaaaaaagaaaacttcagaccagtcttactcatgaatatagaaacaaaaattatagttaaaatactagcaaatagaattcagccatatacccaaagagtgacatagtaagagtcatcccaagaatgccaaaccagttcagttaataggaaatgcatcaatcaaattaacagtttaaaggagaagaatcatatgaactctcaacagatactgagaaggcatttcatagaatgtgttaatttacattgtaatagatgggaaccacttaaagcggtttttcttaaaaaaaattttttttaacccaaaccccaaagcatatattatgccaaagccattttttaaaatcaggaattcaatattggcttagagattccagtgaaggcaataaaaagaaatgaattggtataaacagcagaaaaggtaaaactatccatttttactgatgatatggttgtacaccaataaatgaaaagactattttttgagttaacttttctaagaagacagggtaccaaaatcaagagctgttctccatactgacaagaaaacataatttatatgtacttcttttggaattacactaaatctcaatgattttttgacaatcattgaaaaaaatatatgaaaaaaatcataccatgtataaaaacatcacatgtacccaataaatatatacaacaattatatatctataataattaaaaatttttaaaatgccatgctagataccagaagataacatgaagccattctaatgaaattaatattgtattggcaaaggaacaggtaaatacatcattagaacacagtagaaaattcagaaatagacttcgatatatatgaactttttcatatgtgaaaaaggtgaaatctgaaaccacaggggaaaagagtagtttacttaaaaagaattctggaacagaaccttttaatcttaaaggaagaaaatttggattaacagcacaaaaataaattctgggtggctttaagacgtaaaattttaaagcaacagaattcttaaaagaaaatcaaaggagcctatgtgtacaatctaggagttgggagatattaactttaccaacacaggacactcagaagctatttagaaataagcagttgaaggctgggtgcagtggctcatgcctgtaatcccaacactttgggaggctgaggcaggaggatcacctgaggttaggagttcaagactagtctggtcaacatggtgaaaccccatctccactaaaaatacaaaaattagctgggtgtggtggcacatgcctgtagtcccagctacttgggaggctgaggcaggagaatcacttgaacctggaaggcaggggttgaagtgagctgagattgcaccactgcactccagcctgggcaacagagcaagactccatctcagaaaaaaagaaaaagaaaaaaaaaaggaaacaaacatttgactacgtagaatcttttggtacaatcttttgggtgacaaaagatgccatcagcaaactcaagagataatagattgtggggaaatatttgtaaagctgatcagagagaaggcattcatgaaatggacaggaaaaaaacccaatagcaaaatgtggcaaagaatatgagttgacagttgtgagaagagcaaatctaagtggccaatggacctgtccaaaaatgtttatcctcagtagtcactgggggatgcagatttaaagttaaaatcaaataacactgtgtaacagcatttttagctatcagaacaaaagatgttacacactgctggtggagaaataaattttgaaaaacaatgcaaattactgttttggaaagaaatctggtaatatttaggctgggcgtggtggctcacacctgtaatcctagcactttgggaggccgaggcaggcaaattgtctgaggtcgggagttcgagaacagcctggccagcatggtgaaaccccgtctctactaaaaatacaaaaattagctgggcatggtggcaggcacctgtgatcccagctactcgggaggctgaggcaggagaatcacttgaacccaggaggcagaggttgcagtgagccaagatcgcgccattgcactccaacctgggcaacagagcaaaaagattccatctcaaaagaaaagaaaagaaatctgttaatattattaaaatatttatgtcactttggagaatcttcccttagaagtaaaagctccaatacataaaagacagatgaacatgtgaacatggacatttattgtaaaaattgttcttaatggcaaaaaaacccccaaaaccaaagcaaacactagaatcaaagtaaatacccatcaactgggaaattgtagaaaggaaaaaactatagtgtatccattccatagaatgttaatatagccattaaggtggacaaattaaaactatgctagtggacttgagtggaattccacaatgttctcttgagtgaaaaatgcaaggtagatattaagtatgttaaatatgactccatttttttaaatcattaacaaaatgtctctaggtgtttgtcagcaataaacggtatctatatatgtttatttgattttatgtgcatgaagaaaagtatagaagagtatgcattgacttggagggaggtgggtaatgcaggtaggttatgggggagtcaggggtgtagggaaaaggaaaaccaaaaaagaaaaatacataaatgactgaatcacgggtgataccacaaatgtgtgagttagtaaatttggctggggatgggggagctagaattttgctaatttgtggggatgttcatggtatatattgtaaaaagggaaaatttcataataatgtatacgattctatttttaaaaaaagtaaaaactcctgtgtgtgtatatatgcatgtggatgtttatatgaacatagaaaagtgtagaagaatacacacgaaggtgttaacattcattggttaccttggtggagaagggtaataagttttctgaatacctttgcattgtcttgttcacatatattgcttttgtaatttgaaaaacaaaataaagggggaaaacatttcaaactgaatgaa

SEQ ID NO: 8160 - DNA, 830 bp, Homo sapiens
tataagaaaaggtttccatgtcatgctctatttatagaatatcaaaatatttatggccagaagttctgtcaatgtgttgatgtttttttacacatattaacttaataaatgtatgagtcttaaatacctcttagttctcattaaatttaggaaaattcacactagaaaataaagctgttaatgtaacagttgtggaaaagtgttctagcaacagcatatacttatcatcattgcctttccactactctactatctgtgtgatattagacaaaatatttgcttcttggtacctcagctgtaaaatgaaacacacctaaaagtgtggttgtttccaacatgtataatacagcaacaactatctggcccaaactgctttggattaatattggatattactgtttttattatcatcaacattattattagtggatttcttaataggaagatgcaatggagatgacaaatttggaaaaaccactcatcacttacatttcatgaagtacttctttgataaaatctgttatgggctgaatgtttgtgttcccgtaacaattcctatgttgaaacacgaatcccaaggtgatggtatttgaaggtagggcctttaggaggaaattaggtcatgagggtggagccttcatgagtggaattactgcctttataagaagaagccaaagagccagctagctctttcaaccacatgaggttacagcaagaagtcagcagtctacagtgcaaaagagggccttcaccagaacccaagcatgctggcaccttgaccttggactttcagcctccaaaactgtgagaaataaacctcagttgtttat

SEQ ID NO: 8161 - DNA, 2126 bp, Homo sapiens
ggtgggaggccgccgcccgccttcgctccttcccctcaggccgtggccctgctgcctctctccctccactcagctcccagctgccggtgtgaccaagatgacccatccagggccctccccatggacacggaaactccgatggcctcactagggctgtgagtcagggtcagcgcgcacagccctcatgccccagagggcgaagtggtctcaggcctccctccaagctgcccagctgtggtcccggtgagctgggctgtgcttacaccgctcccgggcctgccccgctgtccccatctagcctcttcctgggaccagcccttcgaagctgatggggacggagagaggagccagtctccagacgcctcggctccaggaggtcacacagcaggtttctgcaccacgcacaacaaagttgcggcttgtggggccgaggcccctgcatgaaaagtacagcgtgaaagcaaccctttcttccccacacccagagaggtgaggcccgcgtggacacagaccagggcgcctcggtccctagcacgtgagctccaaaaagcacgaacatgatcccctccctaaccccctcctcccaaaaagcagccaggagcactttcttagagtttaaattattttcttgggggcctgaggatagagagaggcaaggctagcctccagagccgatttatttgagagagaaactctatttggatctccaggacggtttatacgatctttttctatcagctcctcttccgccagaggccactgcacctgggctaggggtccacaggcccctccaccttccagctaaccaggccaggccggggcggtggagccaccacacagccgactctctcctcctcctcccggcacgacctggccctgaccagcagcctcggcctcttctgggttccaggaggggctcccgaagccctcaggacagggctggaggagaacagccttcatctcctcctctggtttttttttcctttgcaagtctcccagcccatctctccgagcagcggccaccagaccccctcaccatgctccccggggagcactgcaccccgcgaaccccactggacgctggttctctaaaggcaataaggggcggccatgccggtgtggtaccacgctgttcctccaggaaaccgtttctttttttccttctttaaaagcaaacagaaaaagatatatatatatatatatatatatttattttttcatgtagagttggcgccagaacaagcctgtatggccacagtctgtggattcatccccccaacctcaagctgaggaccaaggcgtgtcccctgtgggctgggggtcagtgggaggaccagagggatgaagtcagggcaggccggtgccctttttgggaggcaccaggcggggaggagttggcggagcaggtctggctgtgagccagcaccaggcaacccggcccttgtccagggacctctgctgccttctctctggggtcaggaacctcagaggagggggctctggggactgcataggacgcaggcactcggaggtgccggtgtggatgggtgggggtgagagaagagggttcttatcgcgtctcctgtgatcagcctctggccccctggaggaggaaacctcagcgctgcccctgcccccaccctcacccccaacaccaagagtgaggtgggcgtgccccaggcagcgtcctcagccctggccagctactgtgatgccatcttctcccccatccccttctctggggggcccacccgtcccccacccccaccccttagaccctcatcgggtccctttttttttttttttttcagttgtctcctcccatcttcagatcattcgaatcattttggggacttaatcatgtacatggacaagtgtaaattatgatttttggttttgttttctgttattttttaaggatttctgcaaaaacagatctatttaatttgaggttgatgttctatccaatggccgaagatagcagcaggttttttttttcatatgttgatttgtttcatttggattttttttttattattctttattgtcttttttttttccccatccctgtcttgagattttctggcatgtttctggaggtttcaaaggaaataaaggtttcatag

SEQ ID NO: 8162 - DNA, 462 bp, Homo sapiens
ccgccctgtcgccaagaggactggggaagggaggggagactatgtgtgagctttttttaaatagagggattgactcggatttgagtgatcattagggctgaggtctgtttctctgggaggtaggacggctgcttcctggtctggcagggatgggtttgctttggaaatcctctaggaggctcctcctcgcatggcctgcagtctggcagcagccccgagttgtttcctcgctgatcgatttctttcctccaggtagagttttctttgcttatgttgaattccattgcctcttttctcatcacagaagtgatgttggaatcgtttcttttgtttgtctgatttatggtttttttaagtataaacaaaagttttttattagcattctgaaagaaggaaagtaaaatgtacaagtttaataaaaaggggccttcccctttagaataaatttcagcatgtgctttc

SEQ ID NO: 8163 - DNA, 42 bp, Homo sapiens
agggccctggacagggctcattaaaccttcctctctgccttc

SEQ ID NO: 8164 - DNA, 1600 bp, Homo sapiens
ctggggcagcctctgccaggcttgggtgtgcctggcctgggactgaggggtccaggcgaccagagctggctgtacaggaatgtccacgagcacagcaggtgatcttgaggccttgccgtccaccgtctctcctttgtttcccagcatctggctgggatgtgaagggcagcactccctgtccccatgtcccgggctccactgggcaccaacataaccttgttctctgtcctttctctcatcctctttacactgtgtctctctggctctctggcattctcgctgcctctgtctttccctcttgctgtctctgtttctcattctctttcatgttccgtctgtgtctctcaattaaccactcgtcaactgctgattctactgggctgtgggctcagacctcatttcaggcaccagattggtcgctacaccctggacaagtgactgcccgtctctgagccttgatttcctcagctgccaaatgggaagaatagaagaatttgcccctaaacccctcctgtgtgctggccctgtgctagacagtgctggagacatagttgggggtggagaactgcccttatggagcttgcagtccagtgaggtggacagacctgtccccagacagtgatggcccaaaatggtcaggactttaatggaggaggtgaggtgttgaaagcacaggcagagtggtcagggctgaagtcggagaagcatagggactaggcccaatccagcctggaaagtcagggaggacttcctagaggaagggacatcgaactaagacctgaactatgagaaataggcaggaagaagttgtacctgactcatttttctcaggtgtctccagggagcaggacccatggagggacccctggtgtaggcctgggcgatagactcttcctcagcagcctggcaggcaggaaacagacataggaccccagcccagatctgaatggcatgggaggtgctgcccttaaccatgacaccattgtaagagctgtccacatttgtatgttgtgccctggaatcagcctggttgagctcaaatcccaacttagccacgtctggcctgtgtccttgggcagtcacactacctctctgattttgtttccttatctgtaaaatggtgatcatcataatacaacttcaaaaggatttcaggctgagtgtggtggctcacgcctatacacccagcactttggaaggctgaggaaggaggatcgcttgaggccaggagtttgagactagcctaggcaacacagtgaggccttatctcaacaacaaccacaaaatctaaaaattagctgggtgtggtggtgcatgcctgtgatcctggctacttcagaggctgaggtggaaggatcacttgaggccaggagtttgaggctgcagtgagttatgatggcactgctgcactccagcctgcgggacagagtgagaccctgtctgaaagaaagagagaaagaaagaaagaaagagagagaaagaaagaaagaaagaaagggaaagatggaaggaaggaaggaaaaagaaagagaaagagagagagagagaaagaaaaagaaagaaaagtaagaaagaaaaaagaaaaagaaagaaaagtaag

SEQ ID NO: 8165 - DNA, 150 bp, Homo sapiens
gtgtcccacctgccccagcccccagttactgtcacgcctctcttatgaggcccatcttgaagatgcaacctgtcacccagcccaggcctctctttctgttttgcttgatgtttacttctcgttcagactcaaataaagccttttttcagg

SEQ ID NO: 8166 - DNA, 433 bp, Homo sapiens
gccccccgggcactgggtggggcagggcacgagttatttaaaacagttacactgcagggtttcgcccaataaaggtggactgacattccctcttccaggcccttgtctccccagttgggacggcagagagacaagttcttatatctgaagaacttggaggttttggggcattcaggagttggagatagcctccaactgggtcagcctctgtctggtgggcattgctcagggtctcaaacatggacgcccactgtggggccccagcagcactgtggcctgcaggagggcatggccccaggtagggggactgttctagccagctgtggacacataggaatgctggaccagggtaccagattttttcaacaaagggggtgaagtgtcctactaaaaagaataaatgttggcagtgaattaaacaatttttcaaatg

SEQ ID NO: 8167 - DNA, 206 bp, Homo sapiens
agggggactggtggtcgggggcggggggtcctccatgagatgctaatgctatcggtaatctctggggagtccgtttaaggctttccttggtatttggcacccaagccccccatctcctattcctgagtccccaaatgccctgctcccattcacgtcaataccaagaaccatgttctccagagaataaatttaatttatgacagctg

SEQ ID NO: 8168 - DNA, 143 bp, Homo sapiens
cacacccccagctggccctccacccccacctcaagtgccttattctcacagcaagccccttagtccccaagcccctccccctaaggcagctgggggagaggtgacctagtactggaaaataaatctgtgctacgccccccagc

SEQ ID NO: 8169 - DNA, 35 bp, Homo sapiens
cttcaggtgtttaataaagatgtgttgactcagcc

SEQ ID NO: 8170 - DNA, 1098 bp, Homo sapiens
ggccccagagacctgacccaacacccccgacggcctccaggaggggcctgggcagccccacagtcccattcctccactctgtatctatgcaaagcactctctgcagtcctccggggtgggtgggtgggcagggaggggctggggcaggctctctcctctctctctttgtgggttggccaggaggttcccccgaccaggttggggagacttggggccagcgcttctggtctggtaaatatgtatgatgtgttgtgcttttttaaccaaggaggggccagtggattcccacagcacaaccggtcccttccatgccctgggatgcctcaccacacccaggtctcttcctttgctctgaggtcccttcaaggcctccccaatccaggccaaagccccatgtgccttgtccaggaactgcctgggccatgcgaggggccagcagagggcgccaccaccacctgacggctggggacccacccagcccctctcccctctctgctccagactcacttgccattgccaggagatggccccaacaagcaccccgcttttgcagcagaggagctgagttggcagaccgggcccccctgaaccgcaccccatcccaccagccccggccttgctttgtctggcctcacgtgtctcagattttctaagaaccaaaaaaaaaaaaggaaaaaaaacacaaaacaacaaaaaccaaaaaaaaaaaaaatcacaaaaacaaaaaaactataaaaaagaaagaattaaaaactttcagagaattactatttactttattaacttacggatttattatataaatatatattcacctagcaacatatctctgccgtctctcctgctctcataatgaagacatagccgattctctgcccgggccccttgctgatgctcctccgggtctgcgtcgggcgtgggtctctggggaccctccagaggtggaggtgggctgatggcctggctgcctggtggttgatggttttgctccccctaccttttttttttgagtttattctgattgattttttttcttggtttctggataaaccaccctctggggacaggataataaaacatgtaatatttttaagaagg

SEQ ID NO: 8171 - DNA, 59 bp, Homo sapiens
gcagaagcccaggcgggcccggggccttggctggcaaataaagcgttagcccgcagcgc

SEQ ID NO: 8172 - DNA, 1186 bp, Homo sapiens
accggcaggcaagaagcccaagaagataattaggcaccgaccttgggctgctgttagagaactcaggcagcagcgccagtgacacggggcactagtcaggagagacctggacaggggtggtgggaagagcttgggcagaagtggctgaaaaactaaggcagtggcaaaggtagaactcaggcaggggtggagaaaaggcgttggtcgcagtgattggtgaacacagcgggggtgggtggtagcgctgggggtgattttaggcagcaagaattggagaactcacactgcgaaaagaaaaccttgggtggcagtgatttgaacaccggcagtgctggggcaggacccgagccagcggtggggagagatatagtcagagaacccagcaatacagatccgtccttgggcaaggcgcggtgctggatgatgggtgcggaggaatttgggtaaaggcagagggaaggggtggaggagggccagctcagttgccgaaactctggagtggcggctggctagaaattggtctgtagaaatgaccttgaaaatggagttctggccaggtgcggtggctcacgcctgtaatcccagcactttgggaggccgaggcaggcagatcacgaggtcaggagttcgagaccagcctggccaacatggcaagaccctgtctctactaaaaatacaaaaattagctgggcgtggtggcgcatgcctataatcccagctacttgggaggctgaggtaggagaattgcttgaacctgggaggtggaggttgcagtgaacctagatcacgccactgcattccagcctgggcaacagagcgagactccatcttaaaaaaaaaaaaaaaaaaaagaaagaaaagaaaatggagttctgagagctaggaaactgggaggttgagccaggagcaggggaacttgggctttgaggcgagacctaattcttagggtgctctatgaggacatgggtggtgggcaaagtgacagccgcctgagcccctctgcctggtcccctttgcccccaggatgaatacgacgacattgtggttcacagcagccgcagccaaacccggctgcctcccaccccagcctcaaaacctcttcctgacgacccccgccccgtgtgatttgtttcattgttaatataatttccagtttaataaacaaaaccctagttctgacaaccag

SEQ ID NO: 8173 - DNA, 317 bp, Homo sapiens
cggctgggggcacagtgggctgggcgcccctgcagaacatgaaccttccgctcctggctgccacagggtcctccgatgctggcctttgcgcctctagaggcagccactcatggattcaagtcctggctccgcctcttccatcaggaccactattaagccataggagtcctgggggtgcaaagggtgcccctctgtcaacacccttggctcctgtgtttagaggggtggcctgaaggaccttttctgctgggacaagacactgtactgccctctgctgggaaggggttttaataaacagaccctggcgcttgtgatgt

SEQ ID NO: 8174 - DNA, 720 bp, Homo sapiens
ggatggcggcagctctcctccagaagcctaggttttgccgccttggctgctgtgaccagaaactgcccaggcctgggtggggagttgggtgggccctgactcccctgccctccagaggccccatgtagggtacatgcagccctatggagctggggcagctgttccctcctggagaggtgggagtcctggctggctgtggagggagggcaggtgtgcgggcacagagtgacacacggcaggtttctgctggcagggccccaccctcctgcatagctctgatcgggcgaggtgcccacggggcttcaggaatgaagaggcttaagctctggctccatggattctgcacatctgcgggggatgccgctgggcttcctcctctcctgcccacctggcaagggcatcgccaggtgggcacaaccgtcatgacactactcaccagcaggtggcgtcaggggctttttcttctgagcccggcactgagagttggtctgaagcctggctccttcttcactgctccaggactgctatgaagagtcccttcatgcctcagtttcccagcctggcaccatcttattcgggaagaggagacgtgttaacactcttgcctcctagctaggacagatgacaaaccgcaagagccacagacttgccagttccttccctctttccttcctttctttcccttcttttatttattgaatcataatttattgagcatct

SEQ ID NO: 8175 - DNA, 827 bp, Homo sapiens
ggcccagcgcccttcccctcaaccaaagagccccccgggtcacccccgccccactgaggccagtagggggccaggcctcccactcctcccagcccgggagatgctccgcgtggcaccaccctccttgctgggggtagatgagaccctactactgaactccagttttgatctcgtgacttttagaaaaacacagggactcgtgggagcaagcgaggctcccaggacccccaccctctgggacaggccctcccccatgttcttctgtctccaggaagggcagcggccctcccatcactggaagtctgcagtgggggtcgctgggggtggagagaacactaagaggtgaacatgtatgagtgtgtgcacgcgtgtgagtgtgcatgtgtgtgtgtgcaaaggtccagccaccccgtcctccagcctgcaaggggtgtctggcgccttgcctgacacccagccccctctccccctgagccattgtgggggtcgatcatgaatgtccgaagagtggccttttcccgtagccctgcgccccctttctgtggctggatggggagacaggtcagggccccccaccctctccagcccctgcagcaaatgactactgcacctggacagcctcctcttttctagaagtctatttatattgtcattttataacactctagcccctgcccttattgggggacagatggtccctgtcctgcggggtggccctggcagaaccactgcctgaagaaccaggttcctgcccggtcagcgcagccccagcccgcccacccctgcctcgagttagttttacaattaaaacattgtcttgttttgtg

SEQ ID NO: 8176 - DNA, 1126 bp, Homo sapiens
ctggctggctcctctgtcctgaccccacagcacctccctgacctttaggagccccaactcttagtcacctcctaggcctcttatttctccctggcccttggcttctcacttgatggacagcttcacacacccttaagcggtggactccagcattttcccagcactgtctgagccccatgagggcggagccactccttgtaaattcagtgcccgacagatgctctggcacagatgctttgtagatctctgttgagagaatgcatagacacctgtgcccaaggatgctgagggctggtctctgcttctttgaacttcactgaaactgaatgctcactgctgtgttgccagcaccacccagcccagggctgtgaacggagtgggtggcagcaaatgtgtgttgaaaggggaatgaagccattcacttcactcagttcctgtcccatttaaccgccccgatccttgatcttccattaccttcacatcccggggtccttctgaactgaccttgacctctgatctcttcacacatctccccttagcatctccacttacctacttttttttttttttttgagatggcatctcactctgtcacccaggctggagtgtagtgacacgatctcgactcactgcaatttccacctctcaggttcaagtggttctcctgcctcagcctctcaagtagctgggattacaggtgcacagcacctcccccgactaatttttatatttttagtagagacgggatttcgccatgttggccaggctggtctcaaactcctgacctcaagtgatctgcccaccttggcttcccaaagtgctgggattgcagacgtgagtcactgcgcccagccattccatgtctcttaagtctcagaatctcccctagctccctccaggtgtctgcagtggttgtcccctcaaagctgtcccacaccctcctccgaggaccctttgtgtatctcctccagctaccgcagagcccacaaacccaggcatctatcaaagtccctcattcatgagggtggtgaggacacagactgcgaccagaacagaaatatgaaaatgtgaatgacagcgtcccccgtgtgtggaatgtggggattaaaagcatttatcaacctct

SEQ ID NO: 8177 - DNA, 79 bp, Homo sapiens
ccctcccaccagtcatgcaacctgagattttatttataaattagccacttgtcttaatttattgccacccagtcgctat

SEQ ID NO: 8178 - DNA, 155 bp, Homo sapiens
caccccacaccttatttatgcgctgagccctactccttccttaatttatttcctctcaccctttatttatgaagctgcagccctgactgagacatagggctgagtttattgttttacttttatacattatgcacaaataaacaacaaggaattgg

SEQ ID NO: 8179 - DNA, 1368 bp, Homo sapiens
cgggacccacagcccagcgcacccataggctccctgggcggcgggcgggggccaacccccaacgggcttctccgcgacagcgagagggtgggctggctcagctatatattctaatatttttctactctcttaccctcttaacttttgtttaacattggcacatgccttgctcactcccaggcccgtcgagggatctctgctgaggcccggggagttgggggcagccaggataaagggggcagggactggccagactgcctgcctctctcctttccttcctcatccccacctggtcccatcccacccctgcctcctccagaccgctgaccacctgcctctccccaagggagcagactccccagagacaaactgaccactaccttgtggagcctgctcagaaacatttgacatttggggtgacgcgcagggcagagaacctgccctccagaatgttattgagaggagctggggagaaggaaggggagcaaggagaggaagctctctctcctctccctgcttccccttcaccattccccacattctgcaaggacaggagccaccttcctctctctcacctcccctggccctgttcaccagaggttctctatgattaatttcttaggcctatttaagatacatatttatatagttcttaacggtttttctctgatcatttcctctcatttttagaatccccaggtctctctcagccaagacagtggcagggagagcctgaactttatgaggggagagggcagagccccctcctccagaccctcaagctctaacccattttcctccagccctggctacccggatgaagaggttggaggtgggcagccagggtagccagtgaggtcaggaagtctgttgccttaacgtccccttccccacgaacacacacccttctccgctcccaggtctggttggtgagacttgggagtcaggaataagggaaaggggattgtttggtttttgggtttttccctaagcccctcccttttctttcagcctttttccttcccccattatgtcatgacctcacttaagtggaacactatatcataacccagagattcgtcccagccccagagtccgacagactgtctggtccctattcctaatgaggggttgtgttggggcccaggtggagggaggggatttgggggttcagactgcggggaagccagggtctccctcttcaacgccctcctccccctcaacccaccttcccaactgggacattctcaagcttttcacaccgaaaaggaaaaaaaatgttatttttagatacattttatgaataacttttgttatgaatatggctggtaaccattgtgtatgttattaaagatacaaaatgttggg

SEQ ID NO: 8180 - DNA, 2862 bp, Homo sapiens
agtgggggacagggagtggggcaggcagtggttggtgggtggtgtgcaaagggaatgaagagcgtcctgggcctaaacacagcagcctcctctcttcctgcctgagcaccgcagcgggagccagcagggggcagcagaggccaacagggagctcgcaggccgggcccctgcgtccctgccccttcttcctgctccccctcctagcctagggtagactttgaactgtgtgtgttgatgacttctctgttccacaggccctcccccattcttgcctgggtgtggagccctggctgtcccctctccctcagtccttcctgactgtctccagctgggaggtggtctctgtgtgccactcctctgtgtctctattacagttgtgtctctctcatcctgtctctttttcccttgtttctctgttcctgttaatgtgtttctccccatggtcctatttctctcactctgacctctctctcttagtcccctttagctgtcttctatccccagctcctaactgggactctgtgtctatgcagggggccagcacccctgggttatctggggctaagggaagggacttcatttccaggggccacagccaagcccagagtcccccagcggctcgcatgtcagcccagaccccagggtccttggcctaggagaggagcagtggaggggcccaggctctgagctccacaggtctgagcagggagcaactcaggcccccacccaagcctgcgtcagcggaacttgagtgaggggcgttgtgcaatttgtggcaaggctggcccagctggatgcctgggtcccagtatttttagccccaaaggagaagtgaaaaggccccagccggggtgaatcatcagtcctggggaagaacccaggcgcctgagccccagctccgggaagcaggcactggggagggggcttcaaggagggagtgccccctcagactccctgcttccctggaagcttcaggaagctcagcctcagccttcaggcctgagcaagtgcagggcggagctaccagcccaggctcagatgttggggtgtgaaagcctcaagtgactcagcctggttggagaactgccccacccagtatcttctgtgccatggttcccacattcgcactccatggcctcctgtcctggaccccacgtctgcaaggaaaccctaggaccatggatacctctgtgattcacgctgagcccaagtccccacactggaaaactgggaaatggccagctgtgtgtcccaggaaattcctccccttattcttccttgaagtgcccgagcatgtagggcaagaaggaaggctgaagcgctgtccctaggaggaatttctccttcaggggagcctcagttttgcccatttatctaattgaatcagttttttacccaatcccccgattttgtaggataatctcccttatctaaagtcaactgattatggactttaatcacatctacaaaacacttccatggcgacagctagatgagtgtttgaataactgggactgtagcccgtccaagttgacacataaaactgaccatcgggccgggggcggtggctcacgcctgtaatcccaacactttgggagcccgaggcgggcggatcacaaggtcaggagttcgagaccagcctggccaacacggtgaaaccccgactctactaaaaatacaaaaaattagccgggtgtggtggcacacacctgtagtcccagctactcgggaggctgaggcaggagaatcgtttgaacctgggaggcagaggttgcagtgagccaagatcacactattgcactccagcctgggcgacagggcaagactctgtctcaaaaaaaataaaaaactgaccatctagtccttgtcatctgggcaccctcacacatctccttaaccacacttaatctccaaataagtacgataacatagtcatagtcccacccaacatgatgcagttatcttgcatacaactgaagacaactaaccctttccccaacagagcccaccagcagtggtggagatgtcggtccatgagcgcacacacaagactgagggactgtcggccctcccaggtggtgtcaacacaacatcacacacaggtgggggggcctgatagcccagcacccatgatacagggcctaccaatgcttaaaaccacacccagggagcccacagaggcactcagtgggtggtggggtgatggatacacatctatcaggcacagggcggaggtgggcaccactgagttgcactcagcaaacacattgggtatcttgtgcccaaggcctgtatttgtggagctgatgttctagtgagagacagtaaatgtgacaaaagtaaaatatatcagatggtgagaaaacagaaaaatgagatcagaagtggagatgttggggccaggcacagtggcccaggcctgtaatcccatcactttgggaggtgcaggcaggcagatggcttgagcccaggaattcaagaccagtccgagcaacatagcaaaagcccttatctgcaaaaaattcaaaaattagccaggtgtggtggtgcgtgcccaggttcccaggtactcggaggctgagaggtgggaggatgccttgagcttgagaggttgaagctgcagtgagctgtgatcgcaccactgcactccagcttggttcatggagaccctgtttttttaaaaaaagaagtggaggtgtttacaccagcaaaatactcattttttaagtgtaattaagttgaagatcaaaaaatggaaatgtataattaaatcatacttagcaaatctaacacatgaaatgtaacatctgcatatggagaatcgtgttactttattgaaaaacattaaaagtttgagaactt

SEQ ID NO: 8181 - DNA, 706 bp, Homo sapiens
caaagtgactgcccggtcagatcagctggatctcagcggggagccacgtctcttgcactgtggtctctgcatggaccccagggctgtggggacttgggggacagtaatcaagtaatccccttttccagaatgcattaacccactcccctgacctcacgctggggcaggtccccaagtgtgcaagctcagtattcatgatggtgggggatggagtgtcttccgaggttcttgggggaaaaaaaattgtagcatatttaagggaggcaatgaaccctctcccccacctcttccctgcccaaatctgtctcctagaatcttatgtgctgtgaataataggccttcactgcccctccagtttttatagacctgaggttccagtgtctcctggtaactggaacctctcctgagggggaatcctggtgctcaaattaccctccaaaagcaagtagccaaagccgttgccaaaccccacccataaatcaatgggccctttatttatgacgactttatttattctaatatgattttatagtatttatatatattgggtcgtctgcttcccttgtatttttcttcctttttttgtaatattgaaaacgacgatataattattataagtagactataatatatttagtaatatatattattaccttaaaagtctatttttgtgttttgggcatttttaaataaacaatctgagtgt

SEQ ID NO: 8182 - DNA, 220 bp, Homo sapiens
gccaggacatgaggcttccctgaagcaaggatttcagccagatgccatagaccctcagaacttgacctggaagtccagacactgaacgcaggcctcaaaactgctgcggccttccaactcctggtatctgcatcggcgaatggcccttcttgccttgatccacagggatggggaagggaggaatgtcattaatgttttgttaatactgattctttcatgc

SEQ ID NO: 8183 - DNA, 267 bp, Homo sapiens
agcaggcagggccggtggacttcgtcggatgaagagtgatcctccttccttccctggcccttggctgtgacacaagatcctcctgcagggctaggcggattgttctggatttccttttgtttttccttttagttttccatcttttccctccctggtgctcattggaatctgagtagagtctgggggagggtccccaccttcctgtacctcctccccacagcttgcttttgttgtaccgtctttcaataaaaagaagctgtttggtct

SEQ ID NO: 8184 - DNA, 1068 bp, Homo sapiens
actctgggcctcctcaaactcagtgcctgggtccagggccccagtgcttccagaccaagacttgggccaccacttgtccaataaagtacatcccagacgccacacctgctgtgtcccgagagtctccagatgggggcatcagggtgaggtccgggactcttgggtcatcgtcccacagtggctgatcggctgccaagcacagtgggggtgctttgttggatcagagcagatttttcaccctggtctcggaatctaaaaaccctcgctgtgtcttcctgtgtgttgcgtgatctgtgaaaaatacatctccctctgaccacagactcctcatctgtggagaagggaagagaggatggcacttggctttaaagacaggtagctgccaggctactgtggagagaatgtgttatgggcctagtgggcctctggtggaccagagattacccctctcaacaggccagctgctggttggctccagccagtgtggccctggggtaaagggggcctggagttgcttgacacgccagttgttcaaaagaagcaagaacttgggaatattttttttttttttttgagacagggtctcactgttgcccaggctggagtgcattgatgtgatcttagcttacaacagccttgacctcccggctcaagtgatctccaagtgaccctcctgcctcagcctcctgagtaccctcctggggactacaggtgcgtgctaccatacccagctaatttaaacaaattttttttttgtagagatggggtcttggtgcccaagctggtctcaaactcctagtcttaagcaatcttcctgctttggcctcccaaagcgctaggattccaggtgtgagctactgtgcccagctaaaatagggatttttatattaaatctccctattttaaaatgttggctcctagcggggcgcagtggctcacgcctgtaatcccagcactttgggaggctgaggtgggtggatcacctgaggtcaggagttcaagaccagcctcaacatggagaaaccccatctctactaaaaatacaaaattagctgggcgtggtggagc

SEQ ID NO: 8185 - DNA, 455 bp, Homo sapiens
attgggtagagtctctggaaggttttaagcccattttcagttctaacttactttcatcctattttgcatccctcttatcgttttgagctacctgccatcttctctttgaaaaacctatgggcttgaggaggtcacgatgccgactccgccagagcttttccactgattgtactcagcggggaggcaggggaggcagaggggcagcctctctaatgcttcctactcattttgtttctaggcctgacgcgtctcctccatccgcacctggagtcagagcgtggatttttgtatttgctcggtggtgcccagtctctgccccagaggctttggagttcaatcttgaaggggtgtctgggggaactttactgttgcaagttgtaaataatggttatttatatcctattttttctcaccccatctctctagaaacacctataaaggctattattgtgatc

SEQ ID NO: 8186 - DNA, 541 bp, Homo sapiens
gagtctcagctggatgatgagaagggctgaaatgttgccaagtcaggtccttttctgatggtggctggggctggggtgagctcagggaggggaagaggagaatacatgcagagtcagcacccctgtgtccagtctgactgtgtctgctgtcgccacactcacctctgaggtctgtggaagtcacctgatattctggccccaggggtgggagggaggggagcttggaaggctagtcctgtagctccagtcctctgtctggcctccactcctcttgctcctgagggcagtttgtttcttttgtggattcgtcatttcccatgccctggttccagatacattttgaaaaccttccatcttattggcattttctggggttgtgagggaaacggggatggcagtcagactcaaacccgtgacactccaaactcgattatgctccagggcccactttctaaacctgtaagatctatgttccagcctgcgcaacatagtgagaccccaactctacaaaaaataaaaaattagccaggtgtggtggtgt

SEQ ID NO: 8187 - DNA, 134 bp, Homo sapiens
gggagatgatcacactcctcattgttgaggaatccctctttctacctgaccatgggattcccagaacctgctaacagaataatccctgctcacattttcccctacactttgtcattaaaacagcacgaaaactc

SEQ ID NO: 8188 - DNA, 134 bp, Homo sapiens
gggagatgatcagactcctcattgttgaggaatccctctttctacctgaccatgggattcccagagcctactaacagaataatccctcctcaccccttcccctacacttgatcattaaaacagcaccaaacttc

SEQ ID NO: 8189 - DNA, 139 bp, Homo sapiens
cccttcccttccctccaccacaccactcaggggctggggcttctctcgcacccccagcacctctgtcccaaaacctcattcccttttttctttacccaggattggtttcttcaataaatagataagatcgaatccattt

SEQ ID NO: 8190 - DNA, 1826 bp, Homo sapiens
agagaatacgatggcctttagaaaatgccctttagcagagaatttgtaatttaagaaattttctgtttgttacggaacatgtgggaatcccttttacttcatgctcacaatttatcagaaattatttcgtatgttaaagagtcgaaagactatagcatcactcagtccctgttagactttagaagattgatactgatgcactgcatcccaaaccatcaagggccttttcccctacaaactgttgttgaacagtgcttctctaaaatgcaataataatgggccaggtgaagtggctcacacctgtaatcccagcactgtggaaagacaggagttcgaaaccagcctgggcaacatagtgagaccctgcctcatggctttagtgagccatgattgtgccactgcactccagcttggtgacagagtgagatcctgtctctaaataaataaataaaatgcgggccaggcacagtggctcacacctgtaatcccagcactatgggaggcccaggtgagcagatcacctgaggtcaggagttcaagaccagcctggccaacatggtgaaaccccttctctactaaaatacacaaattagctaggcattgtggggggtgcctgtaatcccagctactcaggaggctgaggcaggaaaattgcatgaacctaagtggcagaggttgcagtgagctgagatcgcaccactgcactctagcttgggcaacagagcaagactctgtctcttaaataaataaataaatagattaccagaaaaatgaaaagaaaaaaacagacatacaaaataaaagccccagttttttattatggtatttaactgagttaactctgtcagattgctgcaaacatttctaaatacttgctcttggtatctataacttttgcagagaccagaagcaaacaatttgtgggccagtgtcaacacatggaccacactttatatagcactgtaacggaaaatgattctgttaatgtaatgaacatgggaaagaccagccttggcctatctttatgatatatataaataatataattctcataattccacctctgcctatgtggtgtttggcaaaacatgcccctgtgccttggtttttaaaatggtaataacagtaccacctaatagtatttttgtgaggatgaaatgctaataaaagataaaacctttaaaagagtatttggcacacagcattttatcaataaatattgctttatttttttcattggggatacatttagtacattcatgtgagaggaaggccctgtgggtgtaagaaatttgtaaaaactgtccattacctttcactccttatttagattggaataattaactggagataatatccagtaaaatagattaaacttccatttataaagtcagaacctatctctgaaaattaatgtgagaaagaaatctctagatttgatgggtgtgaagattatgagagtaaagttttgaagactcagggatagctgtaatgcttttttctttttataacccaaaaagcaggtatgtcagtcgctttttctgcccacaatgataaattaaaaacagccactatccatttggaaaacttaaaagaataatgaacagttatgttctatctagattcagcaattgttaatatgttgtcacatttggtttgcttatacataatatttacatattttgctgtagtatttgagtataaattgcagatactataacacatcacatctaagaataaaggctgcctcctacttaattgctatataacaattgtccaacctgtctgtgccccagggcagctttgaatgcagtccaacagaaatt

SEQ ID NO: 8191 - DNA, 275 bp, Homo sapiens
ggcctgcccaccaccgcccgcctgggcagccatgaatgtagcgccccaggccctgccccagcccgccatgccacaaggtgggggaggccctgggcaggatgttcactctatttattggggaaggagggaggggggggacacttaacttattcctttgtaccccagggggtggagccctgtgcccaccctgcactggggggagggtgggcagggatactcagggacagggcatcatgggggatttggcacaaaatggagcattaaaggtaacccct

SEQ ID NO: 8192 - DNA, 309 bp, Homo sapiens
ggcccgatccagtgggcaggccaaggcctgctgggcccccgcggacccaggtgctctgggtcacggtccctgtccccgcgcccccgcttctgtctgccccattgtggctcctcaggctctctcccctgctctcccacctctacctccacccccaccggcctgacgctgtggccccgggacccagcagagctgggggagggatcagcccccaaagaaatgggggtgcatgctgggcctggccccctggcccacccccactttccagggcaaaaagggcccagggttataataagtaaataacttgtctgt

SEQ ID NO: 8193 - DNA, 889 bp, Homo sapiens
cttcccacccccaggacctgacacatctcgtctcccctcttttccgcactgtgggcacaaagacactttttcttccgcaggggcgggagcccctagttccaacactgaggacgcgtgacatggtgggcaccggaaaggaggggacttctcctgcaccccaagaagtggtggggagattgctgcccctatagccatatctcggccccttcccactcaccacccccaccccaggtgctgggggtcccttatttttatgcaataactgagcttgatgggggtgggcagggggccagttgagccaagcccccagccccgatctgcagatcctgccccaagaagctggggtggtgggggcagtaattcctgcccccctctctgccctagggatgggcacgggggcgctggtgaggtcccctggaccatccagggtgctagggggcagggaggggacaccccctccccgcctttacctcacttccaatgctgccttgatctctgtctgggaggggggagtgaaggggccctagccccctgcactccgccgcctcagagccatgcggttaattcctgacttagtttatttttgcaaaacgtcgatctcctcctcccccgccccgcatccgcgaaggcttttaatgggaggggcgtcaaagctcaaaactgttttcctctctcctcccccctccagttgtaaatgccacttcatgaggggaggggcgaggggaagcccacccctgcatgcttctggctggagcacctccctggggagtcgggggattgggttgtgggcagtccccatggccgcctggagaagccgctggggcccgggggtgtggggcggtgtggcgggcgcacactgtatgtacctataataaaccctttggctttg

SEQ ID NO: 8194 - DNA, 254 bp, Homo sapiens
caacagccaatatctgtgtggcgcctctgtgtgctaggcactgttctaggtgcttcgtgtgtattcagaccccttttttaggcctgtcattggggacttcggtcatggggcatccttctgtccgctgtccttcccagttgcctattattaccctctccatgggatgtcacagcatgaaacaggctaaagacaggatgggcaagggaggtgtgggactgtatttgtgagggtgggtgaagaattctaacaattcc

SEQ ID NO: 8195 - DNA, 188 bp, Homo sapiens
acaacgcagctgccatgatgccttgggatgccctggtcctgggggactcaggtgcctccctgattcctgtgggaaccccgggttcagggccagggcctccttggaataaatggttattgttactaggtccccaccttccctcttttctggaagccaaagtcaccctccccaataaagtcctcactgcc

SEQ ID NO: 8196 - DNA, 270 bp, Homo sapiens
gccctggcacccgctggccgcccacccgcgcccgccactcggggcccctgccgcgcatcctgcagcccgcttatgcgtatgtgcacggggccgcccgcctggacctggagaagggacctacggacgcctggaagctgcgacgccctgcactgctcccgcctccaccagcgcctcccactgatgtcgtggtcccgggcctggcccaggggcccctttacatgccctctcccttttataaaattttccattaaaaaccacctattttctatc

SEQ ID NO: 8197 - DNA, 1298 bp, Homo sapiens
gctgctcagccaccatcaggttaattggatggcgccagtctggctggaggagccctgagatgccatgggaggcctgaggttggccacgggggagctggcctccagggacgggagagattgtgtcatgtgccacacgagaccaacgtggaaaagtctgaagggccttgggagaccaggtagcacctggccccatcatgatgcaggggttttggggacctggaaggaaggtgatgaggcagtgagtcagaaaaaccagaacggggtccccggatctgccgggaaggcttctgaggggctgccctgagagcattcagttcacatgtcacagggtatggtgtgacagggtgcctgtggacacatgaatcacttctaacctgcctccctgtcagcctccaggctgccagctggctgaggccagggactgggtcaggctcatctgtggcgcctcagagggtcagcatcattggtgaacagatgcaggcgctgctggaccatctggggagagtgacagtccatgtcttcaccagggagccatttgagtgctgagcgacaagaggctcagagggcatgaccccatgggactggatgcggcctgagggctgataccgctgggcggtatcctgccctgctgtggccctgtgggatcctccgtgttcctcggcggactctgctgacctcctgcagacccaaaccacagccacatcccagcttctgtgccagcactgtgacagtacctcgctcctctgtgcaccagatccggcctcaggacttacacctcctgcctgacccccaggcttctctctcctttctcccagcaaactgcagtggcagaaaggaggttcagaggctgggaaagtgggcctccccttgcaactcagagctgctgcactcaggagggccccatccaatcccgggcccctgcagggaaaagcgctgggtgtgtgtcagaggcgcagggtgggtggggctgccagccaggaccctggcctgcagcctgatccaaaccaaagactgtagaaccctggggtgtggctaacggcccctccagcacccatagccaggtcttcctggcccttgaggctgggctggcggacaggcacctacctcttccttaagctgaagctcccacactgtcttccagggctgaggagatgctctccttttctactgaccatcttgatacttatttatacgagaggcagttgctggacggggtagtactgggaagcaggaggcagaatggctctgctgagcctcctacccatgacaacaccccaataaacagaacattcagagcc

SEQ ID NO: 8198 - DNA, 220 bp, Homo sapiens
caccttttccccccatgcctgccccttcccctgttctggggccacccctttcccccttggctcagccccctgaaggtaagtccccccttgggggccttcttggagccgtgtgtgagtgagtggtcgccacacagcattgtacccagagtctgtccccagacattgcacctggcgctgttaggccggaattaaagtggctttttgaggtttggtttttcac

SEQ ID NO: 8199 - DNA, 69 bp, Homo sapiens
gctcagcctaccgctggccctgccgtttcccctccttggctttatgcaaatacaatcagcccagtgcaa

SEQ ID NO: 8200 - DNA, 373 bp, Homo sapiens
ctcacctgttctccaggaccagccctgctggggcccaggcccaggctctgagaggccgtgtcctaacctgccctggccccggagaagctacgttgccacctgtcccccttccctggcctggtggggcctggctttggggcaagactgagccacgggggaagggggaatcccgtacctgctgctgcttcctctgtcttggctaacgtctgtccccctgaacccctaaccataccccaagagctcccaaagcctgagaccagggtcatttgtccccaactccccatctggccctgctgttgctagtacctgttatttattacctggaggcctgtccagcacccaccctacccccataaagcattgtttacacctg

SEQ ID NO: 8201 - DNA, 568 bp, Homo sapiens
tggccagtcccagagccgcatggcagacagcttaaatgacttcaggagagccctgggcctgtgctggctgctccttccctgccaccgctgctgcttctgactttgcctctgtcctgcctggtgtggagggctctgtctgttgctgaggaccaaggaggagaagagacctttgctgccccatcatgggggctggggttgtcacctggacagggggcagccgtggaggccaccgttaccaactgaagctgggggcctgggtcctaccctgtctggtcatgaccccattaggtatggagagctgggaggaggcattgtcacttcccaccaggatgcaggacttggggttgaggtgagtcatggcctcttgctggcaatggggtgggaggagtacccccaagtcctctcactcctccagcctggaatgtgaagtgactccccaacccctttggccatggcaggcaccttttggactgggctgccactgcttgggcagagtaaaaggtgccaggaggagcatgggtgtggaagtcctgtcagccaagaaataaaagtttacctcagagctgca

SEQ ID NO: 8202 - DNA, 1569 bp, Homo sapiens
aggggctgagggaagggggtcaaaggattccagggtcattcagtgtccccgcctctgtagacaatggctctgactccccgcaacttcctgcctctgagagacctgctacaagccagcttccttcccctccatggcaccagttgtctgaggtcacattgcaagtgagtgcaggagtgagattatcgaaaattataatatacaaaatcatatatatatatatgttcttgttttttgagacagagtctcacactgttgcccaggctggagtgcagtggcgtgatctcggctcactgcaacctccacccccggggatcaagcaactctcctgcctcagcctccctagtagctgggattacaggcatgcactaccacgcttggctaatttttgtatttttagtagagatggggtttcactgtgtaggccaggctggtctcgaactcctgaactcaagtgattcacccaccttagcctcccaaagtgctgggattacaggcgtgagtcaccgtgcccagccatgtatatatataattttaaaaattaagctgaaattcacataacataaaattagctgttttaaagtgtaaaatttagtggcgtgtggttcattcacaaagctgtacaaccaccaccatctagttccaaacattttctttttttctgagatggagtctcactctgtcacccaggttcgagttcagtggtgccatctctgtccactgcaacctccacatcctgggttcaagtgattctcctgcctcagcctctggaggagctggtatcacaggcgtcccccaccacgcctggctaaattttgtatttttaggtggtcttgaactcctgatgtcaggtgattctcctagctccaaatgttttcattatctctcccccaacaaaacccatacctatcaagctgtcactccccataccccattctctttttcatctcggcccctgtcaatctggtttttgtcactatggacttaccaattctgaatatttcccataaacagaatcatacaatatttgattttttttttttttttgaaactaagccttgctctgtctcccaggctggagtgctatggtgcaatttttgttcactgcaacctctgccttccaagatcaagagattctccagtctcagctcccaagtagctgggattacaggcatgtactaccatgcctggctaattttcttgtagttttagtagggacatgttggccaggctggtggtgagctcctggcctcaggtgatccacccacctcagtgttccaaagtgctgatattacaggcataatatgtgatcttttgtgtctggttgctttcatgttgaatgctatttttgaggttcatgcctgttgtagaccacagtcacacactgctgtagtcttccccagtcctcattcccagctgcctcttcctactgcttccgtctatcaaaaagcccccttggcccaggttccctgagctgtgggattctgcactggtgctttggattccctgatatgttccttcaaatctgctgagaattaaataaacatctctaaagcctgacctccccacgtc

SEQ ID NO: 8203 - DNA, 252 bp, Homo sapiens
gcgagggctgtgctggtgcagggctggtgggcggggccagggaaacggccggggcaggggcggggcttgtgggaggggcggggctaagaatgggggcagtgggggaaggaaggggagaggtggttagagggaacagaagaaacagaaggggctcagttcaccttgatgatgtccttcagagctgtgatgagaggaagggaaaccttacagtatgctacaaagagtagtaataatagcagctcttatttcctg

SEQ ID NO: 8204 - DNA, 294 bp, Homo sapiens
cgccccggcccttccagattcgcctgtgagcgatgaggcccgcccatgcgggttgctacgtccccttcttggtccacagtctgccctcatccctctggcagtcacgctgtcttccctgcatgctgtgcctgccgcgtgcccttcccccatccctccaatctgtgccccgtctgcagggcagaggcagatgtggcatgtctttttgtacccacagagcttgttctatggcacgcccttttctaggctttttgtatcatttcttagtacattgtaatagattcaaaccagtcttgg

SEQ ID NO: 8205 - DNA, 1050 bp, Homo sapiens
aggaaggcaacttggaagtggtgggtgcccaggacggtgcctccagcctcaacagtgggcatggacagggttaatgtctccagagtgtacactgcaggcagccacatttacacgcctgcagttgttttccggagtctgtcccacggcccacacgctcacttgactcatgctgctaagatgcacaaccgcacacccatacacaactacaagggccacaaagcaactgctgggttagctttccacagacataaatatagtccatctgcaatcacaagcacatagccaggtaacccaccaactcccctggatctgcagcccacacgtgggagtctggctgtcaccttcacaagccacagaaacggccacacatgttcacagctcacacgccctctccattcatcgaacttctcagtgtccctgtccctggtgcctggcacagggaacagcatgccccctccggggtcatgccacccagagactgtcgctgtctatggccccaactcatgctccctctcttggctacaccactctcccagcctgtgaccaccgatgtccacacacccccaaccacttgtccacacagctacccacgtacgacatcgtcctggctccccagagtatcttcccactgagacacgccgcccccacagaggcacagtccccagccacctctgcaactgcagccctcagtcacccctttttaagcaccctgattctaccaaatgcaaacacatctgggtctgcgattatgcacagagactttggacatacgaggaccctcagaccggaggaacacctgcccaaccccaacacgtgcttatgtaaccacgtggaaagcggcccctgctgcccctccacacacacatacacactcactgatctacagcccctgttcggcgtcagagtccccactagacccagtggaaggggttagagaccaagtaggggccagtttccaattcaccctgtcagggagtgagccggatctgacgttccttgtgacttaagggtccggcttgggaattaaagtttgtttctggcctttagcct

SEQ ID NO: 8206 - DNA, 1861 bp, Homo sapiens
gacaaccctccacctggtactccctctcaggatccaagctaagcactgccactggggaaaactccaccttcccactttcccaccccacgccttatccccacttgcagccctgtcttcctacctatcccacctccatcccagacaggtccctccccttctctgtgcagtagcatcaccttgaaagcagtagcatcaccatctgtaaaaggaaggggttggattgcaatatctgaagccctcccaggtgttaacattccaagactctagagtccaaggtttaaagagtctagattcaaaggttctaggtttcaaagatgctgtgagtctttggttctaaggacctgaaattccaaagtctctaattctattaaagtgctaaggttctaaggcctactttttttttttttttttttttttttttttttgcgatagagtctcactgtgtcacccaggctggagtgcagtggtgcaatctcgcctcactgcaaccttcacctaccgagttcaagtgattttcctgccttggcctcccaagtagctgggattacaggtgtgtgccaccacacccggctaatttttatatttttagtagagacagggtttcaccatgttggccaggctggtctaaaactcctgacctcaagtgatctgcccacctcagcctcccaaagtgctgagattacaggcatgagccactgcactcaaccttaagacctactgttctaaagctctgacattatgtggttttagattttctggttctaacatttttgataaagcctcaaggttttaggttctaaagttctaagattctgattttaggagctaaggctctatgagtctagatgtttattcttctagagttcagagtccttaaaatgtaagattatagattctaaagattctatagttctagacatggaggttctaaggcctaggattctaaaatgtgatgttctaaggctctgagagtctagattctctggctgtaaggctctagatcataaggcttcaaaatgttatcttctcaagttctaagattctaatgatgatcaattatagtttctgaggctttatgataatagattctcttgtataagatcctagatcctaagggtcgaaagctctagaatctgcaattcaaaagttccaagagtctaaagatggagtttctaaggtccggtgttctaagatgtgatattctaagacttactctaagatcttagattctctgtgtctaagattctagatcagatgctccaagattctagatgattaaataagattctaacggtctgttctgtttcaaggcactctagattccattggtccaagattccggatcctaagcatctaagttataagactctcacactcagttgtgactaactagacaccaaagttctaataatttctaatgttggacacctttaggttctttgctgcattctgcctctctaggaccatggttaagagtccaagaatccacatttctaaaatcttatagttctaggcactgtagttctaagactcaaatgttctaagtttctaagattctaaaggtccacaggtctagactattaggtgcaatttcaaggttctaaccctatactgtagtattctttggggtgcccctctccttcttagctatcattgcttcctcctccccaactgtgggggtgtgcccccttcaagcctgtgcaatgcattagggatgcctcctttcccgcaggggatggacgatctcccacctttcgggccatgttgcccccgtgagccaatccctcaccttctgagtacagagtgtggactctggtgcctccagaggggctcaggtcacataaaactttgtatatcaacg

SEQ ID NO: 8207 - DNA, 1125 bp, Homo sapiens
ccagtgtgacccagaggctcccggaggcccctgccggcttcctccaccagcgcctgcctcggcccctcctctgcccccgccagatcccgtggtgctggggatggggtcatcccagggctgcctccctccagcccactgcctcccctctgaggggcttccttcccctccatagggccaggcatttttttctggattcaaacaggcaacaatgaccttttattttctgtttgtccccacctccccagccttccacctcctgttcttcctaccttcttcctttttgactaaataatccccacctcccttgatcatacagtgaggctacagtgactgaggggagaatcccctcctgttcactctcccaaccctgctccagcccctcagcttcccagaccctcatgcagttggttgtaaattctcccaggagctgttttactgtctacttttcaggattaaaaaaaaaatcaaaacttaaaaaaaaaaaagtttaaaaagcaaaatggggagggggaggaagcagtgacttttttttggtaattatgcgcttttttttaatttttagaatttgtctttttactgtgggtgggctgttgatatttcatcaagataagcatttctttcctgagttcaggtgactgaggaagagccacaaaacaaaacacaacaaaaccaaaccacagaatcatctttaacccaactttttatacgatgccccagttccccataactttgcacacaagcttctgtgttcagttgaattgtaactgctttttgtatttggagagagtgactattgaacttgaaaccttttattccgggcgtcttggtagtttctggtgggattcagtgggtgagagggaagaaggggaggttggggggctccttcccttcagaacttgaagtttctcccactgcctcctctccagtggtctcccaggtgccagacccaaaagcttttcctacagtgataccctttatttttacttccccttgactcatatgttttaacatgattttaacaaactgcacttattaagaaatgtgtttgccctgttttgtttggtttcgttttgttttctttgaataaatgacatggcacctcctagcaggaaggaagcagggttg

SEQ ID NO: 8208 - DNA, 2167 bp, Homo sapiens
tggccgccacccttcccaccgcctgccccatccccatccccaacaaggcagctgattccaggcctgctcagtgaccctttctctagggggacatcagggcagtgccccacaacccacacacaccaccatctcactgggtctagtctcatctcagacaacccccacccccactgtttctggggttccctttctcatctctcccaccctgtctcctgcctctgtctttcttggtgtctgtctgggcttctttctgtctctttctgtctttctgtctctctccctacccccgctccctctttccagtgctctggctggctgtctctccctttctccccctctctctctgccttaggctctgtctccaccgcagggcccaaggtgaaagtcctccccttgccggaggccagctggcagggcctttcgtggctggaagtggccagtttggttccggtgctgacccctaggccccagcgcagctgcctcccgtgctgtctgtctccccctctctgtttatgtctgcgctgtgtctcacactcagagcctccttgcttctgttaggttcccatctctccttctgcctcactctgggcctcttctttctacttgtacatttccacctctctaggcctctgctctcactgtccctctctgtctgtctctcagcctttatctctgggttttgatcccccactccaggctctgggccccttcttcccccttccctcaaacctggctgctataggcagcagaaccctgaccactgagtaatacagccccaggggagggaggagaccccaggcagggaggatgggggcagctctcttctctccccaggacccaggctgtggatcacggggcctgccagcttgagtgtagagggaggggggactctacccttctcagccccaccagcccccctctgcccaaccacaattttcccttcctccgccttcctctccctctcctgtttacactccccaaatgcgcacaggctgttatcatgggtcctgagtcatcccacacacagcctgccccagcgtccctgcccccagctggccgcagggcccgccccatggagccccctgccgccctgggctaatgggagccagatggccgcctggtgactcagccaccgggcctgtgggaacccaggcgtcccgccttcccatgcccccacacccggctcctgctcccccagcagacacacacaggagggcctggccactgttgagggggcacacagggcaagggtcaccaagtcggggcctagggactcctcatgcctctgagatggaatggtggtatcctgccgtggccaagcctgaaggaccctcaaaactgcctcctggagtccacggttcctgacctccgagcctcagctatgccctctgggtcaaccagaattagagccagacagggaaagtgagagctggatggaggcagacaagatgctcagagcgactattaaagaacgaaagcctctgctacggagcgcttctgtcctctgtcaggcccgagcgaagtgcctgacaccgggttggatcctcagatggccccatgaactagtgaagtgggtcaaaggaggcctggaaagatgttgcttcctcaaggccactcggccatcagaggcagaaatgaaacaggaacccaggcctagaatcacaaaggtcctagaaaccacttggctgtctggcctctcaggtgtcagggccatccagagtgagacagcattggagggacaagtgtgcatgcagatgtcctcagacgggaaggtttgagaagggtcagatggtaggcgggcctaacaagggctccgtgctagccactgtcccgcacacagacaggatcaggtcatcttgatatggagatcagtccccaaatcactgaattgtcccagcagtgctatgccctaggtactaccaatatcactcctctatttcccagaggaggaagcagcagctagactccaggaccttggggtcatatctctcagaaagccaagagtgcaggatgagagctgtctgtctcttacctgcctgtatttgtgccccatttttaaagagcagagggcctgggccacaggaaaggtatcagcccttggtgataggcacattttttaccagtctatcatttggtcattaaatttgtttacaatatactttgctat

SEQ ID NO: 8209 - DNA, 396 bp, Homo sapiens
gacctgctcagcccacccccacccatcctcagctaccccgagaggtagccccactctaaggggagcagggggacctgacagcacaccactgtcttccccagtcagctccctctaaaatactcagcggccagggcggctgccactcttcacccctgctcctcccggctgttacattgtcaggggacagcatctgcagcagttgctgaggctccgtcagccccctcttcacctgttgttacagtgccttctcccaggggctgggtgagggcacattcaggactagaagcccctctgggcatggggtggacatggcaggtcagcctgtggaacttgcgcaggtgcgagtggccagcagaggtcacgaataaactgcatctctgcgcctggctctctacc

SEQ ID NO: 8210 - DNA, 381 bp, Homo sapiens
gaattgctacactctgacacaaacatttactgctggatcgaccacaaagcagatgtggcttcttaggttcctctgggagctgctcctgtgggttgatggagcgtccctgaagcccccagccctggggatggggaaggacatggagcctgagccagagaaccagctctgagtcctgaggagacacaggcctggggacaggaagggatgggggtccctgctgaatatatagagacctcaacagactgccccgggctctgggtgggccaaggcgaaggcttcccatcaccacaggaagcgggggcttgcagggaaagtgaatgggcctatggcccacccggggtcacctggaaaggatctgaataaaggggaaacttcctctca

SEQ ID NO: 8211 - DNA, 1333 bp, Homo sapiens
acagttgttttgcttcttccttaaagcatttgcaacagctacagtctaaaattgcttctttaccaaggatatttacagaaaagactctgaccagagatcgagaccatcctagccaacatcgtgaaaccccatctctactaaaaatacaaaaatgagctgggcttggtggcgcgcacctgtagtcccagttactcgggaggctgaggcaggagaatcgcttgaacccgggaggtggagattgcagtgagcccagatcgcaccactgcactccagtctggcaacagagcaagactccatctcaaaaagaaaagaaaagaagactctgacctgtactcttgaatacaagtttctgataccactgcactgtctgagaatttccaaaactttaatgaactaactgacagcttcatgaaactgtccaccaagatcaagcagagaaaataattaatttcatgggactaaatgaactaatgaggataatattttcataattttttatttgaaattttgctgattctttaaatgtcttgtttcccagatttcaggaaactttttttcttttaagctatccacagcttacagcaatttgataaaatatacttttgtgaacaaaaattgagacatttacattttctccctatgtggtcgctccagacttgggaaactattcatgaatatttatattgtatggtaatatagttattgcacaagttcaataaaaatctgctctttgtatgacagaatacatttgaaaacattggttatattaccaagactttgactagaatgtcgtatttgaggatataaacccataggtaataaacccacaggtactacaaacaaagtctgaagtcagccttggtttggcttcctagtgtcaattaaacttctaaaagtttaatctgagattccttataaaaacttccagcaaagcaactttaaaaaagtctgtgtgggccgggcgcggtggctcacgcctgtaatcccagcactttgatccgccgaggcgggcggatcacgaggtcaggagatccagaccatcctggctaacacagtgaaaccccgtctctactaaaaatacaaaaaaagttagccgggcgtggtggtgggggcctgtagtcccagctactcaggaggctgaggcaggagaacggcatgaacccgggaggcagggcttgcagtgagccaagatcatgccgctgcactccagcctgggagacaaagtgagactccgtcaaaaaaaaaaaaaagtctatgtggtcagtcactactcttgctgcagttatgaaaagaatgaggccaagtctgatgaaaataaacttattttgaaaac

SEQ ID NO: 8212 - DNA, 1407 bp, Homo sapiens
attggaccagaccctgaattcttctagctcctccaatcccattttatcccatggaaccactaaaaacaaggtctgctctgctcctgaagccctatatgctggagatggacaactcaatgaaaatttaaagggaaaaccctcaggcctgaggtgtgtgccactcagagacttcacctaactagagacaggcaaactgcaaaccatggtgagaaattgacgacttcacactatggacagcttttcccaagatgtcaaaacaagactcctcatcatgataaggctcttacccccttttaatttgtccttgcttatgcctgcctctttcgcttggcaggatgatgctgtcattagtatttcacaagaagtagcttcagagggtaacttaacagagtatcagatctatcttgtcaatcccaacgttttacataaaataagagatcctttagtgcacccagtgactgacattagcagcatctttaacacagccgtgtgttcaaatgtacagtggtccttttcagagttggacttctagactcacctgttctcactccctgttttaattcaacccagccatgcaatgccaaataatagaattgctccctaccagctgaacagggaggagtctgtgcagtttctgacacttgttgttgaacatggctaaatacaatgggtatcgctgagactaagttgtagaaattaacaaatgtgctgcttggttaaaatggctacactcatctgactcattctttattctattttagttggtttgtatcttgcctaaggtgcgtagtccaactcttggtattaccctcctaatagtcatactagtagtcatactccctggtgtagtgtattctctaaaagctttaaatgtctgcatgcagccagccatcaaatagtgaatggtctctctttggctggaattacaaaactcagagaaatgtgtcatcaggagaacatcataacccatgaaggataaaagccccaaatggtggtaactgataatagcactaatgctttaagatttggtcacactctcacctaggtgagcgcattgagccagtggtgctaaatgctacatactccaactgaaatgttaaggaagaagatagatccaattaaaaaaaattaaaaccaatttaaaaaaaaaaagaacacaggagattccagtctacttgagttagcataatacagaagtcccctctactttaacttttacaaaaaagtaacctgaactaatctgatgttaaccaatgtatttatttctgtggttctgtttccttgttccaatttgacaaaacccactgttcttgtattgtattgcccagggggagctatcactgtacttgtagagtggtgctgctttaattcataaatcacaaataaaagccaattagctctataact

SEQ ID NO: 8213 - DNA, 316 bp, Homo sapiens
cttccgccaggagctgctcctgtgggttgatggagagtccccaaggcccccagccctggggatggggaaggacatgaagcctgagccagagaaccagctataagtcctgagaagacactggtgtctggggacagggagggatgggggtccctgatgaatatctggagacctcgacagcctgccctaggccctgggtgggtcaggacaaaggcctctcatcaccgcagaaagcgggggcttgcagggaaagtgaatgggcctgtggcccacctggggtcacttggaaaggatctgaataaaggggacccttcctctc

SEQ ID NO: 8214 - DNA, 37 bp, Homo sapiens
aacaaaccatgctgggttaataaattgcctcattcgt

SEQ ID NO: 8215 - DNA, 391 bp, Homo sapiens
cacccctactcctgccaggctgcccccgcctgctgtgcacccagctccagtgtctcagctcacttccctgggacattctcctttcagcccttctgggggcttccttagtcatattcccccagtggggggtgggagggtaacctcactcttctccaggccaggcctccttggactcccctgggggtgtcccactcttcttccctctaaactgccccacctcctaacctaatccccccgccccgctgcctttcccaggctcccctcaccccagcgggtaatgagcccttaatcgctgcctctaggggagctgattgtagcagcctcgttagtgtcaccccctcctccctgatctgtcagggccacttagtgataataaattcttcccaactgc

SEQ ID NO: 8216 - DNA, 344 bp, Homo sapiens
gccttttgcaagaaggagaggaatgggggagaggacgtgagggaccacccccacccacacagctgccgcagcatctcacaccccgagggcctgaggagagggagctgtgggccacgcctgggaggggcccagctggggttactggccccgcatgagcctcggccatctctccctcctgccctctgcttgggggactcagggctccattctggagggcaccacggtgacccgggccatctcagtattgcctgtgggggccacccctccacccccacccccaagtgccttcgctctgtttttataccctgaattggaggtttattttttaatatatattatctaag

SEQ ID NO: 8217 - DNA, 271 bp, Homo sapiens
ctctgcccgacttcctctttggcacctccattccctgttgctgaaggccctccagcatccccttaagcatctgtacatactgtgtcccttcctcttcccatccccaccaccttgtaagttctaaattggatttattctctcgtgaggggggtgctctggggtccttgacacacataaaggtgcccccccaccttccacctcttagcactggtgaccccaaaaatgaaaccatcaataaagactgagttgccagcagtgtgtagagtggaat

SEQ ID NO: 8218 - DNA, 1785 bp, Homo sapiens
cgcagctgaaaagcaacaacaaaagggtttggttgcaacagccagtgtgggtacctctggggagagaggacctcctctgacaaactggtctggtacccaccatgtgccaggatccaccctggcctctttttacccactgactccccagaacaacccttccaggcttctcttgtcatctttctctgcctgaggggaaactgaagctctgaaatgcgatgtgatctgtaccaggtcacccagctatgctgcaaagtgggttggccaaggccctttgcactgcatcaccctggtgcccagcaacatcaggtaaccttcactgagcaccaagcttatgccaggtctgtgctggccactctcatatacctcttcagatcctctgcttgtacccccagcccttgccttccctggattttgggcacccaggactttgctctgcctggtggagggtacttgatttctctgggcttccttcatctcaattctgacagtgtggaaggaaatctgtaggtacccaggtcctcagctccagactgggtgatgctggagacccaggagcaagtcagcacaggctctgcccacaggaggcatgcacaatctggtaggagaaacgcacaagtacagatagcttgctctctgagtgtgtctcattgattcattcagcctgtgtgtcctaaagcctcccttctcccatactgggtgatgctgggggcagagatgagtcaggcctaaggcttctctgggctgtgatggggatgtgcagggacagtgggatcccaggaaacagacctccatggtgggagatcaggagttaaggacttcctagagaaggtagtccctgaaggaaaagtaggaatctggcagtgaaagaggaaaagaacattccaggcagacagcactgcaagagggtgagctcttggtgtatttggagaccatccagttattcatctgactgcctacctgaggcaagcaccacacttaccactgtatgtgtactatgatcccaacaggcttgtgacatagatttcatattatccctgttgtatagatttttaaaactggtggctgggcgtggtggctcacgcctgtaatcccagcactttgggaggccgaggcgggcagatcacgaggtcaggagatcgagaccatcctggctaacacggtgaaaccccgtctctactaaaaatacaaaaaattagccaggagtggtggcgggcgcctgtggtggccagctactcaggaggctgaggcaggagaatggcgtgaacccgggaggcggagcttgcagtgagccgagatcgcgccactgcactccagcctgggcgacagagtgagactccctctcaaaagaaaataaaaataaaaataaactggccaggtgcggtggctcacgcttgcaatcccagtgctttgggagactgaggcaggaggatcacttaaggccaggagttcgagaccagcctgggcaacagcaagacctcatctctacaaaacttaaaagttagccaggcctggtggcacatgcctgtaatccgagtgctttgggaggctgaggcaggaggatcactcgagctcaagaattcaagacctgggcaagagagagagactttgtctctattaaaaataaaaatgattggccgagcatggtggtgcacaccagtattcccagctactctggaggctgaggcggaggcaggattgcttgatatgagggagattgaggctgcagtgagctgtgttcacaccactgcactccagtctgggcaacagtgcaagaccctgtcactt

SEQ ID NO: 8219 - DNA, 606 bp, Homo sapiens
gggacccctgagaagatgccaggacttatagtaccccctcaggacatggacagtatgtgggggcaggaaggttatctcctcccgggtaaagccatttcgtcctctccagtttggggcggaatgaggcctgctcctcttgtaaatacccccttccctcgaagctccctcccggtgctggggggcagctgaggggctgcaggggcagtctccctcctccaagcccctgtacataacctggagcgtgtgaccttcagagcttttcactttatgcaaaatggctcctgtgagggctgcaagctggagggtggtgcaggccttgggccacagggaggcgcctgtggaatagggggagttcatgcaccccttttttccccagaggggctggactcaggttagtttgggggtgggggctcctgcactttgccacaggcacggggagggttttctcctcaccccctctgccctcccaacttgggttgtactttctaagaaggtgattccccctgcccttgcccccttccccagaacaaaacatgttgatcatgtgcaatatttcttactgtgccgagaagccgcaatgagcgagattaaagctgtttaacacac

SEQ ID NO: 8220 - DNA, 80 bp, Homo sapiens
ggagaggctgaggctagggctggggacagatatcttgtactcccagtgacctcaataaagtacttttcatggtcctcttg

SEQ ID NO: 8221 - DNA, 245 bp, Homo sapiens
ccccgctggactccggaacacccgtggtgaccgccgggaccctgcctgtgactctccaggactctgcgaccccgggatggatattgcgatgctggtctcgaccctgaaaccctccctcggatctgtgacctcggacccgtactccatctgccgcatctccattccgggggccttccctcgggtccctggcagaaagacattttaccccttcttgccaaaataaaaaaggattcgtttttatctat

SEQ ID NO: 8222 - DNA, 1994 bp, Homo sapiens
catgcccagggttctcatccacagcagctgggtcacctgatagggccgccctggacttggggtccctccacctgggggcccctggacactgtctacttggagaccactggcccccttcccccagggttgcccagatggggcctcctttgttctgcattcagcagctatttatcgagtacctactctgtcaggcactgtcataggcgtggggcaaagcaggaaccaagagacgaggttccctgatctcatgggacttaggttctggtgaagggagacaatcagtgcacatgcacacaccccacacgcatacacacatgaacacatgcacatgtgcacacacaagtaagatggcttcagagagggagaagcactgtgaggcctccagaggatgtggcagtgagggacgatggggtgaagtcagctgggcattcaaagaagctagactgagaacgcctgagaagaaccagctacgggaagagctttgggaagcaaaggcagaggccctggggtgggagcaggcttgttttattggaaggaccagaaaactggtaagtgtgacccagatcaagtgtgaggagatgaggctggggatagtcaggggctggatcacccagggccttgtgggccccacatagggttttgggttttattctcagggcaatgggaagctgttggatggtttgatgaaggggagtgacaggatccgatgtacctatttaagaatttaagagggtcgggtgcggtggctcatgcctataatcctagcactttgagaggccaaggtgggctgatcacaaggtcaagagttcgtgaccagcctggccaatatggtgaaaccccatgtctactaaaaatacaaaaattagctgggcatggtggcacacacttgtagtccgagctactcgggaggctgaggcagaagaatcgcttgaacccaggaggcggaggttgcagtgagctcagattgcgtcactgcactccaacctgggtgacagagcgagactccacctcaaaaaaaaaaaaaaaatttaagaggtcactcagttgtgctgtggagaatggaccggagggacaagaggggcagcagggatggtgggctggagtagggtgctggcaatgagggagtctggctcagatgtgggatgtgtatggaagaatataaatgatggtgtggatgtcagggtgagggaggagacaaaaccacgatgacccctagctttgtggcctgaactgtgggtggctgaggggatcgttaattgaatggggcagactgaggcttgtgaggaagatcagagtctggttcttgacatgagatgcccttcagacatctcttcactcaggtccaactagggatacagaaacactgaatatttcaacagcagaaattgaatggggggattgatagcgctggcgagggaagcagctggaaagagacagatggcaccctgagacagcccagaggtgaataggacccccaggctgcagggataaagctcagtggtggtgttacctcaccggggaccagggtcacacagcaaagctggaacaacagaggcgtgttgtgggggagcctcagaggggacaaaacctctgcctgagatcccaccccaggtgggcatgggggccactgaggttggggatgaaaatgccggtaccgtcagtgcacagccctgttccagacagtgctgcctggaagatttctgggctctcctgaggcgccaccccgcacctgagccacctccttggactcctgtcctctaccccttgaggacctccctcccttctaccctagctgtcttcttgaacttgggactctcctttcccaagacttccatcactagctcctggagggactggactttgcatcttcccttcgcgtggagcctcagtgtgagaggccctagccaatgcgtgcatgtcagaggtggtggggaccacatcagaagaagaggggggtgatgaaattaacaaataaaaagtatggggaaaaccca

SEQ ID NO: 8223 - DNA, 1007 bp, Homo sapiens
ctctattacccccacgattcttcaccgctgctgaccacccacactcaacctccctctgacctcataacctaatggccttggacaccagattctttcccattctgtccatgaatcatcttccccacacacaatcattcatatctactcacctaacagcaacactggggagagcctggagcatccggacttgccctatgggagaggggacgctggaggagtggctgcatgtatctgataatacagaccctgtcctttctcccagtgctgggatttctccatgtgagggggcagcaggacacccagggatctagcgtgggggaggagaggagcctaatgagaaaatgaccatctaaagcctgcccttcattggtctggttcacgtctccaaaccagcttggatggtagcagagacttcagggtgctccagccaaacgtatttgggcatcaccatgacctgggaggggaagatgcactgagacgtatgaggcttccagcctagcagccagggccctagcacaaacaggaggctcgccccatctgagcaactgcaggagaggttagtacagtcatgcattgcttaacgacagggacgtgtcgttagaaatgtgtcgttaggtgattttatgaccataggaacattgtagcgtgcacttacaccaacccagatggtacagcccaatacacacccaggatggacgctagagtcgactgctcctaggctacaagcctgcagtgcatgttatggtgtgaatactgcaggcaatcttaacaccacggcaagtatttgtgcatctacacacatctaaacatagaaaaggtacagcataaatacactattgtcatctcagcagaccaccgttctatacgcaattcgtcgctgacccaaacgttgctatgtagcatctgcgtatcgtgggataattgacatgagggcttgagagaactccagaaaaaaatgggttagcattttcccagagctgttatcattgggtctctcttaccaccat

SEQ ID NO: 8224 - DNA, 199 bp, Homo sapiens
gaaggcacttctgggcctgggtctgaggacatcttttttgactgggagccttcttactgttgaggttcaacaagctgaggagtagatgggaatttgagggagaatacagagatactatgaacgtatttgacatttttaatacaatttctgctataatttttgtatgcagtaggcgttactaataaacatttctgctgtg

SEQ ID NO: 8225 - DNA, 443 bp, Homo sapiens
gccctcccttggctcactgtccccttctgccgccagccctagccagtaagaggtgggatttctaagaccgactgtatgagctcgcctcttccagatagctggcagagggcagggcaagggattggccatttatactgggctcgagctcagaagcccgaggaactctttgctcccctgctttggggagatctcaaaccatggacgtggagctgtggtttgacagcgctggctctgcttctccccacacacttacatggcaaaggtaaaaagtctgctactatcgtgggttgatgaggattgtgggcaaacaggctctcttgttaaaagtttaaactggtgtctccactttggccatatgacggtatctaagaaattgaaaatacatacatgcttgtctcaactcttccacttgtaggaatttattctataaactcatgaatgtg

SEQ ID NO: 8226 - DNA, 745 bp, Homo sapiens
gtgcagcttaagcctctccacggtgacgggtggctctgtggctggtaggactcacccatgatatggggtgcaggaactctgggggccctgaaggatttgcttccctcccctgggaaggcagagggctcttaataaagaggacccagaagattcttatttagagcttcagtctttggagcacacagggccttcgtgagacagtgaaatcagataataatgagatcttttgttaaaaaaaaaaaatgggaagggagtgcgggagagaaatggtttgtgtctcccttattcccagttaaatacctagctgcagattgtgccatcacccttcattcttcccagatggatgccatgggctatgggagcaaattgccctggacctttgcctgaatgggggcaggaaaggtgaggtgttgctggcctgtaatgccaccaggtgagttccagatgtggagcaacttgggcttttggggatggggcagcaaagttgggagctggaccccaattgagtgggggtagcaattggagtccttgtgtctcttttccaccccctgccatcctcacttagaggggccatggcactagatggcactagtcccccgataatttatgtctcgttgaaataattttgtatatcattctagtcctgaaatatttttttcatatgtgtaggtgaaatggtatgaataagctaacaggaatagtatctaaaaacagaaaacatccatattaaaatgtctaaacaggg

SEQ ID NO: 8227 - DNA, 65 bp, Homo sapiens
agagtgcagccccgcccccctgcctcacccacaaactaagtcttaacaaaatccaaattaccaac

SEQ ID NO: 8228 - DNA, 352 bp, Homo sapiens
atgtgagaagtgtgggaagggctttggctgggcctcaactcatctgacccatcaattctccacagcagagaaaaaccattcaaatatgagaactgtgggaagagctttgtacatagatcatatcttttttttttttttttgagacagagtctcactctttcacccaggcctgactgcagtggcgctatctcagctcactgcaagctccgcctcccaggttcacgccattctcctgcctcagcctcccgagtagctgggactacaggtgcccgccaccacacccagctaattttttgtatttttagtagagacggggtttcaccgtgttagccaggatggtctcgatctcctg

SEQ ID NO: 8229 - DNA, 851 bp, Homo sapiens
ttgttcatatttatggggtacaacgtgctattttaatgtgtgcatacaatttatagtgatccaatcagtgtaattggtgtatctgttacctcaaacatttaccatttctttgtgttggaaaattcaaaatccatttgagaggagttggtagacagcaagggaagggtccctggagacccccagccaaacgggtcagtgtctcatccccacataacacaaaaagcagcctggggaagacaatcaagctacaggcactgataagggaactagcacaggggattgtgcctggagacatgcccatggctgcacagatagaagaacctccagcccattcaggtaaaaactcgcacaaacctccggctcactcagttaagggaacaagaccagacacagaaatgcctttgtcctttgtataatcagcaggctccgaggaaaaagtttcttcttttgtgggcatgaacacagtgggcttcagtaggttcaggttggcactttcttttgtggaaaaggaaaagcccagcctctgtaaatcatcacttcagctcctgattggtcccaggccaagctgaatagcccttaggaataatcacttcaactcctgattggtcccgggccaagctgaatagcccttatgaatcatcacttcggttcctgattggtcccgggccaaggtcccagaccaagctgaatcacgctttctccaagacagcccgcaggctaagtgcattccttccccttcccagtccataaaaaccccggaccccagcctcatactgggcaacttatttggatccccatctccactgtggagagcttttttctttcacttattaaacttttactccaatttc

SEQ ID NO: 8230 - DNA, 2456 bp, Homo sapiens
gttgtacatatatatgggatatggtatgaaattttaatatgtgtatataatacgtaatgatcaaattgatgtaattagtgtattaccttaaacaattaacatttctttgttttgggaaaattcaaaatccattgttctagcgatttgaaaagaaacaataaattattgttgattatagtcacctttggtgctttagaacactagaatgtatttctcctatctagcagtacttatgtatcttgttacccaatctttggctatctcacctaacccctacacttccctgcttctagaaccactgttttactcactaattctatgaaatcaacttttttagcttccatatgtgtgtgaggacagttagtatttatcttaccttgcttagcttatattgtttaacatgtcctccaaagctcatctatgttgccacaaatgacacaattttgttttctttttatgcccaaagagtattctattgtgtatatatgccaccttttcttcatttatctattgatggacacataggtgggttccatatcttaactattgtgaagaatagtgctccaatgaacatggtagtgtagatatctgatccacatactgatttcctttgctttggatatactcaatagtgggattgctagatcactcgaatcttatgcctcagaggcttgacacaagagcaaaactatggaagtgtggctagggtgatatggcttcataccacctcaggcctcaagtcctcaactgcaccagagtgtccacgttggacagaatccttagtaatgaggtgtgtgataaagtctctgctcagttgtctataatctcatttgagagttcacaaaggggcaaaacattaaaaagaggcatatggtaagcacttcagtgtgtgtttatatcataatttatcacagtccatactgataatatatttcatccaggcttgtaggacagaaaacatttgtttaagttaaattcagtgtttcaccatagctcagcattctcccatcatcctaggaccatcgtagtagagaactcttgtaaattgtgcagtagggttgcaaacagaacttacgcttgtcattcaggagacaggccttagaataagagtttgttcacacatttacaaaaccctaatgatgaacatgtcaaaagtggtgaccactagaatgtcaactacaggtaccttgttttctgcatcctcaggaccttaacactgattagcacttacatgtttagtatgtgttaaatgactcaaaaggagaaaatatgatattttaaaattgcatctaggagagaaaatctacaaaaaataattcagggacacgagttaaaatgcagaatacactcagttctgcaatccaaagcattattttgggtaatcttaccctgttgcacttggctgctggcttcccctcatcctctgttctgaagtttactactagtggctttgtctaatgctccattggttgcatacaatataaattcaacaatcatttgtaactcttctcacactacaggctgaaaatggtttgttaacttgtcaataacagtccactgcatatatcacaattacatttttttcaacagtgttaaggcaaaatttatagtaatactttttacgtggcagatgtagttacgttggaaaaaacttccttagttctgaattctcatgattgcttctgtatttccatgcaggccttgatataatggccttctaattgtggtagcatttattttatcaaacaactcaggtagaagctatgccaatttgacaatttttggaaacctaacctaatattctcttcctatctctatgaaataccaagagaaacctatcggagtttggtaatttcatgaaatgtatccatgattggggtaggagtgacatttacatgctcttctttattgttggcagtaaaaataagtcttttgtaagcagtgtatatcagaatgtataaggtacaagtgttttacctggaaatgatgggataggaaattatgattatgatgttaaaactgtgaaaagtagaaaaccacatggatgatatcaccccattttaaaatggaataagtattcaacaagaatttgtgtgaaatgcatttattcctataacataagaccaataaaatgagggaaccagacatacagtaaaaggagaaaaacataatgtgagctttgtgaaatctgactgtaaccttcataacataatcaaatatctttgtgtgtttctgggactttttaatgtgtatatacgtaatttgtgaacaactattctttcctctggcaatgaatatttgctggtatttttccattttataattttatgcattttttctcagtgaacatcagttttatcaaagcagtaaatttagtgcaataaatttgcaaacttattaacgttaatcacttacctaccaggactcagaatctcagaataaaattgctctatatt

SEQ ID NO: 8231 - DNA, 77 bp, Homo sapiens
gttatacatatttatggagtgtgaaatttgatacatgtatataatgtgtgctgattaaatcagtttaatttcacctg

SEQ ID NO: 8232 - DNA, 712 bp, Homo sapiens
gtgttgtacatatttatggggtacagtgtgatatttaaatatatgtatatgatgtataatgatcaaatcagtgtaattagcacatttatcacctcaattatctcttttttgtgttgagaaaattaaaaattcattgttccagcagtttgaaaataaattgttgtcgatgatagtcacctttagtgctgcagaacagcagaacttcttcctcttatctacctgtacttttgcatccattagccaacctttggccatcccacctatcccttacccttccctgcctctagagccactgttctcactacttctaagaaatcagctttttaagcttccccatgtgattgaggacagtttgaagttagtgtttcagccatagctcagcataccccagtggtcgtgggactgtcagagcagagaatgctgcagggtttctaacagaagtttgacaattagttattattcaggagacaggtcttagtataagagtttgttcacacactttcaaaacactaatgatgaacatgtcaaaattgatgaccactagaatgtcagccacatgtgtctttgtatttttgctgcatccttacattgcttgagtctggaagattgaggctgcactgacctatggtagtgctactgcactccagccagggcaacagagtgagaccctgtctccaaaaaaaaaaattaaataaatacctttctttgtttc

SEQ ID NO: 8233 - DNA, 210 bp, Homo sapiens
ttattgtccatatttatgggttacagcatatttcaatacatgtatacaatgtataatgatcaaatcagtgttattagcatatccatcacctcctttatcatttatttgtggatcatttatcatttctttgtgctttgaacgttcaaaaactgctgttctagttatttgaaaataagttattattaattatagtcacctttagtgctgtgg

SEQ ID NO: 8234 - DNA, 40 bp, Homo sapiens
tgatgtgatggtgcaataaagtcttcactcagtcttcatg

SEQ ID NO: 8235 - DNA, 367 bp, Homo sapiens
ctgttgtactcatttatggggtacagtgtgatagttaatgcaagtatacaatgtgtaatgatcaaatcagtgtaattaacatacctatcacctcaaacatttatcatttatttatgttgggaacccttaaaattcactgtcctagctatttgaaaataatacgttgttaattactgtcaccctgtagtggtgtaaaacactagaacttattcctcctacctgcctgtatttctgtattcattaaccaacctttggctaccaccctgcctcctcacctctaagaactactattctactctctacttctatgaagttaactttttgagcttccacatatgtgtgagaacatgtggtatgtatctttctg

SEQ ID NO: 8236 - DNA, 396 bp, Homo sapiens
acttggatttgaagttagaagaaatgttggaagtcatttatatatgaagaaatgttggaaggactcatatatgcatacattccttgagtgactatgaatgactgccgggcagtaacttctgggctgtggttgtaaactgtgagcactacaaaatgtttttccttattgataccatattatggtaggaaagacatggaataaaaaatttagatagtatgtcagtagttgtgtttttaaatgggtttcattagtgcttagcaattgggagcttggtggaccatctcttggttttggaccatctcttggtttctgtcagtatgtaaaccagaaacttcaaatgtgtcacaaaagatgagcagaactatcccgaggttcattaaagtcttttactctgtc

SEQ ID NO: 8237 - DNA, 437 bp, Homo sapiens
aaatgagaaatgtgttaccaacttttgtctgaatgcacatcttcaagtttttggctagtccatgctggtggtaaaccctgtaaaactactgagagtggaagggggtttgttcacacttggaatctttctaacaaatccatcaagatgataacacagaaccatgaacaggaatagaactcgtatttaggggagaaatagggctggtggctctcttggtaagatctagttaatataaatgatcacctttcattgtgaatatatgcctgaagataatgtgtggaaggatatttgccatatgctaactggttttttggccagggagagttttgggttattatcccttttctttaattttcattttatacttacagtgatcattattttcataaaagctgtaaagctatgaaaaatgaataaaattactaaaaattttctgt

SEQ ID NO: 8238 - DNA, 642 bp, Homo sapiens
tggtgatgaatctattaatcatgatgagtgtgataggggtgctcttcaagacttagacttcccattttcctcagaaaatccacacagcacagaatatttataaaatgtcatgttttaagaattcatgagctgagtttttatagttatctgaattccattgaagaaaacctatttttgtatgaatatgaccagtttcaagcagagcccaaaatgtcacagttgtcaagagaacacacaacagagaaaccctataaagaatgatacaatatgtttcaatcagaaccttcacatccaataagcaatatgcaggagtgaagccttcaaaatgataagtaaggtcagaatttagcaaaagtataatgagggacatgacaaaatctgtgtccactagaatctaagctccatgcaggaacattgtttactgctgcatgatcgtgaccttgaacaagtacctaagaaatagtggcttccctggaattgtttaacttgataggaaaaatctatcatatataggacatatatttgaatattttagtgagctcagccccaattcgtcattataattgtactgggaaaaggattcttgcaagaagccttaaaatgaattcaaggaaatgacatttaattaaaacacataaaacc

SEQ ID NO: 8239 - DNA, 1771 bp, Homo sapiens
cagcgtcgggactgagaggggagagagactggagctggcaaggacgtgggcctccagagttggacccgaccccaatggatgaagaccccctccaaagagaccagcctccctccctgtgccagacctcaaaacgacgggggcaggtgcaagttcataggtctccaagaccaccctcctttcatttgctagaaggactcactagactcaggaaagctgttaggctcacagttacagtttattacagtaaaaggacagagattaagatcagcaaagggaggaggtgcacagcacacgttccacgacagatgaggcgacggcttccatctgccctctcccagtggagccatataggcagcacctgattctcacagcaacatgtgacaacatgcaagaagtactgccaatactgccaaccagagcagctcactcgagatctttgtgtccagagttttttgtttgtcttgagacagggtctggctctgttggcagactagagtacagtggtgagatcacagttcattgcagccttgacttctcaacgccaagtcatcctcccacctcagcctcctgagtagctatgactacaggtatgtgccaccacgtctggctaatctttttattatttgtaaagtcgaggtttccctgtgttgcccaggctggtcttgaactcttggctccaagtgatacttctgccttggcctcccaaagtgctgaattaagcagctcaccatccacacggctgacctcatacatcaagccaataccgtgtggcccaagacccccaccataaatcacatcattagcatgaaccacccagagtggcccaagactcccagatcagctaccaggcaggatattccaagggcttagagatgaatgcccaggagctgaggataaagggcccgatctttctttgggcaaggttaagcctttactgcatagcagaccacacagaagggtgtgggccaccagagaattttggtaaaaatttggcctctggccttgagcttctaaatctctgtatccgtcagatctctgtggttacaagaaacagccactgaccctggtcaccagaggctgcaattcaggccgcaagcagctgcctggggggtgtccaaggagcagagaaaactactagatgtgaacttgaagaaggttgtcagctgcagccactttctgccagcatctgcagccactttctgccagcatctgcagccagcaagctgggactggcaggaaataacccacaaaagaagcaaatgcaatttccaacacaagggggaagggatgcagggggaggcagcgctgcagttgctcaggacacgctcctataggaccaagatggatgcgacccaagacccaggaggcccagctgctcagtgcaactgacaagttaaaaaggtctatgatcttgagggcagacagcagaattcctcttataaagaaaactgtttgggaaaatacgttgagggagagaagaccttgggccaagatgctaaatgggaatgcaaagcttgagctgctctgcaagagaaaataagcaggacagaggatttgctctggacagagatggaagagccgggaacagagaagtgtggggaagagataggaaccagcaggatggcaggggcaaagggctcaagggtgaggaggccagtgggaccccacagagttggggagataaaggaacattggttgctttggtggcacgtaagctccttgtctgtctccagcacccagaatctcattaaagcttatttattgtacctcc

SEQ ID NO: 8240 - DNA, 748 bp, Homo sapiens
tgggtcctgggccaggccagccagggagaagacaaggccccagccctcctctgggagcctcacacctgagaccagcaggacaaggccattgggggctgtggggccgatgaggtggactcagccaaagactcagcagcacatggggcaggtgtcctggcagggggacaggagactgtaacaggcccaggtccttgtgcagcccgtgaatgcacgcccgccttcggtctgttccttcaagcaagctggcctgggccatgtgcctgtgaaaggcaggctctggcccctttccatgccaaagtcccccaagatctggatatctggggacaagatggtggcctcaggcctgcctcccaggcagttggctgggctcccaactgtctgtcctcaatgccctaccccaactccactagtgaccctcagagtcttctccccttaggacaaggcagacaccccaccatgcgggcctcaggtggcagagaggcccagcctcacaggcctgtggccccacacaccagtcccagcaaggtgaccacggctgctggaccccttccctgttcaggcaggcccagcccctctcagaacctgctgccagctgctggtcttggcccccaccctgaatcttactgagtccctctgggcagcagctcccttctccaccccaccccagcacccgtcccaaatgtggcctcagcttgtcctccccttccccaaactatgcattcattcagcaataaatgagcctttgctg

SEQ ID NO: 8241 - DNA, 429 bp, Homo sapiens
gggggatgggggggcagatcttggactcatgaggaggggcccccctgccctgtggggtcaacccttctggaaactgtgaagatctcactctgccccccccccccatcttcgggaccaggatttgcacagaagcacatgcacctacccatacaccccctcttctgagcacagatgttcccccatctcgctccctcccaggactctgaccccagcattctcaggcaccagtccctgtccggaatgccacccacatcttccatttccatgtcccctcccagagctggtggacccagggaacagccactcccctccactctctaccagataactgaggaggggagaggtgggccgtaacgggcacggatcacgatgtaaattattaagcattttggttggatttcttttgtaataaactatttttgtaccata

SEQ ID NO: 8242 - DNA, 191 bp, Homo sapiens
aggccaggtgagtccattccctaaccctccctggcccactccaccccactccaccctcctccacctggaggtgacctcatctaacccacccctctctccgcctacagggcacccagatgtgctgctcaagggagccccaagggctggaagggggttgtgaaaccgaaataaactgccaagcctggtctgtc

SEQ ID NO: 8243 - DNA, 623 bp, Homo sapiens
gtggcctgctatctgcaatgaccaccatagcttaaccccatccccaccctcaaccccaagctcaacccataacctcaaccacatcttatcctccaccccacatcccaccacatccacctccatccccaacccatcctcatccccaactacagccccaaacccagccccagactaatccacagccatccccaactcatcctcatccccaactgcagccccaaacccaacccagggccatccccaaacccatccccaagccaaactcaacaccatccccttccctaatcacctctcctgcccctagctcagcctcatccccaactccatgcctgtctccaatcccaaccctgcccccaatctcccctcaactccaatccataacccccttcaaaccatcctcaactaagctcctctccagccctggccacatccccatcctcccccaacctccagccccaacacccatcatccccctgagctcacccttaactccaatttatcctccaagcctatctctcaccatccagccctcacctagccatttcccaaccctagtcctccaccgtcccgaagccaacttcacccatgtccccatccccaatcttgtccccattcctgactcc

SEQ ID NO: 8244 - DNA, 499 bp, Homo sapiens
gccaagaacctcctagaggctgtccctggacctggagctgcaggcatcagagaaccagccctgctcacgccatgcccgcccccgccttccctcttccctcttccctctccctgcccagccctcccttccttcctctgccggcaaggcagggacccacagtggctgcctgcctccgggagggaaggagagggagggtgggtgggtgggagggggccttcctccagggaatgtgactctcccaggccccagaatagctcctggacccaagcccaaggcccagcctgggacaaggctccgagggtcggctggccggagctatttttacctcccgcctcccctgctggtccccccacctgacgtcttgctgcagagtctgacactggattcccccccctcaccccgcccctggtcccactcctgcccccgccctacctccgccccaccccatcatctgtggacactggagtctggaataaatgctgtttgtcacatcaacacc

SEQ ID NO: 8245 - DNA, 320 bp, Homo sapiens
cctggacacagacagagacagagccaggcccggccctcccgcccccgacctgaccacgccggcctagggttccagactggttggacttgttcgtctggacgacactggagtggaacactgcctcccactttcttgggacttggagggaggtggaacagcacactggacttctcccgtctctagggctgcatggggagcccggggagctgagtagtggggatccagagaggacccccgcccccagagacttggttttggctccagccttcccctggccccgtgacactcaggagttaataaatgccttggaggaaaacatc

SEQ ID NO: 8246 - DNA, 509 bp, Homo sapiens
gccctcctggcccccgccttccacgcccttccgattccacctccacctccacctccccctgccacagaggggagacctgagcccccctcccttccctccccccttgggggtcgggggggacattggaaaggagggaccccgccaccccagcagctgaggaggggattctggaactgaatggcgcttcgggattctgagtagcaggggcagcatgcccagtgggcctggggtcccgggagggattccggaattgaggggcacgcaggattctgagcaccaggggcagaggcggccagacaacctcagggaggagtgtcctggcgtccccatcctccaaagggcctgggcccgccccgagggggcagcgagaggagcttccccatccccggtcagtccaccctgccccgtccactttcccatctcctcggtataaatcatgtttataagttatggaagaaccgggacattttacagaaaaaaaacaaaaaacaacaaaaaatatacgtggg

SEQ ID NO: 8247 - DNA, 142 bp, Homo sapiens
acgccgaagcctgcagccatgcgaccccacgccaccccgtgcctcctgcctccgcgcagcctgcagcgggagaccctgtccccgccccagccgtcctcctggggtggaccctagtttaataaagattcaccaagtttcacgc

SEQ ID NO: 8248 - DNA, 119 bp, Homo sapiens
ggacctgaagggtgacatcccaggaggggcctctgaaatttcccacaccccagcgcctgtgctgaggactccctccatgtggccccaggtgccaccaataaaaatcctacagaaaattc

SEQ ID NO: 8249 - DNA, 189 bp, Homo sapiens
aatgttcataaaagccaggtgtggttgtggcgggtgcctgtagtcccagctactcaggaggctgaggtaggatgatggcttgagcccaggagttcgagaccagcctgggcaacacagcgagatctcttgggggtaaaacaaaaagaaaaaaaaaagttcatacttctccaataaataaagtctcacctg

SEQ ID NO: 8250 - DNA, 311 bp, Homo sapiens
cagccagaccccccatcagtggacaaggggagagtcccctactcccctgatcccccaggttcagactgagctcccccttcccagtagctcttgcatcctcctcccaactctagcctgaattcttttcaataaaaaatacaattcaagttgcttctcatggatggcactgcttttctgaggactcaagggccaagatggaggggctgactcagtccagccaacatttaatgagcacctactttatgtatggagctctaacccatgggtccatgggaataaagcagtgaatagtaacaataaataatcgtaac

SEQ ID NO: 8251 - DNA, 443 bp, Homo sapiens
tcgagactggtcctcacctgctccggctcctggcgaccactacccctgcgtcccggccccctcgcctcccctccctgtcgccctttccctggacagatcaggccggggcggtgggaggcccgcctcaggtcagggcccagcgtgtgatgtaggggccggggcaggccagggtttgtttgtggaggcgctgtctgtccctctgtccctctgtgtttccagccatctcgccctgccagcccagcaccactgggaatcatggtgaagctgatgcagcgttgccgagggggtgggttgggcgggggtggggccgggcccccctacgggatgcccacggccgttcatcatcttgtccctcgtccccctaccacactccccctcctagaccgccgccctttaacacagtctggatttaataaattcatatgggtgtttaacttaaactc

SEQ ID NO: 8252 - DNA, 404 bp, Homo sapiens
ccccgcgatgccagaggaggggcactgggtggggagggaggtggaggagccgtgcaatcccaaccaggatgtctagcacccccatccccttggcccttcctcatgcttctgaagtggacatattcagccttggcgagaagctccgttgcacgggtttccccttgagcccattttacagatgaggaaactgagtccggagaggaaaagggacatggctcccgtgcactagcttgttacagctgcctctgtccccacatgtgggggcaccttctccagtaggattcggaaaagattgtacatatgggaggagggggcagattcctggccctccctccccagacttgaaggtggggggtaggttggttgttcagagtcttcccaataaagatgagtttttgagcctc

SEQ ID NO: 8253 - DNA, 111 bp, Homo sapiens
gcagaagagtggggggtggggaggacaagggggtgggtaaggggctcaagctgtgatgctgctggttttatctctagtgaaataaagtcaaaagttatttaattcccgtca

SEQ ID NO: 8254 - DNA, 1014 bp, Homo sapiens
agatattgtgttcacttttctgcttgaggctaaggcactgtatcccaggcctcccaatgttcccgagccaggaactctgggccccatggagttatgagctcccttggaattttgagccaagctttaagcaagtctggactcctgagacctcctgggtctagtcagtaaaattctgcaactctaggaattctaagatcccattggaaggaatgctctacctcacagaactctgaaccctacagaaatatgggcctgctgccatttcctgaagaccggggcatcggggtggggtgataaaggatacaacctgcacagggggaagttattaaagaggctgcaaagtccagccaccctgaagatactccccagtgctcccctcctgctaaagaaccagttaccccaggaaaattcgactcctgtttttctttaattaactataccgacggggatggagtcatctttaggggctggtagggtggttatccaagggctgaatccagtggagctgggccaagtacgacaggagtccagataaaggtgtaggggctgcacggccgcaagtctcctggaaaggctggagtgaccggcatgccgggattgggagattaggatttgatttcattttggggcgggcggtggctcgtgctgggtcacgtggtcgtgcccaagcgctcctcctgttgccccacctgtggttgctgtggactgcacacgacagcagattcgctgtcccctcgttggaggcgaatggtcggaccccgagtggcggcgcccctgataaaaggccgaggattcgcgatcagggtgcaacttcactccctcctcttttctctccagccttgcagcgtggccgttcacatcacgcgcttcactaagcctcctatcactagtaacctttcagcgcattgtttaaaaagaaagcagtttctgtccctttctgtagttcctttaagttcaggatgtaagcgaagccttccattaagtaaaggtgagtgtcgtttcgtctcagtcgcg

SEQ ID NO: 8255 - DNA, 2845 bp, Homo sapiens
agctgaccagctcgcgccctcctgaggccctgatggcagctctgcgccaggccacagcagccgcccgctgccgctgccgccagccacagccgttcctgctggcctgcctgcacgggggtgcgggcgggcccgagcccctgtcccacttcgaagtggaggtctgccagctgccccggccaggcttgcggggagttctcttccgccgtgtggcgggcaccgccctggccttccgcaccctcgtcacccgcatctccaacgacctcgagctctgagccaccacggtcccagggcccttactcttcctctcccttgtcgccttcacttctacaggaggggaaggggccagggaggggattctccctttatcatcacctcagtttccctgaattatatttgggggcaaagattgtcccctctgctgttctctggggccgctcagcacagaagaaggatgagggggctcagcggggggagctggcaccttcctggagcctccagccagtcctgtcctccctcgccctaccaagagggcacctgaggagactttggggacagggcaggggcagggagggaaactgaggaaatcttccattcctcccaacagctcaaaattaggccttgggcaggggcagggagagctgctgagcctaaagactggagaatctgggggactgggagtgggggtcagagaggcagattccttcccctcccgtcccctcacgctcaaacccccacttcctgccccaggctggcgcggggcactttgtacaaatccttgtaaataccccacaccctcccctctgcaaaggtctcttgaggagctgccgctgtcacctacggtttttaagttattacaccccgaccctcctcctgtcagccccctcacctgcagcctgttgcccaataaatttaagagagtccccccctccccaatgctgaccctaggattttccttccctgccctcacctgcaaatgagttaaagaagaggcgtgggaatccaggcagtggtttttcctttcggagcctcggttttctcatctgcagaatgggagcggtgggggtgggaaggtaaggatggtcgtggaagaaggcaggatggaactcggcctcatccccgaggccccagttcctatatcgggccccccattcatccactcacactcccagccaccatgttacactggactctaagccacttcttactccagtagtaaatttattcaataaacaatcattgacccatgcctactccatgccaggcccagtgctggacacagagacatgaagctctgtctgtgggagacagggattctgacacagacaccggacaaaccattgtcttggggagcccagaagagaaagtgggcagggtggggtcattggggaagatgctctagaggaattaatgctggaatggggtgttgaaggatgagtaggagttagttaggcattgagtttgccctgggcaaaagcccagaagtgggagtatgtggtatatcttcagagaactgggtaatttcagtgtggctgctgtgttgggcatggatggagaatcagcaagagaaatgctgtattaggactaataatccatctacgctgcttaagcaaaaaggtatttgttggtttatgttacttaatagtccaggggcacctggcttcaggtaggtttgatccaggcatcaggccattgcatctattttttcagtgtaagttgaattctagtaatttttatcaagtaagggctcctttcctggtggcacagatgacttcagcagttagaagtttctatccctccagctttctgcagcagaaagaccctcattgtcagtttcccagcaaaagtcccagggcagactctcattggcccaaatgggccatgtgattttctctaaaccaatcactgtgactctagagtggccagactcagagctgcacttagtaggggttcctcaaaggaaggtcaagtgtcatgagcaggagaaaaggcatgggagctggacagattatagtggttgaagtctgtgcagtacagaagggcggagcttattcacacagcacctttggggccaaaatgaataagctggactttctccccatggcactggggaaccatggaagttcagggaacttcagggaagaggcttggtcaattcctgagagcatcctctgtgctggggacacagtggtaatcaagacagccccaacactgccctcatagagctcacagtccaatggaggaggcagatgtgtcctcaggcagcgactgggcagggctggtataggggagtccagaggtgatgcctgcctcagccagggagggcttcctggaggagaaggagccagctagacatggataggagtgcgttttaggcacagcaaatggcacatacaagggccagggagcaagagagaggacaggtcctcaacaaatggcatgtgactttgtaagtgtagaattgctgtgaggtatggggctaggggcgtcagtagggccttgaaggttatggacaggggcctgggctttcttccaagggcactgggggagccatggcaaggttgtaggtagggtagagatgggcgggtttgtgctatgtgcagggtggaagggagggaagttgacaggtcagaagatcaggaaagaggtcggggctggacagatggggagagcgcagatagatttaagagagtcctgtgaggcaaagtgggcaggacctggtaacaggtgtctggactgtggctttggctggctcagaaggtccccactggcgtgtgtggtctatgtagcctctgggtgtggagctgggatcttcaactggggacagtacagtaaagaacatcacagc

SEQ ID NO: 8256 - DNA, 163 bp, Homo sapiens
cgtccagtgaactgcgctggccgcagcttcttgggaacagtgcaggagggatgggctggtggggtgagagggggtctatcatctcctggcccccccttgcctctgggtacctggtggatagctgccttctcctgcgattaaaggctgtggacgtgacagtgag

SEQ ID NO: 8257 - DNA, 1265 bp, Homo sapiens
tctgcccccgggaaactgaggaactaaagaaagctgaaggtgcccacctgggccaccagaaggtgacacccccagaatccctccccagagactgcaccagcgcagccagcaggagcctggcctgggaggacgatttattattacactgggggtttccttggcagctggggtcatcagggtactttcaagaagggctcgtgcaggacatcaaacagcctccgggcctggatgggagggagaaaaaaatgaggaaccagtcattaaaggagctgtttcctgggtaaatctagagtggggttttggttctttattttcccctataccctcaagcatttatccattgagttacaaacaatccagttacaatctttttaagttattattattattattattttttttttttttgagatggagtctcgctctgtcgcccaggttggagtgcagtggcgcaatctcggctcactgcaagctccgcctcccgggttcacgccattctcctgcctcagcctcctgagtagctgggactacaggcccctgcccagctaattttttgtatttttttttagtagagatggggtttcaccacgttagccaggatggtctcgatctcctgacctcctgatgcgcctgcctcagcctcccagtgctgggattataggtgtgagccactgcgcctggctaagttattattatttttttgagacagtctcctggtgtcacccaggctggagtgcagtggtgtgatcttggctcactgcaacctccgcctcctgggttccaacgattctcctgcctcagcctcccgagtagctgggcctaaaggtgcccaccactatacccggctaatttttgtatttttagtagagacaggggtttcaccatattggccaggctggtctcgaactcctgacctcgtgatccacctgccttgacctcccaaagtgctaggataacaggtgtgagccaccgcaccctgccaagttattttaaaatgtaccattattattgactatagtcacctggttgtgttatcaaatagtatgtcttattcattctttctttgtgtgtgtgtgtgtgtgtgtgtgtgtgtgtggtacccattaaccttccccatctccctgccagcccctaactaccctccccagcctccaggaactatccatccactcttatctccatgagttcaattgttttgatttttagatacacaaataaataagaacatgcaatgtttgtctttctgtgcctggcttatttcactt

SEQ ID NO: 8258 - DNA, 2166 bp, Homo sapiens
actctttagacacacaaaacaaacaaacacatgggggagagagacttggaagaggaggaggaggaggagaaggaggagagagaggggaagagacaaagtgggtgtgtggcctccctggctcctccgtctgaccctctgcggccactgcgccactgccatcggacaggaggattccttgtgttttgtcctgcctcttgtttctgtgccccggcgaggccggagagctggtgactttggggacagggggtgggaaggggatggacacccccagctgactgttggctctctgacgtcaacccaagctctggggatgggtggggaggggggcgggtgacgcccaccttcgggcagtcctgtgtgaggattaagggacgggggtgggaggtaggctgtggggtgggctggagtcctctccagagaggctcaacaaggaaaaatgccactccctacccaatgtctcccacacccaccctttttttggggtgcctaggttggtttcccctgcactcccgaccttagcttattgatcccacatttccatggtgtgagatcctctttactctgggcagaagtgagccccccccttaaagggaattcgatgcccccctagaataatctcatccccccacccgacttcttttgaaatgtgaacgtccttccttgactgtctagccactccctcccagaaaaactggctctgattggaatttctggcctcctaaggctccccaccccgaaatcagcccccagccttgtttctgatgacagtgttatcccaagaccctgccccctgccagccgaccctcctggccttcctcgttgggccgctctgatttcaggcagcaggggctgctgtgatgccgtcctgctggagtgatttatactgtgaaatgagttggccagattgtggggtgcagctgggtggggcagcacacctctggggggataatgtccccactcccgaaagcctttcctcggtctcccttccgtccatcccccttcttcctcccctcaacagtgagttagactcaagggggtgacagaaccgagaagggggtgacagtcctccatccacgtggcctctctctctctcctcaggaccctcagccctggcctttttctttaaggtcccccgaccaatccccagcctaggacgccaacttctcccaccccttggcccctcacatcctctccaggaagggagtgaggggctgtgacatttttccggagaagatttcagagctgaggctttggtacccccaaacccccaatatttttggactggcagactcaaggggctggaatctcatgattccatgcccgagtccgcccatccctgaccatggttttggctctcccaccccgccgttccctgcgcttcatctcatgaggatttctttatgaggcaaatttatattttttaatatcggggggtggaccacgccgccctccatccgtgctgcatgaaaaacattccacgtgccccttgtcgcgcgtctcccatcctgatcccagacccattccttagctatttatccctttcctggtttccgaaaggcaattatatctattatgtataagtaaatatattatatatggatgtgtgtgtgtgcgtgcgcgtgagtgtgtgagcgcttctgcagcctcggcctaggtcacgttggccctcaaagcgagccgttgaattggaaactgcttctagaaactctggctcagcctgtctcgggctgacccttttctgatcgtctcggcccctctgattgttcccgatggtctctctccctctgtcttttctcctccgcctgtgtccatctgaccgttttcacttgtctcctttctgactgtccctgccaatgctccagctgtcgtctgactctgggttcgttggggacatgagattttattttttgtgagtgagactgagggatcgtagatttttacaatctgtatctttgacaattctgggtgcgagtgtgagagtgtgagcagggcttgctcctgccaaccacaattcaatgaatccccgacccccctaccccatgctgtacttgtggttctctttttgtattttgcatctgaccccggggggctgggacagattggcaatgggccgtcccctctccccttggttctgcactgttgccaataaaaagctcttaaaaacgc

SEQ ID NO: 8259 - DNA, 803 bp, Homo sapiens
ccacagggacccagaagacccgcttctcctttccgcacacccggcctgtcaccctgctttccctgcctctacttgacttggaattggctgaagactacacaggaatgcatcgttcccactccccatcccacttggaaaactccaagggggtgtggcttccctgctcacacccacactggctgctgattggctggggaggcccccgcccttttctccctttggtccttcccctctgccatccccttggggccggtccctctgctggggatgcaccaatgaaccccacaggaagggggaaggaaggagggaatttcacattcccttgttctagattcactttaacgcttaatgccttcaaagttttggtttttttaagaaaaaaaaatatatatatatttgggttttgggggaaaagggaaatttttttttctctttggttttgataaaatgggatgtgggagtttttaaatgctatagccctgggcttgccccatttggggcagctatttaaggggaggggatgtctcaccgggctgggggtgagatatccccccaccccagggactccccttccctctggctccttccccttttctatgaggaaataagatgctgtaactttttggaacctcagttttttgattttttatttgggtaggttttggggtccaggccattttttttaccccttggaggaaataagatgagggagaaaggagaaggggaggaaacttctcccctcccaccttcacctttagcttcttgaaaatgggcccctgcagaataaatctgccagtttttat

SEQ ID NO: 8260 - DNA, 524 bp, Homo sapiens
ggggcgggatccccgtgtctgttcagttagcatggatttattgagtgccaactgcgtgccaggcccagtacggaggacgctggggaaatggtgaaggaaacagaaaaaaggtccctgcccttctggagatgacaactgagtggggaaaacagaccgtgaacacaaaacatcaagttccacacacgctatggaatggttatgaagggaagcgagaagggggcctagggtggtctgggaggcgtctccaaggaggtgacacttaagccatccccgaaagaggtgaaagagatcactttggggagagctggagaacaggattctaggcggaagcgatagcataggcaaaggcccttgggcaggaaggcgctcagccttggctggagtagaattaagtcagagccaacaggtggggagagacagagaagtgggcaggggcacccaagttgggatttcatttcaggtgcattggagattcttaggagtgtctcttgggggtaatattttattttttaaaaaatgaggat

SEQ ID NO: 8261 - DNA, 42 bp, Homo sapiens
tgtactccagcctgggcaacaaggcgagactccatctcaata

SEQ ID NO: 8262 - DNA, 738 bp, Homo sapiens
caggggttgggaacatggtggtgggtatggctggagctcacaccacgaagctcttggggcctgatccttctggtgacacttcacttgtcccattggttaacatctgggtgggtctattacttactgtgatgactgctgtctcagtgggcatggtgttgatccacggggtactgtgataaccaccatggatacattttggtggcccactgggtactgtgaggactgctacattgatggatgttattggctaatccactgcatggtttgatggccaccatctcggttggccctttgggtgtgatggtgatagcatttcagtgacatcttctttggccccccccattaggtgctgtgcccacttcttttttggtgtacttggcacagtaggtgccaagttggccaccattctgtgtaacaccttttttggcccattgggtgctttgatggacatcatactgggtaggtgacaacgtcagtgggccaccatgtgccatgatggctgctgcagccccgtgttggccatgtcgtcaccattctctctggcatgggttgggtaggggatggaggtgagaatactccttggttttctctgaagcccaccctttcccccaactctggtccaggagaaaccagaaaaggctggttagggtgtggggaatttctactgaagtctgattctttcccgggaagcggggtactggctgtgtttaatcattaaaggtaccgtgtccgcctctt

SEQ ID NO: 8263 - DNA, 200 bp, Homo sapiens
gaagacatagaaagaaaatcaactttcactaaggcatctcagaaacataggctaaggtaatatgtgtaccagtagagaagcctgaggaatttacaaaatgatgcagctccaagccattgtatggcccatgtgggagactgatgggacatggagaatgacagtagattatcaggaaataaataaagtggtttttccaatgt

SEQ ID NO: 8264 - DNA, 411 bp, Homo sapiens
tggaacatcaggggaacgatgactcctggattctccttcctgggtgggcctggagaaagaggctggtgttacctgagatctgggatgctgagtggctgtttgggggccagagaaacacacactcaactgcccacttcattctgtgacctgtctgaggcccaccctgcagctgccctgaggaggcccacaggtccccttctagaattctggacagcatgagatgcgtgtgctgatgggggcccagggactctgaaccctcctgatgacccctatggccaacatcaacccggcaccaccccaaggctggctggggaacccttcacccttctgtgagattttccatcatctcaagttctcttctatccaggagcaaagcacaggatcataataaatttatgtactttataaatg

SEQ ID NO: 8265 - DNA, 3810 bp, Homo sapiens
gccggctcctctccccatctgccttctcctcccccagaaaggacctcaaccacactccacgccggcagccaacgcacaggatgggggcgccaggagaggggcccctctctcctctatgtaccccctgcccacctcgggcctacctcagccctcacccctctgcctgctcccaatctgggggctctctggggtggtctcagctcagtgacctctgggaggtggtccctggccccctcctccttctctcaggatttctcttggggttctcaatacttggttacctcattatccctttctctgcctctcttggctttattttggggaatcaggggtgaggagggttgggggggtcatatctgtgtttccaggttctggggagaacaatgatccacgggtcaacgtgatcacatttccttctatccttcttgtattattatttttatttttgtcaatttcatgatatggtttttaatcatgatgaattgcctggggtctgtaagaatgtgggactctgatcttccccctcttcaggtgtcagtgcggagaggctctgggccagacctcacccccagtgacttccgattgaggccaaagaccccaagctgcccgccagctctgactgccccttgcgctctgggcttcctgccgcccccagctttgcctggacactgacttcattcatggtcctcctacttcaggggcagcctcccagttcctctgcttccaaactatgcaacctccaacctgctccagttccagactgtataacctctgacctgcactggttctagaccacacaacctccaatgtggtctgctttagatcaccttcttcttcttccttcttcctcttcctcttcctcctgctcctcttcctcttcttcttcttttttttttttgacagagtcttgctctgtcacccaggctggagtgcagtggcgcgatttcagcttactgcagcctccgcgccctgggttcaagtgattctcctgcctcaacttcccaaatagccgggactacgggcatgtgccacattgcccggctaatttttgtatttttagtagagatggggtttcaccacgttgtccagtctggtctcgaactcctgacctcaagtgctccacctgcctcagccttccaaagtgctgggattacaggcgtgagccactgcacccggctagaactcactttctccaaatccctctgcttcgaatttcaccgtcttcagctctttctagttctgggcctcaccagcctctcattctgcctgttttcaaaccttacgatccccaaaaattgtctggttctgggcctctaactccctctggctctatagtctatgactaccagattcttttggttctagaattcactaacttcctctggttctagacctcttcctataaattaatccctcttgttttagatctcacaccctccaacgccctccggttccagatcttatattcagtgatttcctctggttctggaccccacaactccaagcttcctattggttccagttctcctgatcggtaatacatttggttccaaatccagacctcttaatctctctctttttttttttttttttttgagacagagtcccactctgtcacccaggctggagtacagtggctcaatctcggctcactgcagcctccacctcctgggttcaagcaattcttgggcctcagcctcccaaatagctgggattacaggcatgtgccaccacgcccagctaagttttatatttttagtagagacagtgtttcaccatgttggccaggctggtcttgaactcccgacctcaactgatccacccgcctcagcctcccaaagtgctgaaattacaggagtgagcctggccagacttcttaatttctaaatcacttttgttttagaccttatgaggctcagcttattcttctgcagttctctataaccaagactcattttctctcatcaaaaacaagtacagagagtttgatgtgtttatctcttttttcttcctcttcttttttttttttttcttttttgagatggagtctctctctgttgcccaggctggagtataatggtgccatctaggctcactgcaacctccgcctcctgattcaagtgattctcctgcctcagcctcctaaattggtgggattacaggagcccaccaccacatccggctacctttgtgtattttttagtagagacggggttttgccaagttggaggggctggtcttgaactcttgacctcagatgatccacccgcctcagcctcccaaagtgctgggattacaggcataagccaccgtgcccgaccctgtccttatcttataataaccagttcttctagaaccagacgatgctctagttctcctagattctgaacctcatgacctgtaccactcactagttccagactacacaacttctagaaggtgccacctccagggtcctgattcaagatctggtgatctgctgtttctctggttctagaactgacttacaagtgccttctgattctagacctcattccgtaagttcccttggctctagacttcatcatttccagctcctcctcactcaagatctgactccaaattaccctgggtctagaattcagccttcaaatatcttctgattttagactttgccttatacatttctctggttttagatcttaccaccctcaactccttctgattctagatcttatggttcccaaatctctctggttctagaactcagattttaggcttttgtttttccttttttttgttaaaaaaaaaaaaatagagacggggtttcaccatgttgcccaggctggtcgcgaactactgagctcaagcaattctccctccttggcctcaccaaagtgctgggactacaggcatgagccactgagcccagccaggctttttctaattctatgctttattctataaattcctctgcttctaagcctcacagcttccaactgcctttgatttcagatccaaattcctctgattctataattcagcctccaaatgcttctgattctggaatctagacttttccctaaagattcctctggttctgaatcttataacctcaactccctaattccagaccccagcctcctaaatctattctgggcttcccaccccactgaacttacccaattccttctttcagtcttaagttttcccattctaaacccctaccctctaggctgtgctgctcctggacttcatgcctctccattctcattgcctacaatctctgtgccccagaaccccctccacttcccaccccagccctccagacatgcacttaccttgactttaccccacatgtttggggcacctggggctccctcaccccttgggtggtttgcaatctgaagacttctccagccacacaggcacatgcacaggcacggtgctgtctgcatattgccaggtggggagagaagccaggacccctcagctgtctgccaccatctatgtgcctcccttaccccccagctttctttctacagatggtgctactcttggtctcccacaggaaaaggcctccccccttcttagccccatttaccccgtttgtggaaggcactgctcgctctgttttgtcagagagtggcctatccagattggtgctatgggggggtctgacccctccctcctccctctggaggtgatgtgggccctcaatggagggaattgtgctgggctagggaaaggggagggactagactggccacactggctctgaaactcaccaatctctatacaccataaagacctcaccttggtaggcaccag

SEQ ID NO: 8266 - DNA, 500 bp, Homo sapiens
ggtgacgggcggggcggcctgcatcccagggcccctccaatcccaccggacccaggccctgggctaggggcagagcaggccccgccccagggcaatgttggacccccttttactttgtaaagtttgtatttattcccctttaggtttgcagagggggtaggggcagagtcaggggctggccagagggtctgctccctggacagagaggaaggaggtggagcagctggggctgggggcacagcctgggcattctgtggggaggccgtcctcggggtggggtggggccgagtggctgccctgcccccctcatttgcatggctcctcccccactcaagcaatagggccccgccataggaagacccccagagagagggtcagcaggggggccccgcctgcgcctcccctcctatagccccatggtggggctaggctggggctcacccccctccccagctattttatgtctgtaattaaatatgttaaaataaagtcattatcgg

SEQ ID NO: 8267 - DNA, 1628 bp, Homo sapiens
aggccccccgggcagctggcgatgcccgttctcttgatctctctcttctcgcgcgcgcactctctcttcaacactcccctgcgtaccccggttctagcaaacaccaattgattgactgagaatctgataaagcaacaaaagatttgtcccaagctgcatgattgctctttctccttcttccctgagtctctctccatgcccctcatctcttccttttgccctcgcctcttccatccatgtcttccaaggcctgatgcattcataagttgaagccctccccagatccccttggggagcctctgccctcctccagcccggatggctctcctccattttggtttgtttcctcttgtttgtcatcttattttgggtgctggggtggctgccagccctgtcccgggacctgctgggagggacaagaggccctcccccaggcagaagagcatgccctttgccgttgcatgcaaccagccctgtgattccacgtgcagatcccagcagcctgttggggcaggggtgccaagagaggcattccagaaggactgagggggcgttgaggaattgtggcgttgactggatgtggcccaggagggggtcgagggggccaactcacagaaggggactgacagtgggcaacactcacatcccactggctgctgttctgaaaccatctgattggctttctgaggtttggctgggtggggactgctcatttggccactctgcaaattggacttgcccgcgttcctgaagcgctctcgagctgttctgtaaatacctggtgctaacatcccatgccgctccctcctcacgatgcacccaccgccctgagggcccgtcctaggaatggatgtggggatggtcgctttgtaatgtgctggttctctttttttttctttcccctctatggcccttaagactttcattttgttcagaaccatgctgggctagctaaagggtggggagagggaagatgggccccaccacgctctcaagagaacgcacctgcaataaaacagtcttgtcggccagctgcccaggggacggcagctacagcagcctctgcgtcctggtccgccagcacctcccgcttctccgtggtgacttggcgccgcttcctcacatctgtgctccgtgccctcttccctgcctcttccctcgcccacctgcctgcccccatactcccccagcggagagcatgatccgtgcccttgcttctgactttcgcctctgggacaagtaagtcaatgtgggcagttcagtcgtctgggttttttccccttttctgttcatttcatctggctccccccaccacctccccaccccaccccccaccccctgcttcccctcactgcccaggtcgatcaagtggcttttcctgggacctgcccagctttgagaatctcttctcatccaccctctggcacccagcctctgagggaaggagggatggggcatagtgggagacccagccaagagctgagggtaagggcaggtaggcgtgaggctgtggacattttcggaatgttttggttttgttttttttaaaccgggcaatattgtgttcagttcaagctgtgaagaaaaatatatatcaatgttttccaataaaatacagtgactacctg

SEQ ID NO: 8268 - DNA, 1545 bp, Homo sapiens
agccctgataacctcgcctttgtttttcgggggtctgtctggatgtggagaagctctgtgtgagcggtgaggggtggagggatgtcgcggagaggggaagggggaaactgaccaagaaagaaattctaaggagagcatgagagaaggctggcattggcaggaggagagcaccaggacgaggatgggaagcgacctccagatttatcaaatggtcatgcccactgggagccgtggatatgcgtggggacatcctgggtcatctcagtcatggagggagacggggatgtcacgccgtcccgcagggcccagcacagccccagacccgaaaaaagtgttctgcccaagattccgagagccctgcgctctagggcaggggcagagttttggaaacagtgcaggctctggagccagactggcgagattcaaatcctggctctatcgcttcggagccaggtgggcctgggggggcgtcgcagtctctctgtgcctcagttgcttccaggatgcgggacccttggctgcaggggttgcttccgccactagagggcgcgccggtcccgctcctggtggcccactgtggctgcccgggcgacagtacgcccagggcctgtgttccatagccatctactctcttgagcctttggacttctctccaagcccctgtgggaggcggacagcagtgaccacctccccttcttttggactgcgacctccttccctcctgggagagccctgtgacctgcatgctactcttaactgttctattcaagactgaatagaagtatttcagtcttgcagaggaggaaatgctcagagctccgaggtgcggctgtggtcgagaaccgggtgctgggccgggcgcgggggctcacgcctgtaatcccagcactttgggaggccgaggtgggaggatcgcttgagcccaggagtctgagaccagcctcggcaacatgccaagaccccgtctctatttttaaaaaagaaaaagaaccgacttctgaatcgcagctccactcatgactaatacctcattatttcagctgtctgcacctaattccccacttgcacggcagtgtagacaataaccatagctcacactcactgagcacctactgggtaccaggcaccattctcagtgtttcacctggatcaactaatgcgtccctcacctcagccctctgaagtgacagctgctattattttcattacacagatgaaaaagctgaggccagaatcgtgaagtcacttgctcaaggtcaggcagcttaggaaggggcagatcgggggcttgaacccaggtggtcaggctctggagcccacaattgtcttacccactatgcccctctctagtcatggtccccaagaggggcttggagacccacttagcaggtgaaagcaatggcagccttccttatttgattatgcacctaagaataaatggtatttgggcatgtattcccaatatgtgtatatttatttataaatatatacagatactattatctgtatgttagtaataaagcttaaattattccattttaaaat

SEQ ID NO: 8269 - DNA, 4388 bp, Homo sapiens
gccaccaagacctggggcgacaggagaaccggtcctctctctgacggggtggcatttggccttgaacaaaaccaagtccactggggacagaggcaggggcaagtggctctccccattaccttctcaagacctcagtgggagcaccagccaatggtaccatcggctgggctgccaggtaccctgggcctggcgctgcagacctgagctggcttggacccatttgaggactgaactaggcaggcaatggctccagtgccctccctctgttccctggaccaccaccccacgtagctgctcacaccagcctccgggtgcctccctctgcttgtacagagcccatggtcgggacagtgccctggcctttgccggggaggaggatgctctgagattcagggtggggctggcaacccctgaagagaacacttcctgttggtctgtctcttcccaccttccatctgcacacacccccaaggtaagggtacagcccggctggcggcctccttgggaacgtgtaggccacggctctgccaccactaggtacctgctgagggcgctggctctgcagatcagaacaacggaggatagctttgtgcctggacccagagagtgtgggactccccgcttcatccccaccgtcccactccacagccttcccgaaacattccctggcaaacaaaggaacactaggagaaaaaatggaaaaacccttccagtaattaaaaaggaagaaaccacagaaagaaaactacagacctcaagattccactctgtgcccgcctctgccgggagggagggaggcacacaggtggagctgaccctcgtctttgtggcagcaaaaccaggatgcctggagctgtggcctgagggcctgctggggtcccactcacccacttaggtctagtcgctagatcccccgttttcccaagaagagggttcgagcccttggtggggacagctggggagatggcagtgcaggctggaacctgggctgccccagaacacagtccattacgatagaaacactaattgagcatgtgcgtggggtgggggtgtgtgtgcacatgtgagtgtgagtgtgtgtgggcgcttggtggggggttggggacagctggaaggtgccaggtgcacttggggttggggttggtgtgttgggtgttgaagtggaatcgtttcatcccagccatggaggccaccagcaggagtgttcatggggatgtgggcgaggtggggcactttgaaggaatggcggtctgctggtgccctcgaaggggcatccttcctggtcttcgctgacccagaggcgctgtgcctgcatatcatccaccaccaccctagcccagccttcccactgccccaggaaaagctcttctcctggccacctctgccccccagcacctcaaacttgcatggctgggctgtggcctctgcggccaggaagcctgacactaggcaccccccaggcgagagctagtggggtgcagagggccccatgccagacagcccttggggctcgttgcactttaagaaataggatctgtggtgtattccagggggcctgatggacacctttcccgggcgtctgcagctgccctgcccgtgcccgcctgcagtggttggagacgggagtggcccttcggctcccgagctccctctggggacggctggctcactgtctccagttctcaatggccaacgaaggtgcttggaaacacctaaccttgcaagttttaccgccttttgaggaacacaaatcggagaacaaacccagggttcaggcgtgttttctgtgaatgttggatgatgaatttttgtctcttctggtggagctgtgcctggccctgtaggcccagggttggctggaaggtgacatctgtgtttcgttttagctgaggttggcagaaacgttcccaaactcccccagccctggaccccagcagatgaggaaacggccccatttactgaccccgcccccttttcgaggttatgctcacctggtcagctcctcacgtaattgggggtggagggaaagcatggtggtgccctgggccgtccctgtgtgaacgcaggcaaaagcagcccagtccccctcactgcttgagctaacactgccacctcttttgtgtgagcacaaaagccacgtcccaagccacctggcccgattccacagatgtatgtgcggccagtgacttccccaggagtgtggagggggtggtgaggaggagcacctgggctctctacccctctcctcacagaagtacctgaaactaggtctggggcactcccaatgcagcgccttgtcagccaaggtgggcaggcagggactgtggcagcttatgtccaaagggagcccccatgcacaggaagccacagggttcctcttgtttcccccgctaacttcagcctctcatctgctgctccgggctgagggactagaggacatctcggtcgtttgaggggcatggccagtcgtggcaggccggccttcagcgtccggtcagggaagcgtgcagcccaaatgggcacttgcatgggagccacagaggagcgtccctggggattgttgggaccatgctgcccccactcccgcttttgttggggctctaagttctggaaggtgtgtgcacagagggtgctcatgggactcgcatgcagctctcagcactgggtgggagggcgttggcttgtccagaatggggacgtggggcagccacccctgcccagcgagagcgcagacaccgtgtgaggggacagcagcccttggtgcaaagccagagactgatcctggctctgacggctgaagagggaagacccaaggctgggtggcgtggctcgtgaatccacttagaattcttggcttgtgtcgcatactgggtgtcacggcacacatttactctgcattgtccccgtctttcccatcgcctagcgtttggggaggaacagggagagagcttcggggcgtctgtctccgtgctctcctgcctccaccgccttggttttgcttcctgctggaggcagggcacctgctgcgacccagattcttctgcaggatgtgtctgtctttgtcacggtggacagagggtgacatcataggagcagctcgctggccagaaggggatgggggcatccctgtgcctcactcagctcctgctgctcttagggaaaggaggcctgggtcaagccagcatccccttggtaaagacccccgcaggccaccaggcattctggacacgcacacacacacacacacacacacacacacacaaaacttcacagcaggccagctgcagtgacttgtcatcaagagtcacctcagctgcgcccccctcccatcctttcctatgagaagccactgctttgggggcgccggctagaaaaagtagggtgcggtggccaggagggcccctgccgcgcggggggctgggtctggttgagtcgctgctttcccgagggcagcgcagggatccggggaagctgcggcagggagcgggcgccggcttcgtggctctgaggtgtaacgggggtgggctccctccctcggaggacatcgtctgtgtccaggtcagaaagtggcccaggaagggggcagtttctgtcgcgggtccggtgggggcgcggccgcggtgcggtcggtgcagcgtggccaatgcgcggcgcgcgcgggggacagagcaggaggcggtctgtcacctcggccactgctgacctgggctggcctcccccagccctcccgtggcggagccggcagcgatgctacaggcctaagttattgtttgcataaaaagaatcatgttccctgtgtacatttaagaaaaaaacaaaaaaacggaaatgtcagaattgtatggaaataaaacttgtttgaaaatttggaatagtgctgctgccagcttatttttctggtacttgtattttcacatgttaaatgatctttatatatgttgaattaacaaatattttgagtttctgagaaaaaacaaaacatattaatggtattgaaatgtgttagtagtctggctgtgtgcccaaaattctgtttcgcagcaaaagtgaagacctgtatgtaaagaaagtataacaattatttctttgtattttaggggctttaaccggaacatcgtctagctggtgttaggaatgtttgcttaatttccagacttttttttaaaaacacatcgtgggttttttgaggctccaacctgattagtgcatggtcagccctcaatgaaggctgaggcatctctgactgaggtgtttttgtttggttttgttttttaaaatcatgtatttgctacaaagtattgtacttgtctcaatgggaatggtgtaaaaaacaaaaggccttatgtgatctgtatcatagttaataaatgaatcttgtaaaaaaccaa

SEQ ID NO: 8270 - DNA, 107 bp, Homo sapiens
ggactggcagagctgccggcgccggaccctgcgacaaccggggtcccccaggacagtaggcccggctctgcccgtagccctgagaattaaacgccggctctccctgc

SEQ ID NO: 8271 - DNA, 1023 bp, Homo sapiens
actcaagatttggcagccccagagatgccaactgcagcatgcccacctgtattccctgtccccttccttcatgaaggcatctccaggcaaggaaaactgaagtcattggcccgatacaaaacatttcctgcaacgaaggaggtggtgccgacgtgctgcttcccatcaccagcagctgctcgacaaggggcgcagggtggctgtctttgttccagcactgttcaggctgcctgtcatcccgggcctgccagctcccctgagtgatgagcacttccaagcacccctctgccctttctctgtccttatgctgtcccggcctcgccagccctctggggcattgtgggagatgcctgccaggaatgagcaagctctgttgctcgggagcctcttgtcaccttcttggacttattccccacctgataccttatagagaaaagtgtgaattcaggtggagagtaggcccaggccccatgaggcaccagtggaagcacagctccaagttcagacaggtgcccttagagaggaaaaccatgacaggcaaatgcatttcctctggagtttgagaccctgacaaacaacaggtggcatctggtgtgctgttcttgagttttcgtttaggattagttgagttccagctgggttttgggagaaaggagatgctaccaagtcttggatgttagggcgagaccctgcaagttgagtattagagagcttgtctttcaaggcaggttcctggggcttcagggctaggagggaggagcctgcccttttaacagaaccccagtcacatgcggctcaagtcactcagaggctgttgcatttcagggctatgttggtcctttgtttacctcctaaaccacagctgtttgtgtttcacatatgttgtgaattttccttggttctttttaaaggaatgataataaagttacttgctttaggatttgcttgtttttcttccacttcagaagcttctgagagggaatgggatgatcctaccagttgccttttcagacctgaggctct

SEQ ID NO: 8272 - DNA, 273 bp, Homo sapiens
agctggctgcctgtgtgtgtgtgtgtgtgtgtgtgtgtgtgtgtgtgtgtgtgtgcgcgcgcgcgcgcgcgcgcgcgcgcgctagaggggtgtggctggtgggggacccttggggctgggccctgggacccagtgtgccccacagccctgtcagctgagggggtagcgcagcccatgctcttctgtactgtcatgcccgtctctggaatgtccactcccagagcctgccccagcccttcgagccccctccccaataaagaattcacatcctcc

SEQ ID NO: 8273 - DNA, 1240 bp, Homo sapiens
gcgacagcctcatgggccactgtggcccgatgtccccttccttcccggccattctccctcttgttttcacttcacttttcgtgggatggtgttaccttagctaactaactctcctccatgttgcctgtctttcccagacttgtccctccttttccagcgggactcttctcatccttcctcatttgcaaggtgaacacttccttctagggagcaccctcccaccccccaccccccccacacacaccatctttccatcccaggcttttgaaaaacaaacagaaacccgtgtatctgggatatttccatatggcaataggtgtgaacagggaactcagaatacagacaagtagaaagattctcgcttaaaaaaaatgtatttattttatggcaagttggaaaatatgtaactggaatctcaaaagttctttgggacaaaacagaagtccatggagttatctaagctcttgtaagtgagttaatttaaaaaagaaaattaggctgagagcagtggctcacgcctgtaatcccagaactttgggaggctaaggtgggtggatcacctgaggtcaagagttccagaccaggctggccagcatggtgaaaccccgtctgtactaaaaatacaaaaaattaactgggcatggtagtgggtgcctgtaatcccagctacttgggaggctgaggtgggagaattgctcgaacttggaggtggaggttgtggtgagccatgatcgcaccactgcactctagcctgggtgaccgagggaggctctgtctcaaaagcaaagcaaaaacaaaaacaaaaacacctaaaaaacctgcagttttgtttgtactttgtttttaaattatgctttctattttgagatcattgcaaactcaacacaattgtaagtaatgatacagagggatcttgtgtacccttcacccagcctcccccaatggcaacatcttgcaaaactacaatgtagtctcataaccaggatattgacattgatacagtgaagatacaggacattctcatcaccacagggatccccaggatgcccacttccctccacccccacaccccagccgtgtccctaacccctggcaaccaggaatccactctccatttctataatgttgtcatttcaagaatgttattcaatggaatcatatagtatgtaacctgttttgagcttaaaaaaaaagtatacatgactttaatgaggaaaataaaaatgaatattgaaatgtt

SEQ ID NO: 8274 - DNA, 202 bp, Homo sapiens
gctggagagacattgtgggtgtgtatcttcttatctcatttcacaagactggcttcaggcatagctggatccaggagctcaatgatgtcttcattttattccttccttcattcaacagatatccatcatgcacttgctatgtgcaaggcctttttaggcactagagatatagcagtgaccaaaacagacacaaatcctgccc

SEQ ID NO: 8275 - DNA, 594 bp, Homo sapiens
gctgggccaggagccctgcccacctccgtgcagctgacctgccctccagcccaggactaggggcaggactcttgcctgaacccccagcctgggcttagccctgtggtcctgtcccagtgcagagggcctggagcacggattgtgaataaagccgcacatgctgatacacactgttgttaggcctgcacctgcccatccagaaagcagcagctgccttgttagtcctccccagggtctagctttccttcttcctgctgcagggtgctgcctgaggggtcctgggtaggaggggcgttagagccagcagggacctcccatgtctccagattccaggtgcaggttcttagcacctccgcagccgctctctcttgagtccatcctcagtctctccttccccttgaagtagggggaccctgaatttgcccatccacctgggtcactttgagagttgtgcaggggggctgggagcactggtgttcacgtgggaccacaggctgcaccataagacccactcacaataaaaaaataaaaggccgagccgggcatggttgctcactcccgtaataaaaaaataaaagaacaggctgagccggg

SEQ ID NO: 8276 - DNA, 807 bp, Homo sapiens
caccgggccgcctccccttccccgtcccctcctcccgaagacgccgggacagtcgggtgtccgccctcagcctcctggggactcgagccggggatcccctgacggtttttcttgcctaagttatttgagtcacaaaggcctccttccctgccgcctgcttcagctgggttgctggggggtgggcgtggatttagggagggggctgtgatgtaaaacgtctcccctgccaaaggaggggcaaagtgctgtgtcagttcctgtttcttcccatttcctggcacactctgcccctctgtccgggggacacgcgcatgtgtttgccagggatggggccaccgggttgatgccaacgctccgggtgcctgtcttgtctgtgtggcttctcagatggtggagggtgctgggagctggcagggtccttccagacagtctcagcctctccccgccgcccccaacaggctgtcaaacaaaaccggagagggggtgggggagccagcctcccagcgtgctgtgcccgcaggcacccgtgtgacatccgcacgtccagctccgtgacctgtgtgtgtgtgtgtgtgcacaagtgagtgagagatttcgaacgcccacccctcgactttgaaatctgagcaaaacaagaaactggggtcttcctctcccccgaacctctccccagctagtcttccctctgttcttcctgcctccagccgcccgcgccagattttgaaatctcggagacaaaactagtactgtaagataaatttttttgtactgtatttattgtgtataacgatttttttaaaggagaat

SEQ ID NO: 8277 - DNA, 1701 bp, Homo sapiens
gccggcccccctcccatggccctgctgtggctccccagctccagtcggctgcacgcacacccctgctccggctcacacacgccctgcctgccctccctgcccagctgtaaggaccgggggtctccctcctcactaccgccagacaccccggtggaagcatttagaggggaccacgggagggacaaggcttctctgtccgcccttcacacctccagcctcacgttcacttaggcacatcacacacacactggcacacgcaggcatccatccatccgtcattcattcaaatatttattgagcacctactatgtgcccagccctgttctaggcactgggcattaccatagagaacaaaatagacaaatacatctgccctcatggaaggtgacgttcccaggagagggcacctacacagtcacgcaaacacacactaattcctggcagggcccccagcccctcccctggctgagcagccctgtggctgaaatgactagcagataaacagacccccttctgctccgcttcctcctgcccagccaggcaacaccctcaaccggctccatcacatcctcaggtctcgggaccatggggggctcagaggggagacacacctactgcttcctcagatgggcccctccgcagccccttcccttgctcggggaaagcccccaattctgcccacacccatttatttccttccttccttccttcttttctttccttccttccttcttttttgtttttgcccccaattctgcccatacccatttctttctttccttccttccttcttttttgtttttgcccccagttctgtccacaccccttccctttcctgtcctgtcctttctttcttttttgatagaatcttgctctgtcgcccaggctggagtgcagtggtgagatctcagctcactgcaacctccacctcctgggttgaagtgattctcgtgcctcagcctcctgagtagctgggactgcaggcacgcgccaccacgcccagctaatttttgtatttgagtagagacggggtttcaccatgttggccaggctggtctcgaactccgcatctcaggtgatctgctcgccttggcctcccaaagtgatgggattacaggcatgagccaccgtgcccggcttcacacccatttctttaaaaaggatcccgtagcaggcagaaaagccccttccatcctgctcctctgatactgtgcccccttggagatatttccgtcctccacccacgtgtctgtggctggaactgcccagcctgctcctggccccctggaagcctccccacagctggtaatctggacttaaggattgctgggccaccgcctctctgcctaccaccattccatatttaagtggagcccctacgtagaaaggccccggggctttattttagtctccttttcagggatgtcgtgggcgggggagggggttcttggtgctacagccctctccccacccctaaagggacgccgacgctgtttgctgccttcaccacatattagtgcttgaccctggcaggggaccccatggaaaagatggggaagagcaaaatacatggagacgacgcaccctccaggatgctcgctgggattcccacgcccaccactgtcccccaccccatggctgggaggggcctctgaacggaacagtgtccccacagagcgaataaagccaaggcttcttccc

SEQ ID NO: 8278 - DNA, 52 bp, Homo sapiens
ctgccatcagatgccggagactcgcccttcaataaaaaatctcttctagctg

SEQ ID NO: 8279 - DNA, 393 bp, Homo sapiens
tccagggaccttgacccagcccctctcagcagacgcttcatgataggaaggactgaaaagtcttgtggacacctggtctttccctgatgttctcgtggctgctgttgggggcagagattgacgcccccggtctttgcctctgagcgggagagtctgtgtgtatgtgtcttccccggaatccacaccaccccaccctcctcctgtcccgtggtttcatcatatctctttgcataccccatgtcttccccagttgtcccctggagtttggggggacatcccgcctcaggcatccttctcaaggggaagccaagagaggcatcaggatgggtgggtttctgattgtggcaacgtttgcaaccgttcacgattcaataaatattggatgaatttaac

SEQ ID NO: 8280 - DNA, 3356 bp, Homo sapiens
aggacgcagtctccatctctctccatcgggcctcgggaccctttctcttctgaatctgcttccctgcagtttagatcccgggatggcattcctgagaaagcaacccgaaccagctgtccttctgacagctcggtgttcagcttacagagaccacccctttcctccacagggagaggctcctccctctcctgggacagctcacaggtcctagtgattctctcaaccctaacaccgtctggcacgattgtgaccgctgaagtacaccacgagctccaggcttcagaaagtggtgctgagaacttgctccaagaagaagtcaaaccaaacttgcagttgatttggggtcatgtttaggtcagaatcaccgtgcccttgaacaagcaggtaggggggcttgataacttaactttccacgtggacagaatttttttttttgttttgtttttgttttgcagacacagtctagctctgtcgcccaggctggagtgcagtggcacgatctcagctcactgcaagctctacctcccgggttcacgccattctcctgcctcagcctcccgagtagctgggactacagatgcccaccaccaggcccggctaattttttttgtatttttagtagagacggggtttcaccgtgttagccaggatggtctcgatctcctgacctcgtgatccgcccgcctcggcctcccaaagtgctaggattacaggcgtgagccaccgcgcccggcccttttttttttttttttttttaattgagacggagtctcactcttttgcttaggctggagtgcagtggtgtgatctcagctcactgactgcaacctccacctcccgggttgaagcgttgctcctgcctcaatctcccaattagctgggattacaggtgtgctccatcatgcccggctaatttttctattattagtagagacagggttttaccatgttggccaggctggtctggaacccctgacctcaagtgatccgcctgcctcggcctcccaaagtgctgggattacaggcatgagccattgtgcctggccctacacgtggacacttctttagcatatggttagggacctttctagaaattccaaagacagactttaagaagccccgtcgggaaaccttaggccaatgatgtggttacattaaaaataaattatctgggaatttcacagacttcacaaatgtcaggcttacatggtaggtttaggggaccgtttgagagacaaagatctacattcatatatgtagctatacatatatgtactttttcttcttagtttctttttaaagacattttatcactcattcgctcattagcacattgggaatgtgtgtatttggtagggaaatgaaaggcaccttgcctgttccatctctactccttttttcttttgttttaggattttctaaaggtgagacactggtggaactggggtagctgcttgggacgtaccacctatagttgtggctatttcacagagaagcagcagctagacagactcccatctgtaaataaacaagagataggaagagggggaaatagatttggaggaggcagccctacatttcaaacatacattcccttttttagatttttttttttttttttttggttttcagttttgatggtgggattggaaaatagagcttggcttgaggacattttcctggggtggcaccattatttcttgaaatagaatcttacttatggtgacactggcaagcacttgtgagaacctgaagacggattgaggtcatttgatgctcagaagttgggtgctgggtccctgccttctcagtccgagttctcctttcatttttgggtggggaggcgggttccaagagcccttcattggtggagttcacaaggcaaggtgtaaaaaaaaaagtagggcaggaagacagtggtgtgctggcagaggtctaacaatgggctctccaaggaagaggaaaaggttggttgtggagtgtttgtcagtttccgtggtgtaaatactcccaccacggctgacttcaagctagcaaccggaggtcactgaactaagagttgggaagagatagggcacaatatatgcttacgagttggtacacaccgtcagcagcagccagggtcaggagaaaggcgagatgtgaagagaggccgggaggtatcagatgacgtttccagcactagaccagaagaggtgcacacagcctagaccccctgaggggtacaccctgatctctagagcccacaaagaggtttttattcaacataaaacgtgttcatctctcataggcctgagtcatgctgggttctgggacattaagcccaggagtgggccgggtgcggtggctcacgcctgtaatcccagcactttgggaggccgaggcgggtggatcacctgaggtcaggagttcgagaccagcctggccaacatggtgaaaccctgtctctactaataatacaaaaattagccgggcatggtggcacgcgcctgtaatcccagctactcgggaggctgaggcaggagaattgctggaacccgggaggcggaggttgaagagagcagagattgtgccactgtgctctagcctgggtcacaagagcgaaactccgtctcaataataacaacaacaaaaataacccaggagtggctcaagagtccagtgtgggatgaaaatataaacagaggaagacaacatatgtcactggggaggctgggggagctagacaaaattcacacgggaggggcagggatgagacaatattgtgccctgggtctgtgcaaacgttgggaccagaatccactataagtttcattcttcggagacacggaagctctgcactggaggccgggactcaggcgtggaagagaatcttctccttattcaccggggaggctgtgtcttgtgcaaacaagtcatagaaacttgatgggagttggggagggactgaaggatgcatgcaaggttctgggaaggagtgagaagtagtgaaggccaaggggcccccatcacaggccgatggggtaagacttcgagagagcctgatcctggggtcttctgagactccaccaggagccggagagggcagggagccaaatccagctaggaggttacagattgcttttcctgggctgggctcctgagtgttggttcttccagctgtgcacaggggatttcaaacgttctacgtcctaaagccaggaagagtgacaaggcaggtggggacagaaggaagaagccaggagcctccctgagaaggtgtcaccttatctgtcctcctcttccccacacactggcctctgggtcccccttctctgtccacccacagagtgaaaccaattaaaatgttggatctc

SEQ ID NO: 8281 - DNA, 195 bp, Homo sapiens
gaaaggagaaatatcttcagaggaagactgccgccatactgaggctgagcacagatttgtctttttcattgcatctgtcaagcttaaataaccacctttagaaataccctctgcaccacctgcttcaatcagctggtcctttgtgaagaacgtagagagaatgcggcataaccaccaataaaggagtcttgattt

SEQ ID NO: 8282 - DNA, 347 bp, Homo sapiens
gcgagaaaaaatggaaaggggagccggaaatggaggagagaggacaagcaaagagacagaaatgaagacatgaggaaaagctgggggaagcaggagaggaagggacgggatgtaggagggggaagaaaaatcggagatgagacaaaagaaatgtgtgggagacgggtagagacgaaatgcaaggggcgtggttttggtttttctccaagacctggagacatcgacccccatcgccttctgaagagagagggagggcgggcactgggggtcaggagagtctccagcaggggaggggaattgtttggactattgttcttcaggattggaataaaacaatcttattttgg

SEQ ID NO: 8283 - DNA, 728 bp, Homo sapiens
aaggaaggtggaaaatttttcattaattttctgactgtaccaaacatgtgaggaggacatattggaagggagctcaaggggttagcatgagtgagaacatcttccctgaactctcgtatcttacagaaatgtgaaaaaaaaccctgtgaaggtaaagtctacagaaagcctttcatcttcattcatcttgagtagacatttgttctcaccctggagagaaactgcgaatctaaaaggaatatgacaaagccttcagcgtggtctcaaattcatggttcatacaagaactcacactgcagagactccttacggaaataaaaaatgtaggaaagacctgccggccgcggtggctcatgcctgtaatcccagcactttgggaggccgaggcgggcggatcacgaggtcaggagatcaagaccatcctggctaacacggtgataccccgtctctactaaaaatacaaaaaaaattagccaggcgtggtggcaggtgcctgtagtcccagctacttgggaggctgaggtaggagaatggtgtaaacctgggaggtggagcttgcagtgagccgagatggagccactgcactccagcctgggggaaagagcgagactccgtctcaaaaaaaaaaaaaagtaggaaagacctctttaaacacttaccactcatgttgcatgtgaatccacatcctgaagggaggctacaactggaataaaaataagaaagctttc

SEQ ID NO: 8284 - DNA, 83 bp, Homo sapiens
gcgccccgcctcgctcggctgcccccgccccttcccggcccccctcgccgcgcgtcctccaaaaaataaaaccttaaccgcgg

SEQ ID NO: 8285 - DNA, 52 bp, Homo sapiens
atatccttatccaaatcaataaagagagaatcctccctccagaagggtttct

SEQ ID NO: 8286 - DNA, 994 bp, Homo sapiens
cgcggccccgggggccccaccgcccccttggtcagcgcaggccacggcccgagggggcgcccgcagtggacaggacccgcgtgggttgggaaggaaagcagtggaactggccggaccccgcctggagcagcgtcctgcgccccctggttctggaggaaccgcaagccggagaggatttggtccctcaactatcacccagcctgagaacgagggggcgggggccttggagcccaccggacttttttttaaacccgacaagggctttttaacgtcaccagatggggcgggaggtggggggttcacgccactcccgcgtcccacctccacgcccggggccgtggcccccacatcactgtgcagctccccggccccagccgcgcctccggggaagcccgtttttaacctttcatccattgggactcaaaactgtgagacgcgttcgccaaactgtgaccccagaccttggccccgccacacagaaacccctgacccagactgtgacatccgactcctaaaatggtcatccgactccagactgtgacccctgaccccaaactgtgacccgaaccccagactgtgccccgaccagactgtgacccttgacatcaaaccgtgacaccccctcctcctcttccaccctcggtcgcttttccctactctgacctaggacacgtccccaacggaagccccgccttcccttgcaccgcgatgaacccaacctccctgaagccaaaacttcccaccctgccgcacctccggaccaccccacttgccaccaagcacatcctctccaaatccaacccttatttgcgacccttcagtgatgacccagcagacctccaaaaagcctcctctgcccagatctccagccgggtctggggctgggttgcggaggggagggtctgggagtccacacttctccaccaacttcccttcccactctcttattccacattgcagtgtttggaataaaccatgtttttatgcctcctca

SEQ ID NO: 8287 - DNA, 872 bp, Homo sapiens
ggcgtcccactggctctgatcttgcttcctgcttggaaactgaagtcgaattgggctcccctggaaggggttcattcaggtctgttgactgagactggccggcctgtgggctgccgtgatggattctgtttgacgtattgttctctagaaggcctggctctgatccagtgacccctctcaccaaagaactcggtttaaccagggctctgtaagaccactcccacccagagacttgtgtggcctggtgtggcctgtgtgtcggattccttcctgtcagctgtgacccatttgacctgtgtccccagaacccagttttttgtttgtttgtttgagacggagtcttggtctgtcgcccaggctggagtgcagtagcacgatcttggctcactgcaacctccgcctcctgggttaaagtgattctctcagctcagtctcccaggtagctgggattacaggcatgtgccaccacaccccgttaatttttgtatttttagtagagacggggtttcaccatgttggccaggctggtctcaaattcttgatctcaagtgatctgtccgccccggcctcccagagtgctgggttgggattacaggcgtgagccaccgcgtccggctcaggacccagttttggctgctggttcccagcaggggactcgggggatatacagtggctgcaccaaattggaggtgtgggttcctccaacacaatttgcttctgcccgttgtcttcctgccagctgggtttggccaggatttctccgtgtgggggctacatgcgaccctctcccctcctccctgactttagaggctggtgctgtgtcgggaggaaggtcagggctcctgagcagcaataaaggaccaggaagaggc

SEQ ID NO: 8288 - DNA, 1333 bp, Homo sapiens
tgcaaactgatgtccccttccccgtgtatgcccccttccccaaggtagcaagatggagggatggggctctctcctgggatgggggcaggtgttcctgaataccgacaggcctgctgggtaaatgactaggtggtaaggttctgccatgcctggtgacccaccatggacatactggaccttaattcctctgcttctgtgctccctcctgagaaccctttatgagcctgattcctcagtctcaccagaattctggatcacccaagaggaaaagactggcagttctagattcctctatatggggagacctggattgttgaccagggtgagaagccaatggtatagactgcctctggggaagcaagttggcagttcttgaacagcatcagatatcaagagtttgtaggtctggattcacctaagattcaagggagtgttgcttctcaactcagccaactgagtagcaaatcatttgttctagaccacctaaggagggaaggttatggaatgccccaagtattcaagatcatcttgattgaccaaagaccaaaaaaaaaaaaaagacctgtggttccagaaagctcattagttgagattctgtgagtctaggttgaccacagaggcaagcactggtgagtctaggacagattttacgtggagagttgaactactccagaaactaaagagtaatgtttctagaatgcacaaaacattgttagtctgtgggtttagaaagactgaagtgacagattaagagttcttgatattagataactccaacttctggctgtagagcacccagccaagagaataagcagtgctttgaaaggatccactgggtgggttgtttttttttaaagtgccattctagaatgtccaaagggaatcaggattctgtggctgtagactgatcacagagtcaaggaagcagtggcaattctagatatctgagattttgctggttccagtttgcccaatggagttgagaatctcaatgattctagatgacttcttgtggttctgtaatgccaaaaggaatgaaggctccagggatacagagttgtccattaccaaagcctggaagttctcatcacctccaggtggactgcttggcagtgctaggaggtggactcaggacttcagaagcaacatttctggcctgacctggaaggtgaaggtgaaggtgagaccctgtagggcacagggctaattagtggacaagggaagggggaggcccagggctggtgagtctagaatgctctggaaccctacacctagtgatgtgtgtctatttctttttctttttcttttttttttttttttgagactgagtctc

SEQ ID NO: 8289 - DNA, 178 bp, Homo sapiens
ccccctgcccccaactccattatttattacggagctgccccgcctgggtggccggacccctgggccttggggctgtggatcctggttccctgtttggaaaattcaccacctctagctcctcactgttctttgtaattaacacgctgttggtaatcttattaattatttaaccacttgg

SEQ ID NO: 8290 - DNA, 20 bp, Homo sapiens
taaacacgtcgattctgtcc

SEQ ID NO: 8291 - DNA, 360 bp, Homo sapiens
ccaacagggaggacagggcctgggactgttctcccagatccgccactccccatgtccccatgtccttcccccactaaatggccagagaggccctggacaacctcttgcggccctggcttcatcccttctaaggctgtccaccaggagcccggtgctaggggaagcatccccaggcctgactgagcggcaggggagcacggcccgtgggtttgattgtattactctgttccactggttctaagacgcagagcttctcacatctcaatcaggatgcttctctccattggtagcactttagagtccatgaaatatggtaaaaaatatatatatatcataataaatgacagctgatgttcatgg

SEQ ID NO: 8292 - DNA, 631 bp, Homo sapiens
aactaaacaagcttggtacccgccgggggcggggcctacattccaatggggcggagcctgagctagggggtgtggcctggctgctagagttgtggtggcaggggccctggccccgtctcaggattgcgctcgctttcatgggaccagacgtgatgctggaaggtgggcgtcgtcacggttaaagagaaatgggctcgtcccgagggtagtgcctgatcaatgagggcggggcctggcgtctgatctggggccgcccttacggggcagggctcagtcctgacgcttgccacctgctcctacccggccaggatggctgagggcggagtctattttacgcgtcgcccaatgacaggacctggaatgtactggctggggtaggcctcagtgagtcggccggtcagggcccgcagcctcgccccatccactccggtgcctccatttagctggccaatcagcccaggaggggcaggttccccggggccggcgctaggatttgcactaatgttcctctccccgcgggtgggggcggggaaattcatatcccctgttcgtctcatgcgcgtcctccgtccccaatctaaaaagcaattgaaaaggtctatgcaataaaggcagtcgcttcattcctctc

SEQ ID NO: 8293 - DNA, 1962 bp, Homo sapiens
tgctggcccattctttgagaccttttctccttctctgcctccctcaagatgagtgcccgggcatgagaagcacatggttccatgagcaggacccatctctcttctgtgaagatgcgttgggctgcaagtaacagaaatctcagtgaacagtggcctggcgtggtggctcatgcctgtaatgctcgcactttgtgaggccagggtgggtggatcacttgaggtcaggagttcaagactagcctggccaacatggtgaaaccccatctcgactaaaaatacaaaaattagccaggcgtggtggtgcacacctgtaatcccagctactcgggaggctgaggcaagagaatcacttgaacccaggaggcggaggttgcagtgagccaagatggtgccgctgcactccagtctgggtgacacagcaagactccatctcaaaaaaaaaaaaaaaaaaaagaaaagaaaaagaaatgaatgggttcaaagaccataatcatgcatatcacataagaccagaagtggcccaggtccagggtcagttaatttagcggctccacaaagtcatcagtcacctgagctccatccatcttcacatgctgtgctaccatttcttagctgtatcatcccatggtcccaaaagggctgctacacatccagccatcacatgcagataattcctttcaaaaacagcagaaagaggctcgttcttgtcttggtcccttttgaagaatgaatgaaaccttcctaagccttccagcaatttccccccaactccgatgggtaggaattgtcacatacccatgtgacccgataggaggcaaaagaaatgagacttctgggattagtttagcctcagattctgcagctgagaagttgatcagccacctctgaaggacatgcagcttgcagaaaattagggtggtgttaccaaggtgaaaaggggaaatggctttagagtagacaacagagatgccctgaggggttgtgtaggttgttcactgcaggaagtcccctggttaagaaggcaagtggggtttaaacagacccacagtctactcatcaaaccaggtgtccttggcattgtgtccacccagagagctcactgttttcttttctttttcttttctttttttttttttttttgagatggagtcttgctgcatcccccaggctggagtgcagtggcatgatcttggctcactgcagcctccgcctcccaggttcaagcgattctcctgcctcagcctcccgagtagctaggattacaggtgcgtgccaccacgcccagctaatttttatatgtttagtggaaatggagtttcaccatgttggtcaggctggtctcaaactcctgacctcatgatccgccttcctcggcctcccaaagtgctgggattacaggtgttagccactgcgcccggccctagagctcactgttttctagttagtccatctggaagtggagcctttttccagtttgcacaaatgtgccatattggcttgtagctggcatgcatccaagtccataggtcctgcctcttcaatcctggctttctagggcctgggatgatcattgctagaactgagagaccagcctggctcagtgaacttcagggcgttccgttcattctttcagtaaatgtttgcagcacatgtgttacatgtcaggcagtgaaaccccccacagcagccttccctctcagaggatacatttgtaaccattacacagtcatcaaaggaataattttttttaatcaccagtgtgcatacagtcatggagttgggtattcccagctaccagggaggctgaggtgggaggattgcttgatgccaggagttagggaatatagtgcaccgtgattggacttgcgaatagccactgcactgcggcctggacgacgtagtgataccctgactcttataaataaataaatgaataaacacaattatgactttgcggatggg

SEQ ID NO: 8294 - DNA, 105 bp, Homo sapiens
agccagaggctgtttactatgacatctcctctttatttattaggttatttatcttatttatttttttatttttcttacttgagataataaagagttccagaggag

SEQ ID NO: 8295 - DNA, 84 bp, Homo sapiens
gaccaactggtttgcctataatttattaactatttattttttctaagtgtgggtttatataaggaataaagccttttgatttgt

SEQ ID NO: 8296 - DNA, 844 bp, Homo sapiens
tcctccgggaccccagccctcaggattcctgatgctccaaggcgactgatgggcgctggatgaagtggcacagtcagcttccctgggggctggtgtcatgttgggctcctggggcgggggcacggcctggcatttcacgcattgctgccaccccaggtccacctgtctccactttcacagcctccaagtctgtggctcttcccttctgtcctccgaggggcttgccttctctcgtgtccagtgaggtgctcagtgatcggcttaacttagagaagcccgccccctccccttctccgtctgtcccaagagggtctgctctgagcctgcgttcctaggtggctcggcctcagctgcctgggttgtggccgccctagcatcctgtatgcccacagctactggaatccccgctgctgctccgggccaagcttctggttgattaatgagggcatggggtggtccctcaagaccttcccctaccttttgtggaaccagtgatgcctcaaagacagtgtcccctccacagctgggtgccaggggcaggggatcctcagtatagccggtgaaccctgataccaggagcctgggcctccctgaacccctggcttccagccatctcatcgccagcctcctcctggacctcttggcccccagccccttccccacacagccccagaagggtcccagagctgaccccactccaggacctaggcccagcccctcagcctcatctggagcccctgaagaccagtcccacccacctttctggcctcatctgacactgctccgcatcctgctgtgtgtcctgttccatgttccggttccatccaaatacactttctggaac

SEQ ID NO: 8297 - DNA, 36 bp, Homo sapiens
tgtatccccgaataaataaagacatcttacatcttc

SEQ ID NO: 8298 - DNA, 700 bp, Homo sapiens
tcaatccccgattcatctaccctgctgacctcccagtgacccctgacctcactgtgaccttgacttgattagtgccttctgccctccctggagcctccactgcctctggaattgctcaagttcattgatgaccctctgaccctagctctttcctttttttttttttccccactgagaaggggtctcgctatgttgcccaggttggtctcgaactcctggcctcaagcgatcctcccgcctcagcctctcaaagtgctgggattacaggtgtgagccaccatgcctggcctgagtccagctctttaatgcccgttcatctcagtcccctgcccgcaatcctgccttctggcctcctccgtccctgatcccgcctctgcctgcccaggggctgcccctggccgagtcactgaagcgactgatgtccctgtctccaggacggcctcctctcctactttgggacgcccacgtggcagaccgtgaccatctttgtggcgggagtgctcaccgcctcactcaccatctggaagaagatgggctgaggcccccagctgccttggactgtgtttttcctccataaattatggcatttttctgggaggggtggggattgggggacgtgggcatttttcttacttttgtaattattggggggtgtggggaagagtggtcttgagggggtaataaacctccttcgggacac

SEQ ID NO: 8299 - DNA, 143 bp, Homo sapiens
gagccttctgagcccagcgacttctgaagggccccttgcaaagtaatagggcttctgcctaagcctctccctccagccaataggcagctttcttaactatcctaacaagccttggaccaaatggaaataaagctttttgatgc

SEQ ID NO: 8300 - DNA, 83 bp, Homo sapiens
gttggatgtcatcccccgaccccaccctgttttccaccagagttctgacactgtgactctgtataaaatggttgggaagctgc

SEQ ID NO: 8301 - DNA, 158 bp, Homo sapiens
ctgcgggggtcccaaggaccaccccttgacctgtgatgacccccgcttccaggcctcctcttcctcaaaggcccctccccccagccttccaagcccatcccgactcccggggccctcagacaccccgatcctcccacaataaaggcttctcaatccgc

SEQ ID NO: 8302 - DNA, 16 bp, Homo sapiens
aggcttctcaatccgc

SEQ ID NO: 8303 - DNA, 169 bp, Homo sapiens
agaggtcgtcctctccatctgctgtgtttggacgcgttcctgcccagccccttgctgtcatcccctcccccaaccttggccacttgagtttgtcctccaagggtaggtgtctcatttgttctggccccttggatttaaaaataaaattaatttcctgttgatagtgggc

SEQ ID NO: 8304 - DNA, 86 bp, Homo sapiens
aaccacagatctggacgttcacgtgcactctcttcctgtacagtatttattgttcctggcactttatttaaagatatttgaccctc

SEQ ID NO: 8305 - DNA, 883 bp, Homo sapiens
tgcaggcctccaggtgaggaccgtgctgggcgaccttgggggtgcggggcggcacggtggatcttcactgctccacgcgctgcccggcgtcatgcaggtgacctcactcggacggaagaatcttcccgaggctgggctgttccctctcctgcccggactgtggcctcgccggggagagcgggcgggggagctcgcgccgaggactggaccatctgtacagaccagcgggagtgcgcgcgcccgcctcgcacagggccggggcctggaccaaaccacatgaactggactgagagggggaagaagcggggaggaagaaatcccgccccaaacgtccgctttccttttctctactttgtaatttattgatcagtttctgttgggagacgggtgtcctttacccgcgggaagggggcggggcttccctcccgggccgcatgcggggagaggctgctccctcccctttttcctgcccagtcgcggggcccaagtcttccttcttcgtccgaaaggaggggaggggggactcgctgctacaagcctcgccccctgtgccactcagctccgccccgccgcgtccggtcgccggtcccccgggtcatctgcgggcgggttcccctctccctcccccgtgtctcgtgtccccggggcctcaccgccccccgtgctgtggccgtgtccgtgccccgggggtagggggcgcagaatggcgcttccccttctcctctggctccggggtttgcatgggagaatcctctttccacgatgccgctgggcgacgtggcgtgggggcagggggacggtgggggagccctcgcccccgactctcggtcggcctccccgccccaggcgtcactcagtgatcacgggtaaagagaactgtttc

SEQ ID NO: 8306 - DNA, 336 bp, Homo sapiens
gccctgctggcggacttcaaggagaagcccccacaggggattttgctcctagagtaaggctcatctgggcctcggcccccgcacctggtggccttgtccttgaggtgagccccatgtccatctgggccactgtcaggaccacctttgggagtgtcatccttacaaaccacagcatgcccggctcctcccagaaccagtcccagcctgggaggatcaaggcctggatcccgggccgttatccatctggaggctgcagggtccttggggtaacagggaccacagacccctcaccactcacagattcctcacactggggaaataaagccatttcagagg

SEQ ID NO: 8307 - DNA, 274 bp, Homo sapiens
gccccgccctccccaaagtcccgccccgcccccgtcacgtgcgctgggcacttccctgctgcctgtaaatatttgtttaatccccagttcgcctggagccctccgccttcacattcccctggggacccacgtggctgcgtgcccctgctgctgtcacctctcccacgggacctggggctttcgtccacagcttcctgtccccatctgtcggcctaccaccacccacaagattatttttcacccaaacctcaaataaatcccctgcgtttttggt

SEQ ID NO: 8308 - DNA, 86 bp, Homo sapiens
gggtggggaccggggagcacctgcctgtagcccccatcagaccctgccccaagcaccatatggaaataaagttctttcttacatct

SEQ ID NO: 8309 - DNA, 121 bp, Homo sapiens
tgcctgagcgccacctactgcattttggacacctcacaccaaggggagatgcaccccacagacacctgggactttccccttctggttcctgtgtctcccaataaactctctgaccaaccct

SEQ ID NO: 8310 - DNA, 216 bp, Homo sapiens
gggaggatactgaggcacacagaggggagtcaccagccagaggatgcatagcctggacacagaggaagttggctagaggccggtcccttccttgggcccctctcattccctccccagaatggaggcaacgccagaatccagcaccggccccatttacccaactctgtacaaagcccttgtccccatgaaattgtatataaatcatccttttctacc

SEQ ID NO: 8311 - DNA, 490 bp, Homo sapiens
gcccaataaagactgttaattcctcatgcgttgcctgcccttcctccattgttgccctggaatgtacgggacccaggggcagcagcagtccaggtgccacaggcagccctgggacataggaagctgggagcaaggaaagggtcttagtcactgcctcccgaagttgcttgaaagcactcggagaattgtgcaggtgtcatttatctatgaccaataggaagagcaaccagttactatgagtgaaagggagccagaagactgattggagggccctatcttgtgagtggggcatctgttggactttccacctggtcatatactctgcagctgttagaatgtgcaagcacttggggacagcatgagcttgctgttgtacacagggtatttctagaagcagaaatagactgggaagatgcacaaccaaggggttacaggcatcgcccatgctcctcacctgtattttgtaatcagaaataaattgcttttaaag

SEQ ID NO: 8312 - DNA, 52 bp, Homo sapiens
ggctggacatcggcccgctccccacaatgaaataaagttattttctcattcc

SEQ ID NO: 8313 - DNA, 212 bp, Homo sapiens
ccatccgccattccgactgctaaaagcgaatgtagtcaggcccctttcatgctgtgagacctcctggaacactggcatctctgagcctccagaaggggttctgggcctagttgtcctccctctggagccccgtcctgtggtctgcctcagtttcccctcctaatacatatggctgttttccacctcgataatataacacgagtttgggcccg

SEQ ID NO: 8314 - DNA, 419 bp, Homo sapiens
gcaccgcgcacctgccacagcctcagaggcccgcacaatgaccggaggaggggccgctgtggtctggccccctccctgtccaggccccgcaggaggcagatgcagtcccaggcatcctcctgcccctgggctctcagggaccccctgggtcggcttctgtccctgtcacacccccaaccccagggaggggctgtcatagtcccagaggataagcaatacctatttctgactgagtctcccagcccagacccagggacccttggccccaagctcagctctaagaaccgccccaacccctccagctccaaatctgagcctccaccacatagactgaaactcccctggccccagccctctcctgcctggcctggcctgggacacctcctctctgccaggaggcaataaaagccagcgccggg

SEQ ID NO: 8315 - DNA, 545 bp, Homo sapiens
agagctgctttcgagacccggctctccgaaccgtgcccctgattcataccggattccggaagccgctaggcctcatagacgccgaagctggacttggagtggggaatggtgggagtaggggtcatccggcccgaggcctgccctggcacacgcgtttccgccgcgtatggatatacacatgttttcggcaacgtgttcccgtgtcctggcccctcacgggcccccacactctcctgaccgtgagggcactggtcagttccgcccccgtggtaggcagacgcgcggggaaattcggacccaggagcccagccccggctgtgccatcttgtgtatgggcagatatgacctgacagccccctccagtgccacagggtacgcacacgcagagccccgcctgtgcacacgcgtgtcttcgtgcactccccgtgcggtacaggggcacttcgtaacccagggaaagggcggggggcatatttgcaagcgcgctcggtgcgggcaggctcgcattgcacccagggagctggagttgagctgttcccctaaat

SEQ ID NO: 8316 - DNA, 242 bp, Homo sapiens
gagccctggccagctcttcgcccctcacctctttgaaactctggacgtatttatggctccacctccccacctccctcccccgtcagtgggatgactgggggagggttgctgcagggaagaggagagccccctgccctgccctgccccgtgtccacctcccttgcccccaagcctgtccccagtgcccctcccttctgtttgtgcccctctccccaatttcattaaagatttcatgaaacatt

SEQ ID NO: 8317 - DNA, 167 bp, Homo sapiens
gctctttctcagaagctgctacaagatgacacctcatgtccctgccctcttcgtgtgcttttccaagtcttcctattccactcagggctgtggggtggtggttgccctacctgtttttgccaaaaataaattgtttaaaacttttcttattaaaaacgttacaaagt

SEQ ID NO: 8318 - DNA, 202 bp, Homo sapiens
ggcccggctctcccgccctgcacgagcccaggggctgagcgttcctaggcggtttcggggctcccccttcctctccctccctcccgcagaagggggttttaggggcctgggctggggggatggggagggcacatcgtgactgtgtttttcataacttatgtttttatatggttgcatttacgccaataaatcctcagctggg

SEQ ID NO: 8319 - DNA, 126 bp, Homo sapiens
ctccttccagcaggcagctggcctctccaaggaataagggtgaaattgccacagctggctgacacaggacaggggcaactggtttggcaaccccacatccaggccaataaagatgtgtgagctggg

SEQ ID NO: 8320 - DNA, 352 bp, Homo sapiens
gccctggactctgccccgggggatgtggccggcactgggcagccccttggactgaggcagttttggtggatgggggacctccactggtgacagagaagacaccagggtttgggggatgcctgggactttcctccggccttttgtatttttatttttgttcatctgctgctgtttacattctggggggttagggggagtccccctccctccctttcccccccaagcacagaggggagaggggccagggaagtggatgtctcctcccctcccaccccaccctgttgtagcccctcctaccccctccccatccaggggctgtgtattattgtgagcgaataaacagagagacgct

SEQ ID NO: 8321 - DNA, 36 bp, Homo sapiens
atccccaacacccaataaagttcctttttaacacac

SEQ ID NO: 8322 - DNA, 463 bp, Homo sapiens
tggttaccccgggctgggcccctccaggagtcacagatgaggcccccgcagagactggtgagtggtgaccctgtcatgtacaggagggaccctggggcatgtggggggggtggggttgggaaagaagcagggcgaccttggccttggggagagcagagcagagggagaggcagcagtcccagcggtcctaggctgtcgggaaactgcagcccagcctcagggccatgggaggtggtatccaggcctgggtggggccaggcctctgctcacagggatgtggggtcagtgcttgggagcctgtggccagcagcccccactgcacccctgcccccaggtgacacgcttctgagcaggggcccctggggacttcaactgcccagcaacatggaggatggtgtcctgaggcctccaaggacggtccccacccctctacgtttccccaataaagccttttaaaaacctg

SEQ ID NO: 8323 - DNA, 119 bp, Homo sapiens
ccccgccaggcagcctcgttctgcacaggcactttagcccgagccaggcacacctgcgagggggcaggtgtgctccgccgccctgctgataagctggcttcattaaactgacacttctc

SEQ ID NO: 8324 - DNA, 842 bp, Homo sapiens
aagggcaggggtgtggcttctgggggctggtcttcagctctggcgccttcatccccctgcctctaccttcattccaaacccctctcggccgggtgcagtggcttatgcttgtaatcccagcactttgggaggccaaggcaggaggatcgtttgaggccaggaggtcaataccagcctgggcaacatagtaagaccctgtctctattaaaaaaaaaaaatcaacccttcttccccaccaaaccacccaactcctctctactcttatccttttatcctctgtctctgcttatcacctctcttgcgtatttctggatctccttccctcctttctcgtccaaatcatgaaatgtttggccttagtcaatgtctatgcccgtcacataacagccgaggcaccgaggcccacagggaagcagctgggagcttggaaacctggtctcttgaatttcaaacctggtttcttacaggtggttgtctggggtgggtggagtggcgacaggatagagctgaaggactatgcaaatgaggaagtaagtcagggcgggctttgagaaggggacccatatcctacaggcaaaaagcaggctaggtgaccttgggacactacgctaagggagggaggctaaaggcggccaggtttgcagtgcgggaagatgagcaggccagtgggaggaggggcagggcagggctgtagttggtgactgggtgttcattttagctctaagaaaaaaaatcagtgtttcgtgaaggtgttggagaggggctgtgtctgggtgagggatggcggggtactgatttttttgggaggttatgagcaaaaataaaacgaaacatttcctctg

SEQ ID NO: 8325 - DNA, 1713 bp, Homo sapiens
ccattgggtggcagcagagtcccagaatatgagaccgttactcggatgttgaaagttggaaactatcccattgcaagtttctctccaaataaatgcatctaaagattgattagaaagtttgtgcgcatgtttttcattataacaatgaaaacacaaaagtggagaagctgtacaacgtcaggattcagaggtaggctctggagccagtctaccttgagttaaatcccacctctgccatctactacctaagtgaccttgggaaggtcagaaaaatctctcagggcctcggtgtccttatctgtaaaatgggcatcacctacctcagagggcttttctgaggattaaataaataaatgtgaagcacttagaactgatggccagcacatgagggctcaccaagtgtaagccacaaatacacatcagctatagcacaaatatacttgtgttacaagaaaggaattagtaatctgtgtttactgtagttaatgttcttacaatgtatcgcttttaatttaagttttccttttttacagtttttctccagcactttactcttcttaagtgcctggccttttttgtccctttatctctcctggtttttttcttaagccccagaaagccaaaaagaacatgtaaactcttcacctcaactagctacaaccttccactcctaacctcccaagcttctcacttaaagaggactccctatcccacaaacacatgctccctcttcctatgaccttcctccatttaacagtgttggttatgcaataagacacccaatttttcatgggagttgacaccaaaacacagctggattccatcaggaaagctgcattgatcagggtgttaaccgcatatgaaacaacccatatggaagacatacttaggggtcaaacctgtggtgtgtggaagtgaccactgggatgtcatcattcaccatttatccaggatggccgctcaccaggcaatttgctaggctcgggggcgggtagtatccatacactatgcactactgctctgaagcttctggaatcagaaatgaacccattttcatcgacgattgctgttagttgacaagtgacatcttgaaaatgccacattccctcatgtcacaggaagttctgggatcaccaaggattgttggagagtccagtgagatggaaccacacaaccagttccctaccagtgtcttgtcagctctgggtgtttgttccctgccactaagtggctcagtcacacctttgctgaaacacagtagtcttatgaaaagcactggacacatactttgaatacctttcatattttaggtgctgaaaatggtgagggagtgagtgctctgcacccttgggcttttcaactcttgcacctggagttctgctggttaagtttgttaaacttagttgaaactgggaacctgttggctaaccattggggccttacactgtttttcaaatggttgcaacatttaacttctcgcacatggttcccgtcctctggagctctgtcttgtcggggagatgggcatgttgtataccaaaagagtgtacaaagtgttgcagggctgtgacacaatagggactctatggaaaactggcagccattgggtgtgggggcagtctgtaaatcagtcacctgtgttgctgcaggccaaggtagaaacgccctccgtgtgtgcatatttgttggttctctgattaaagttttgagtct

SEQ ID NO: 8326 - DNA, 754 bp, Homo sapiens
ccctaccctgtccccagatgcactaacagatggggcccagcccccttcctccctggaccccacgggcccctgtcccaggaaccccgccctctgacttcttgccctttggaaatggtgcagcactctggcatttatcacccccacctgggtcccctgcaacctcccatcaaaggatgacccctaaacacagaggagcggggcaggcagggaggcaatgactggagctaccttgcttgttgggggactgggtacagttggcaagctgtgtttccatcagctccctgtcctcctttcttccctcgttattgatctatagacattaggaagggagtgagacggctcctccaccatcctcagccagtgcaacccattccctctgcttctctctctctctctctctctccctccctctccttccctaccctctcaccatctttcttggcctctctgagggtctctctgtgcatctttttaggaatctcgctctcactctctacgtagccactctccttcccccatttctgcgtccacccctgaactcctgagcgacagaagccccaggcctccaccagccttgaacccttgcaaaggggcaggacaaggggacccctctcactcctgctgctgcccatgctctgccctcccttctggttgctctgagggttcggagcttccctctgggactaaaggagtgtcctttaccctcccagcctccaggctctggcagaaataaactccaacccgactggaccat

SEQ ID NO: 8327 - DNA, 408 bp, Homo sapiens
ggggctggccacccagccccacagccttgcctgaccaccctccagcagatagacgccggcaccccttcctcttcctagggtggaaggggccctgggccgagcctgtagacctatcggctctcatcccttgggataagccccagtccaggtccaggaggctccctccctgcccagcgagtcttccagaaggggtgaaagggttgcaggtcccgaccactgacccttcccggctgccctccctccccagcttacacctcaagcccagcacgcagtgcaccttgaacagagggaggggaggacccatggctctcccccctagcccgggagaccagggccttcctcttcctctgcttttatttaataaaaactaaaaacagaaacaggaaaataaaatatgaatacaatcca

SEQ ID NO: 8328 - DNA, 66 bp, Homo sapiens
ccttgcaagcatcccatggggcgggggcgggaccagggagaattaataaagttctggacttttgct

SEQ ID NO: 8329 - DNA, 653 bp, Homo sapiens
gcacacccgaggctcccacctgcggagccgctgggggacctcacgtcccagccaggatccccctggaagaaaaagggcgtccccacactctaggtgataggacttacgcatccccaccttttggggtaaggggagtgctgccctgccataatccccaagcccagcccgggcctgtctgggattccccacttgtgcctggggtcctctgggatttctttgtcatgtacagactccctgggatcctcatgttttgggtgacaggacctatggaccactatactcggggaggcagggtagcagttcttccagaatcccaagagcttctctgggattttcttgtgatatctgattccccagtgaggcctgggacgtttttaagatcgctgtgtgtctgtaaaccctgaatctcatctggggtgggggccctgctggcaaccctgagccctgtccaaggttccctcttgtcagatctgagatttcctagttatgtctggggccctctgggagctgttatcatctcagatctcttcgcccatctatggctgtgttgtcacatctgtcccctcatttttgagatcccccaattctctggaactattctgctgcccctttttatgtgtctggagttccccaatcacatctagggctcctcc

SEQ ID NO: 8330 - DNA, 121 bp, Homo sapiens
gacctgtcccctacctgccaagacaattggtggtggagtcctgaccccaatccccaacctcccaggactgtgttctttctggagttttcgctgagaacaaaacagtgttgtctggaccctg

SEQ ID NO: 8331 - DNA, 1202 bp, Homo sapiens
tggatgtacatcattcccgtcgtcctgttcctcatgatgtcaggagcgccagacaccgggggccagggtgggggtgggggtgggggtggtggtgggggtagtggccggtgagggcccaggctggtcagcgtcccgtcttgcacacccaggggcctccctttctgctggagtcccctgtgtcctcagccatcccaagaagggtttgctggtccctcctttccccccgtcccacgaggccacctgggccagccccttgtcctctgccttctgctggcagaggagcagctggactggggcctttggcacagcagccggtgtctcctgcgcccgcctcccccatggccccatgcagccccaggggcttcccccctgcccatggagtagagcccgagatcctggccactatgccagttctgacctcgcatccccctaccccgagcccatgcagtctgggaacatgccgccttctctccagcctctgtgcctttgttccaggtggtctcaccctcctgtccctggctgggctaggtggtcctgtccaggctcctgcagcgcccccctcactttgacactggactaggatgcagcctcccttctgtgtccccttgagggtaccctgggtcccctcatcaggggcagaggcatgaaagagtcggggctggatggccgggggcttctgggcccgacgcctagtgcagcccctggggtcgtggtttgacatttgtctgcctggtgcaaacaaggaatccttgcctttaaggtgacaggccctccacaggcttccagacttgaaggaaaaggtttaagaaagaaaacaaaaccaacagttagtggagtcaaagcccagacactgtaaatagaaccccctccaccaccccccgccgcccagcatcctacctggactgcggtgctacgagggcctgcgggcctttgctgtgtgccaccctccctgtaagtctatttaaaaacatcgacgatacattgaaatgtgtgaacgttttgaaaagctacagcttccagcagccaaaagcaactgttgttttggcaagacggtcctgatgtacaagcttgattgaaattcactgctcacttgatacgttattcagaaacccaaggaatggctgtccccatcctcatgtggctgtgtggagctcagctgtgttgtgtggcagtttattaaactgtcccccagatcgacacgc

SEQ ID NO: 8332 - DNA, 255 bp, Homo sapiens
cggggccggtaccccgcctccctgcccatcccaccacccggcctttccctgcgccgtgcccaccctcctccggaatctcccttcccttcctggccacgaatggcagcgtcctccccgacccccagtctgggcgcttctgggagggctcttgcggtgccggcactcctccttgttagtgtctttccttgaaggggcgggcaccaggctaggtccggtgccaataaatccttgtggaatctgacttgaggggcagtg

SEQ ID NO: 8333 - DNA, 66 bp, Homo sapiens
gccagaaaccagggcttccctacccccagctgacactggaccccaacatgtatgctcagtagctgc

SEQ ID NO: 8334 - DNA, 1148 bp, Homo sapiens
tcagagagtagtcctggaaggtggcctctgtgaggagccacggggacagcatcctgcagatggtcctggcccttgtcccaccgacctgtctacaaggactgtcctcgtggaccctcccctctgcacaggagctggaccctgaagtcccttccccaccggccaggactggagcccctacccctctgttggaatccctgcccaccttcttctggaagtcggctctggagacatttctctcttcttccaaagctgggaactgctatctgttatctgcctgtccaggtctgaaagataggattgcccaggcagaaactgggactgacctatctcactctctccctgcttttacccttagggtgattctgggggcccacttgtctgtaatggtgtgcttcaaggtatcacgtcatggggcagtgaaccatgtgccctgcccgaaaggccttccctgtacaccaaggtggtgcattaccggaagtggatcaaggacaccatcgtggccaacccctgagcacccctatcaaccccctattgtagtaaacttggaaccttggaaatgaccaggccaagactcaagcctccccagttctactgacctttgtccttaggtgtgaggtccagggttgctaggaaaagaaatcagcagacacaggtgtagaccagagtgtttcttaaatggtgtaattttgtcctctctgtgtcctggggaatactggccatgcctggagacatatcactcaatttctctgaggacacagataggatggggtgtctgtgttatttgtggggtacagagatgaaagaggggtgggatccacactgagagagtggagagtgacatgtgctggacactgtccatgaagcactgagcagaagctggaggcacaacgcaccagacactcacagcaaggatggagctgaaaacataacccactctgtcctggaggcactgggaagcctagagaaggctgtgagccaaggagggagggtcttcctttggcatgggatggggatgaagtaaggagagggactggaccccctggaagctgattcactatggggggaggtgtattgaagtcctccagacaaccctcagatttgatgatttcctagtagaactcacagaaataaagagctgttatactgtg

SEQ ID NO: 8335 - DNA, 304 bp, Homo sapiens
gtaggggcctggggtctggggagcaggtgtctgtgtcccagaggaataacagctgggcattttccccaggataacctctaaggccagccttgggactgggggagagagggaaagttctggttcaggtcacatggggaggcagggttggggctggaccaccctccccatggctgcctgggtctccatctgtgttcctctatgtctctttgtgtcgctttcattatgtctcttggtaactggcttcggttgtgtctctccgtgtgactattttgttctctctctccctctcttctctgtcttcagt

SEQ ID NO: 8336 - DNA, 2158 bp, Homo sapiens
ttctgggggtccacttgtctgtaatggtgtgcttcaaggtatcacatcatggggccctgagccatgtgccctgcctgaaaagcctgctgtgtacaccaaggtggtgcattaccggaagtggatcaaggacaccatcgcagccaacccctgagtgcccctgtcccacccctacctctagtaaatttaagtccacctcacgttctggcatcacttggcctttctggatgctggacacctgaagcttggaactcacctggccgaagctcgagcctcctgagtcctactgacctgtgctttctggtgtggagtccagggctgctaggaaaaggaatgggcagacacaggtgtatgccaatgtttctgaaatgggtataatttcgtcctctccttcggaacactggctgtctctgaagacttctcgctcagtttcagtgaggacacacacaaagacgtgggtgaccatgttgtttgtggggtgcagagatgggaggggtggggcccaccctggaagagtggacagtgacacaaggtggacactctctacagatcactgaggataagctggagccacaatgcatgaggcacacacacagcaaggatgacgctgtaaacatagcccacgctgtcctgggggcactgggaagcctagataaggccgtgagcagaaagaaggggaggatcctcctatgttgttgaaggagggactagggggagaaactgaaagctgattaattacaggaggtttgttcaggtcccccaaaccaccgtcagatttgatgatttcctagcaggacttacagaaataaagagctatcatgctgtggtttattatggtttgttacattgataggatacatactgaaatcagcaaacaaaacagatgtatagattagagtgtggagaaaacagaggaaaacttgcagttacgaagactggcaacttggctttactaagttttcagactggcaggaagtcaaacctattaggctgaggaccttgtggagtgtagctgatccagctgatagaggaactagccaggtgggggcctttccctttggatggggggcatatctgacagttattctctccaagtggagacttacggacagcatataattctccctgcaaggatgtatgataatatgtacaaagtaattccaactgaggaagctcacctgatccttagtgtccagggtttttactgggggtctgtaggacgagtatggagtacttgaataattgacctgaagtcctcagacctgaggttccctagagttcaaacagatacagcatggtccagagtcccagatgtacaaaaacagggattcatcacaaatcccatctttagcatgaagggtctggcatggcccaaggccccaagtatatcaaggcacttgggcagaacatgccaaggaatcaaatgtcatctcccaggagttattcaagggtgagccctttacttgggatgtacaggctttgagcagtgcagggctgctgagtcaaccttttattgtacaggggatgagggaaagggagaggatgaggaagcccccctggggatttggtttggtcttgtgatcaggtggtctatggggctatccctacaaagaagaatccagaaataggggcacattgaggaatgatactgagcccaaagagcattcaatcattgttttatttgccttcttttcacaccattggtgagggagggattaccaccctggggttatgaagatggttgaacaccccacacatagcaccggagatatgagatcaacagtttcttagccatagagattcacagcccagagcaggaggacgctgcacaccatgcaggatgacatgggggatgcgctcgggattggtgtgaagaagcaaggactgttagaggcaggctttatagtaacaagacggtggggcaaactctgatttccgtgggggaatgtcatggtcttgctttactaagttttgagactggcaggtagtgaaactcattaggctgagaaccttgtggaatgcagctgacccagctgatagaggaagtagccaggtgggagcctttcccagtgggtgtgggacatatctggcaagattttgtggcactcctggttacagatactggggcagcaaataaaactgaatcttgttttcagacctt

SEQ ID NO: 8337 - DNA, 230 bp, Homo sapiens
gaaactgcagagactcaccctgattgagggatcacagcccctccaggcaagggagaagtcagaggctgattcttgtagaattaacagccctcaacgtgatgagctatgataacactatgaattatgtgcagagtgaaaagcacacaggctttagagtcaaagtatctcaaacctgaatccacactgtgccctcccttttatttttttaactaaaagacagacaaattcct

SEQ ID NO: 8338 - DNA, 281 bp, Homo sapiens
gaaaatgcagaggctcgggcttgtttgagggttcacgacccctccagcaaaggagtctgaggctgattccagtagaattagcagccctcaatgctgtgcaacaagacatcagaacttattcctcttgtctaactgaaaatgcatgcctgatgaccaaactctccctttccccatccaatcggtccacactccccgccctggcctctggtacccaccattctcctctgtacttctctaaggatgactactttagattccgaatatagtgagattgtaacgtg

SEQ ID NO: 8339 - DNA, 331 bp, Homo sapiens
ggaacccacaagagcatcaggctcagctagaagatccacatcctctacaggtcggggaccaaaggctgattcttggagatttaacaccccacaggcaatgggtttatagacattatgtgagtttcctgctatattaacatcatcttagactttgcaagcagagagtcgtggaatcaaatctgtgctctttcatttgctaagtgtatgatgtcacacaagctccttaaccttccatgtctccattttcttctctgtgaagtaggtataagaagtcctatctcatagggatgctgtgagcattaaataaaggtacacatggaaaacaccagtc

SEQ ID NO: 8340 - DNA, 731 bp, Homo sapiens
gcctgtggaacatgcctcatacctggagtcgccattatccctggaattacaaagatctgcaaaatttatagcgctcacagaaaccctggaggctgtaataaacctggagccccctggactctcctcagctcacaaaaccctctcaattcctacacatcccttaacactcattctccattgaataggtggttactcttagacctagtcttagaacctctgaagacacactttgtaatttgttgtttggctaaatgagaagaaatctgtgccaccctgggaaggtgtcaaaagaaggaaaaatacatgtgacaatatgaatcaagtccatcagcaagttacttttgagcgcctactgtgtgtcagtgcctgagatacacctacaagagcgccaggctttcaagccttcatatctggatagaatcccaacttcagtgcttggtggctgtctatctttggacaagatctttcattccccatcctttgaacatcacatgacccatatctgggtggagaatgggtgaaaagtactgttcagagatgcaggtgagaaaaaacatgacgatgggccctgaatgccaagattcattggagctttggagctttatcttgtaggaccttatcctgactcccttagaatgtaagttccaagagaacagggactttgtctgccttgttttctacttttatcaccagcacccagaatgatgcctaaaatacaataagatctcaag

SEQ ID NO: 8341 - DNA, 1270 bp, Homo sapiens
attcctagtgcatcagcatattcataaatgaaatatactccgagtttcttgaagaagagaaaatcttctcagaatcaggtctaattatatgttattgaattcatgcttcagaaaaactctagggatgcactgcatgtgtgaacacatgataaaaaagtcatgctttattttagtgagggcaattacagagaaaagagtaagcagaaatgtccttctgagtactggcctcattaaggattataaattttctccccgggaagaaaccctgactaacgcattgagaaaagcctttctgtaaagaatggtacaagacaggttgttactcgattatttatagtaaaatatgtgggaaattatatcaatgataaccctgtttattgtgggatatcaatatttttaaagtgccaacacagtcatgataggacaatattttatgtgtgtgtgtgcgccttatgtatataagcatatatataatatataagcatattattatatacaggttgagtatcccttctccaaaatgcctgggatcagaagcattttggatttcagatacttacagattttggaatatttgcattatatttattggttgagcatccctaatctgaaaatccaagattaaatgctccaattagcatttcctttgagcgtcatgttagagttcaaaaagtttcagattttgggttttcagattaggaatacccaacctgtatgtacgtatatttctgtatctatgtatgtatatatatgcatatgcagacatatgtatatggtctggtcagcatatgtgtatgtatgcgtatgtatgtatgtatgtatgccctcagtgcagtggggtttgctgcagaattcactgcatagcaggagatgtaagcagatgagttattttttaagagaatctaatctaattgtttttataaaaattattccctattgaatatttatataatgaggttgtatcaacaatgattaactcctttattatacatacacatgaatgtgcatttttggtaaatgcataaatgagattctataatgtttactgatctttatattacagattttctcttcttttaggattagctcagcttgccccccctttccatctccaccatctatagtgagcctctccataattagtgccaaccattagtctcgttcatatttttacaccaggagtcaacaaactgtggccattggccaaatatggcctcccaactgtttttttaaaataaagttttattggaacacagccatgttcatttgg

SEQ ID NO: 8342 - DNA, 810 bp, Homo sapiens
ggatggggtcagggatattttgagttctgttcatcctaccctaatgccagttccagcttcatctacccttgagtcatattgaggcattcaaggatgcacagctcaagtatttattcaggaaaaatgcttttgtgtccctgatttggggctaagaaatagacagtcaggctactaaaatattagtgttattttttgttttttgacttctgcctataccctggggtaagtggagttgggaaatacaagaagagaaagaccagtggggatttgtaagacttagatgagatagcgcataataaggggaagactttaaagtataaagtaaaatgtttgctgtaggttttttatagctattaaaaaaaatcagattatggaagttttcttctatttttagtttgctaagagttttctgtttctttttcttacatcatgagtggactttgcattttatcaaatgcattttctacatgtattaagatggtcatattattcttcttcttttatgtaaatcattataaataatgttcattaagttctgaatgttaaactactcttgaattcctggaataaaccacacttagtcctgatgtactttaaatatttatatctcacaggagttggttagaatttctgtgtttatgtttatatactgttatttcactttttctactatccttgctaagttttcatagaaaataaggaacaaagagaaacttgtaatggtctctgaaaaggaattgagaagtaattcctctgattctgttttctggtgttatatctttattaaatattcagaaaaattcaccagtg

SEQ ID NO: 8343 - DNA, 1271 bp, Homo sapiens
ggtcggggatatttttgggctctgtctctttctaccctgcgttaagcggaaaaaaaaaattctgacagtgtttttcttcctctttcataccaccaccaccacaatcatcaacataaaggaagtctgtaccaaatctgtagggggtttttcccacaaccaagcaatagacaccagctgggtgtcctacaattaaattccaacactatctacctggagctactgtcagatcccacaggtttaagggctcattccccaagtctgctcctccagttgagacacaagtcacaaatccaggcttctgaaacttcggaccaaccagcttcaatcagggttcccactaccccctctttgggggtagagtggctcatggaactcagagaaacatttatttcggcttgctggtttattataaaagcaaggtttattataaaagatactacaaaggatacagatgaagaggcacatagggcaaggtacggggttccacgccctccctgagtgcatcaccctctgggaacctccgtgtgttcacgtctcatgaagctctccaaatccagtcctcttgggtttttatggaagcttcatgatgtcagcattctttcctccagtgtataggatgggatcctctctggggagggtcttaagacccacaattagaaaggcaagggaagattagagtcctgctttggggtagatgaaaggaaaggagagagattctgtttcctgaggcttaatacacccaacattataacaaaggactgtagcaagggctatgggagttctgaagcagaaaccatgggctaaaaccaacatacatcttaataccagataccctaatcccagtcctaacttcatttaaccttggtcacattgagtcattccaggatgagtggctcaagtatttcctcagggaaaatacttctgtgccccctgatttgagggtaagaagtagataatgaggccactgtgggtgttattttttcatgtctggacctcagcctatatcctgagactaagtggaagtgggaaaagagtacaagagaagagacaaagtggggatatttgtaaggcttagatgagatagtgtttttttagaaaaaaactttatcttaccattaagtaaaatgtttgccataggctttctggggctttctctttttaaagtcagactgttgaaggtttcttctattcttatttgttaagagttttcttttattgtttaaatcatgaatgaatgttgaattttattaaatgcagtttctgtaaatatt

SEQ ID NO: 8344 - DNA, 15 bp, Homo sapiens
aaaccatatgaatgc

SEQ ID NO: 8345 - DNA, 436 bp, Homo sapiens
tgctggaagaggagcaaacactggcctctggtgtccaccctccaacccccacaagtccctctttggggagacactggggggcctttggctgtcactccctgtgcatggtctgaccccaggccccttcccccagcacggttcctcctctccccagcctgggaagatgtctcactgtccacctcccaacgggctaggggagcacggggttggacaggacagtgaccttgggaggaaggggctactccgcccacgtcagggagagatgtgagcatcccgggtcactggatcctgctgctgtaatgggaacccctcccccatttacttctccacctcccgtcctccccatcattggtttttttttgtgtgtcaactgtgccgtttttattttattccttttattttcccccttttcacagagaaataaaggtctagaagt

SEQ ID NO: 8346 - DNA, 1525 bp, Homo sapiens
gtttggcaaactctatcataagttctagcagtaatcaacatccgagagtctatactagaaagaaatcatttaaatgtactatatgtggcacaggctgtatcgagacctaccaaatcactagacatcgaaacattcatctttggtgaaaccacacaaatggattgtgtgtgccaaggccaacaagtcaaaatatgttgaacctaatgatatgatgtgtataaagggtgcaaggacacgtggaaatgatctgtaatattcgggttattaaaaatgtaattggctgggcgcagtggctcacacctgtaatcctagcactttgggaggttgaggcaggtggatcacaaggtcaggagtttgagaccagcctggccaatatggtgaaacaccatatctactataaatacaaaaaaattagccaggcgtggtggcacatgcctgcaatcccagctactcgggaggctgaggcaggagaattgcttgaatccaggaggcagaggttgttgcagtgagctgagatcgcgccactgcactccaacctgggtgacagagcgagactccgtctcaaaaaaaaaaaaaaattatttgggtttgaaaggccaggggcagtggttcatgcctataatctcagcacaatagaaagccaagacaggagggtcacttgatgcctggagatcaagataagtatgggcaacgtagcaaggcccatccctacaaaataaaaaaaataagccaggcccttggcatgtgtctgtagttccagctactcaagaggccgaggcaagaggattgctcaagcccaggagtttgagagtttgagcagtgagctctgatcttgccatttgtactccagcttgggtgacagagcgagaccctgtctcaaaagaaaaaaaaggctagtttttatgacttcaacctgaactttgaaatttcttcatgtgccttccctacaggcctttcactgtggtctgggaaagaatcagtaagatgacagggctgacttcattagatgaggagcgtttctatccagtttcctggaggaataaggacactgccttttcagattaaagattgtctgatttagagaccatggaggtggacagagaataacaaaaccgtgatggcagtcatcatgcttattgcagttagcacacacttttcctgacaggcacagtgctgctgtgctctacaaatgaccatgaaatagagcacgccatgactttaggacacagggatttttatgggaagagagttcatcagggactgattacgtaggagagacgatgcaggggaaatggtggccaccgtctccattgaatagcaatagctgctgtttagcaaagactgattaaaaagtactctgatttttcaaatggaagagagaacagttaaatcagagtagagagtttaatcaaaactaccagtggaacatgttcttgagtaggattcacatttaactgctggcataatttgcaactgttggattttctcatgtttggaacaataaagttgaaattttccaaagtgt

SEQ ID NO: 8347 - DNA, 1664 bp, Homo sapiens
gagtccctacaaactgtatggcaaaaccatcatcatgagttctagcattaatcaacatcagtgagtccatactaagtggaaatcatataaatgaaatgtatgtgacacaggctttatcaaggcctgccaaatcactggacatcaccacatcactgtggaggatgaaagcacacagatgaattgtgtgtacttgggctattattcaaggaccattgctatagaacacgataggatttacacaagaagtaactctgtctctggttctctgatactaatctatgatattgcatgatgcagaataatgctaagtcaaaatatgttgaatctcatgacctgatgtatatcaaaggtgcaacggcttgtaaatgaccagttttattcaggctataaagcattcaattatttggggcttatagaaaaggctactttactctttgtgacttcgaaatcttttcatgtgccttccatacaggccattcactgtggtccctgggaaagaatcagtaggatgacagggctgacttcattagctgaggattatttctatccaatttcctgatgaaggacattgccttttgagattaaatattgtctgatttagagagcatggaggtgggcagagtaacataaaactgatgaccgtcatcatactgttgcagttagcacactttctcctgacataagtgcacagagcttcagtgtccaccaactgaccatgaaatagagtatgctgtaatcttaaggcataggttattagtgggaagagagtaataggttgctagtgtctgattatatggtagaaataatgcaaggaaaaaggtagccaccttctccattgaacagcagtacctgctgtttagcaaagactgatgagaagtagacttttttttttttggagatagagtctcactctgttgcccaggctggagtgtagtggtgtgttcttggctcactgcaccctccgcctcctgggctcaagcagtccttctgccttagcctcctaagtagctgagactacagacgtgcgccaccacacccagttcatttttgtatttttagtagagacagtgtttaccatgttggccaggcaggtctccaactcctgacctcaagtgatatgttcacctcagcctcccaaagtgctgggattacaggcatgaaccatggtgcccagcctcatttttgaaatggaatagagaacagttatatcacagttgagagtttaatcaaaatgaccggatcagcatattctttttttagatgagacagagtttcgcccttgtcacccaggctgtagtgcggtggcgcgatctcggctcactgcaacctccgcctcccgggttcaagcaattctcctgcctcagcctcccaagtagctgggattacaggcgtgtaccaccatacccagctaatttttgtatttttagtagagatggggtttcaccacgttggccacactggtctcaaactcctgacctcaggcgatccatctgcctcagcctgaaagtgctaggattacaggcgtgagccaccacacctggccagctcagcatattcttaagtaggattcacatttaattcttggtattataagttgcaaccatttgatttagaatgtatgcagctctcatgtttgtagtaataaagtttcatttttcctaagt

SEQ ID NO: 8348 - DNA, 3052 bp, Homo sapiens
aaactacaaatgcaacaaatgcgtcaaagaatttagtgtgcactcaagccttactacccatcttttattccatactgcaaagaaattttgcaaatgtaaagaatatgacaaggtcttcaaacacaagtttttctaataactcattagagaatttatactggagagacttcacaattataataaatgtgtggaaaagtcttcaaaaaaatttcacaccttgcaaaaggagatctaaaaaacacaatcagaaatgacaaaggggacattaccaccaaccccacagaaatacgaaaaaccctcaaagattactataaacacctgtatgcacacaaactagaaaacctagaaaaaattaataaattccttgaaagatataaccccccaagattgaaccaagaagaaattgcatccctgaacagaccaataatgagttccaaaatttaatcactaattaaaaatctatcaaacaaaactctggaccagacagatttatagttgaagcctacgagatgtataaagaaaagctgttaccaatcttactgaaactgttcaaaaacatggatgcagagggactcctccctatctgattctatgaggccagcatcattctaataccaaaacctgacaggcacaatgaaaaaagaaaacttcaggctggtactcctgacgaatataggtgccaaaatcctcagcaaaatactagtaaaccaaatccatctgcacatcaaaaagctaatccaacattatcaagcaggctttagtgttgggctgcaaggttggttcagtatacacaaatcaataaatgtgatttatcacatacacagaactaaaaacaaaaaccacatgaccatgatcatctctttagatgcagaaaggtttttaataaaattcaacatcccttcattttaaaaaccctcaacaaattacacattgagggaacatacttcaataagaaccatctatgctggactcacagccaaattaatactgaacaagcaaaagctggaagcattccccttgagaactggaaaatgacagggatgaccactctcaccactccgattcaacatagtactggaagtcctaagcttagtgatcaggcaagataaagatatgaaaggcatatataaataggaagaggggaagtcagtttctcttgcagaagatataattctgtatttagaaaacctgttgtctctgcccaaaggctcctagatctgataaacaacttcaaaaaagtttcaggatacaaaatctgtgtacaaaaattagttgcatttctatacaccagtaatgtccaagctatgaaccaaatcaagaatggaatcccattcacagtagccacaaaaagtataaaatacctaggaatacagccaaccaggtaagtgaaagatttctacaatgagaattacaaagcagtgcacaaagaaatcagaaacaataaaaattgaaaaatatctcatgctcatggataggaagaatcagtattgttaaaatactgcccaaagcaatttacagagccaatgctatttctatcaaactaccaatggcatttttcacagaatcagaagaaaacattctgaaatttatttggaaccagaaaagcccaacctaaatagcaaaagcaatcctaagcaaaaagagcaatgtttgaggtatcacactacccaactttaaaccatactacaaggctacagcaactaaaacagcatggtactggtataaaaaaagacacatagatcaatggaataggtaagagaacccagaaataaaggcatatacctacaaccatgtgatcctcaacaaaactgacaagcaatgaagtaagaacttcattcaataagtggtgctggcataactggctagccatatgcaggatattgaaactggacccctatccttcacgatatacaaaaatcaactcaagatggattaaagacttaaatataaaacctaaaagtattaaattcctagaagaaaacccaggaaatgccattctggacataagtgctggaaaagacttaatgatgaacaccccaaagcaattgcaacaaaaacaaaaattgacaagtgggacctaattaaactaaataacttctgcacagcaaaagaagctatttgcagactacagaatgggagaaaatgtttacaaactgcatctgacaaagatctaatccagaatctataaagaactcaaacaaatcaacaatgagaaaaacaaccccattaaaaactgggcaaaggccatgaatagacctttctcaaaagaatacatacatgtggcaataagcatatgaaaaaaatggttaatatcgctaatcattaaggaaatgcaatcaaagccacaatgagataccatctcagacctgtctgaatgggtattatcagaatgggtattattaaaaaatcaaaacatagatgctagtgaggctgcagagaaaagcaaatacttatacactgctggtgggaatgtaaattaattcagccattgtggaaagcactgcagcgatttctcaaagacataaaagaacatagcattcaacccagcatcccattactgggtgtatacctaaaggaatataatcattccaccataaagacaaacacttgtatgttcattgcagcactattctcaatagcaaagatgtggaatcaacgtaaatgcccatcagcagtagaccagataaagaaaatttggtacatatacaccatggaatactatgcagccataaaaaagaacaagactgtgtcctttacagcaacatagatggagctgaggctcttatcctaagtgaattaatgcaggaacagaaaatgaaatatcccatgttctcacttataagtgggagctaaacattgattacacatggactcaaagaagggaacagtagacacgggcttatgggtggaggttgggaagaggatgaagattgaataactgcctgttgggtactatgctgattacctggggacaaaattaactgtacaccaaactcctgcaacatgcagttgacccatgtacacatactccttgaacctaaaataaaacatg

SEQ ID NO: 8349 - DNA, 91 bp, Homo sapiens
atgtggcaaaatctttagttagaattcacacctagcacaacattggaggactcaggagaaaaaccttacaaatatcataaatgtggcaaag

SEQ ID NO: 8350 - DNA, 1339 bp, Homo sapiens
aagtgtaaatttgcaaggtttttaggcaacagtcaaaccttgcatgtcatcatagactttatactggagagaaaccttacaaatgtgaagaatgtgacaaaagttttcaatttcaaatcactccttgaaatacataggagagttcatactggagagaaaccatacaaatgtaaggtttgtgacaaggatttcgggtgtgattcacacctggcccaacatactggaattcacactggaaaggaactgtacaagtgtaatgagtgtggcagagcctttggtggtcagtcaacacttactcaccatcaagcaatccatggtatagggaaacttgactaatgtaatgattgtcacaaagtcttcagtaatattacagccattgcaaaacattggagaatccataatgaaggaggtcttacaagtgtaataaatgtggcaagtttttcagacatcattcataacttgcagttcattggcgatcttatacaggagagaaatcttacaaatgtgatgattgtggcaaggtcttcagtcaagcttcatcttttgcaaaacgggagaattcatacaggagagaaacctcacaagtgtgatgattgtgagcaaagcctttacttcacgttcacaccacattagatatcagaggatccatactggacagaaatcttacaaacgtcctatgtgtggcaaggtcttcagtccgaggttactccttgcagaatatcataacgttcatttttgaggtaatagttacaaatgcggtgagcacagcaaaccatcaaggattgacagtagagtcaattcagaattgacttgagtttgagttgacttaaaacattcagttgaagcattaattgacattaaagtgtttatgttaagaggattgggccaggcgtgtggctcacgcctgtaaatccagcactttaggagcccaaggtggatagatcacttgaggtcatgagtttgagatcagcctggccaacagacgtgagtcacttttcccagcctgctttttgtttctttaacaaaaaccaataggggtttttataggtattgtgttgaatctgaatcacattggcttatataataacaatattgatttttccaaaccatcaatgtgggttgtatatatatgtttttaatcattttggttaatgtttgtagatttcaaggtgtgaaattctcagtttttttatgtttattcctaagtatttcttactttaagatctctagcaaatggaagtgttttttaattttcgtttaaattttttattgtttatggaaattcaattaatttttggtgctgctattgcattgtgcaaatccactgaatgtgttgatt

SEQ ID NO: 8351 - DNA, 1005 bp, Homo sapiens
cttcccgagtagctgggattacaggtatgaaccactatgcccggctaactttgttttttttttttagaaattaaaccttttttcagcttaatgacccaggggtgtatttttgaaggacttgggagctctctttgaaaggcaaacaacaagggaaacagtacctttatctcagtaggaaattaaataattcaaacatcaaataacttcaatttaaggctatggactttgagataattctgagccttgagaggaatgtggtcaggcaacctgagtccagtggaatgcaggtgcaacttctaagagttttcctgtaagtaattaagaagactaagtagccccagagataagacctcctcggatcattgtcccttcttatgtagtgataaagtaaccttccttgaagtgtatctatccgtaatcaatcaagttgctgcagcctatgcactggcccagaataaaaaacgtggtgattctgctaaagcttctctgtctttccctgtgtgtgaaatcttaacgtctctacttgggaacgctgatcccattcatttagagttgatgtttccacgtggctatttccaagctttgccttcaaataaattctgtacttaatcatatattctaaattttattatttactgctgacatcagtttctgtcggattgtaggagcctcaccagagagggcccctgtcgccatgttgtaaaactcacacttgccaaaagttgtgggttagggtttctccccctccctcaggatgacgctagttagctgacacagatggtcacctccattaccaagtagagtcaggatgaactatgtgtgactgttcaactatgtgtcctcttccctgaggactgattagtgtttatcttgaaaacatgtccttaatgggttgtatagaacactgaagcatctgatttcaaactcttagctcttttcctctatttcccatcacattctggtctaaggcttatttattaataaaatgatttttatttctttatt

SEQ ID NO: 8352 - DNA, 39 bp, Homo sapiens
attggctgtcttggtttatgttcggccactgatgcactc

SEQ ID NO: 8353 - DNA, 1512 bp, Homo sapiens
tgaatgtggtgaggtttttaatcaacaagcacaccttgcaggtcatcatagaattcatactggggagaaaccttagaaatgtgaagcatgtgataaagtttacagtggcaaatcaagcctcagaagacaggagaattcatactggagagaaagcttataaatgtgaagaatgtcacaaagtttacagtcgcacatcaaaccgtgaaagacaggagaattcatactggagagaaaccataaaaatgtaagagtttgtgacaaggcttttgggcatgattcgcacctggcacaacatgctagaattcacactggagagaaaccttaccagtgtaatgagtgtggcaaagcctttagtaggcagtcaacacttgtttaccgtcaggcaatccatggtgtagggaaactttactaaggtaatgattgtcacaaagtcttcagtaatgctacaaccattgtgaatcactggagaatccataaggaagagagatcatactagggtaataaatgtggcagatttttcagacattgttcataccttgcagttcatcggtgaactcaacgctggagagaaaccttacaaatgtcatgactgtggcaaggtcttcagtcaagcttcatcctatgcaaaacataggagaattcatacaggagagaaacctcacatgtgtgatgatagtggcaaagccttcacttcacacctcatgagacatcagagaatgcatactggacagaaatcttacaaatgtcatcaatgtgccaaggtcttcagtctgagttcactccttgcagaatatgagaaaattcattttggaggtagttggtccatatgcaatgagtagagcaaaccatcaagcattaattgacattagggtcaattcagcattgacttgagtttgtattgacttaacattgagttcaagcattaattgacattagtgtttatgttaagaggattgggccaggcacatcagcttacacctgtaatctgagcgctttgggaggccaaggtgggtagatcacttgaggtcaggagtttgagatcagcctggccaacagacgtgagccattttcccagcctgttttttgtttctttaaaaaaactgatagggatttttatggatatcatgttgaatctaaatcacattgggttattatataatcatttcacaatattaatttttccaagctatcaatatgggttgtagctcaatgtttttaatcattttgatcaatgtttgtagatttcaaggtacaaacttctgacctttgtacgtttatttctaagtatttctttaagttctccagcaaatggaagtgttttaaaattttcttttaaaattgtttattgttaaagtatggaaattcaactaatttttggtgctgatactgtattgtgcaaatccactgactatgttacttagttccagtagtattttggttggctctttgtgattttctacacagaagattatgtcatctacaaacaaatataattttacttcttactttctg

SEQ ID NO: 8354 - DNA, 2206 bp, Homo sapiens
aaagcaaagcttgcacatcatcatacaattcatactggaaagaaacaagtgcaatgagtgtggcaagaccttctgtcacaattcagtccttgtaattcataagaattcatactggagagaaacaagtgtaatgaacgttgcaaaatttttaatcaacaagcacaccttccacgtcatcatagacttcatagtggagagaaaccttagaaatgtgaagcatgtgacaaagtttacagtggcaaatcgagcctcaaaagacaggagaattcatactggagagaaagcttacaaaggtgaagaatatcacagagttttcagtcacaagtcaaaccttgaaagacataaaataaatcatactgcagagaaaccataaaattgtaagagttcgtgacaaggctttcgggcatgactcacacctggcacaacatcctagaatttatactggagagaaaccttacaagtgtaatgagtctggcaaagccttaatgagcagtcaacacttactcaccatcaggcaatccatggtgaaggaaacttgactaatgtaatgattgtcaccaagtcttcagtaacgctacaaccattgcaaatcattggagaacccataaggaagagagatcatacaagtgtaataatcggcaaatttttcagacatcgtccataccttgcagttcattggcgaactcatactggagacaaaccttataaatgtcatgattgaggcaaggtcttcagtcaagcttcatcctatgcaaaacataggagaattcatacaggagagaaacctcacgtgtgatgattgtggcaaagcctttacttcacgttcacacctccttagacatcagagaatgcacactggacggaaatcttacaaatgtcatcagtgtggcaaggttttcagtctgacttcactccttgcagaatatcagaaaattcattttgagataattgttccaaatgcaatgagtagagcaaaccatcaagcagtaattgacattaaagtgtttatgttaagaggattgggccaggtacagtgtctcacacctgtaatcccagcactttgggaggccaaggcgggtagatcacttgaggtcaggagtttcagatcagtctggccaacaaacatgagccacttttcccagtttgctttttgttctttaacaaaaactgatagggatttttatgggtaccgtgttgaatctaaatcacattgggttatataatcatttaacaatattaatttttccaatccatcaatatgggttatatgtctgtatatgtttttaatcatattgatgtatatttgtagatttcaaggtacaaacttctcacctttttacttttatttctatttctttaagttctctagcaaatggaagtgtttttaaattttcttttaaaattgtttattgttacaaacttctcatctttttgcttttattcctaagtatttcttactttaagttctctagcaaatggaagtgtttttaaattttcttttaaaattgtttattgttaatgtatggaaattcagctaatttttggtgctgatattgtactgtgcagatacactgaatctgtttattacttccagtagtattttggttgagtctttgtgattttctacacagaagatcatgtcatctacaaacacatataattttacttctttctttctgatttggatgggtttgatttcttttgctatttcattgctctggctaggacagccagtatttattgaatagaaggggtgagagcattcttccatcatgtgagatcctacaggaaaatcattccatgttccctgcttcgttatctactcgttggtcatttcatggatggcctttctattgttgaggtaaatttccttttctgtctattttgttcagaatttctatgatgagtggattttgaattttgtgaaatactttttctccatctattgagatgatgtggttttcatctttcattctgttcaagtggcatatcacattgatttgcttgactatgttgaaccatccttgcatcccagaaataagtggcacttgagtatctacagtcctttttacatcctcttgaatacagctttttagtacaaggggtcttcaagaagttcatggaaaaatacatattttgcatattatgagaaaattgtgtatgaatttcccagtttttgcaccaaaataaactggtacgaatctgt

SEQ ID NO: 8355 - DNA, 2317 bp, Homo sapiens
agagccttttgaacgcagtagcccgctcgtatctatggtttcgctttccacagtttgttacctgcagtcaactgcagttcaaaaatattaaatggaaaattccagaaataaagaattttaagtctcaaatggtgtgcccttctgagtagcgtgatgaaatctctcgctgtccggctccagccggccggggatgtgagtcatcccttggtccagcacatccacgctgtatacgccacccaccctgctagtgacttagtagccgtcttggtgatcagatcaactatcccagcatcacagtgcctgtgcccaagcagtcctcactttgcttaacagtggccccagagagcaggagtagtgatgctggtgattcggatatgccaaagagaagccacaaagtgcttccttttaaatgaaaaggtgaaagttctcaacttaaaaaagaaaagaaaaaaatcatatactgaggttgctaagatctacatgacaataagatattttgggagagagatacgttcacataattttattacatatattgttacaattgttctattttgttagttactgttggtaatctcttactgtgcctaatttataaattaaactttagatatgtatgtacaggaaaaaatgtagtatatagtatcgtatatatgtacaggaaaaaaacgtactatctgtggtttcaggtgtccactgcgggtcttcaaacgtacccccctcaggtgagaggggactgctgtacaaagaatataggaaggcctctagactacatccattccttcctcaacaggaggaaaattcctggtacagtttaacgtaaggcttcactgatcactgttgtttttgtttttgtttttgtttttttgagacagagtctcactcttgcccaggctggagtgcagtggcacggtcttggctcactgcaacctccacctcccaggttccagcaattctcctgcctcagcctccccagtagctgggattacagacatgcaccaccacacctggctaatttttgtatttttagtagagacagttttcaccatgttgtccaggctggtctcaactcctgacctcaggtgatccacccaccttgccctcccaaagtgctaggattacaggcgtgagccactgcacctagcccactgatcactcttctgcttacagaatatcagaagtcattctagaggcaaatttgaagagtggaaaaatcactttttctgaatgatcttgtttttggtgtagatgtttttattgtgtgggttagtttaatgaatacataaagactaccagtaccattctgtctttactccgtggcatctgtggaataaccctgctaatgtaacacgtgagaaagcctttggtcatgccacccactctaccagttgtccccaccatcccccgccctcctccctgtgagacactgggccaaaggctcactacccctgtgcgttgtccagcacacagacactatgtgcattatttgtacataaggataatcacatctacctgagactgctatcatggaaattaaatgtttggtacatgtaaagtctttgaaagtgtaactggaatattgtgtaattttaataaataataactattgttgtttttatgatcattactaccatttgtgttgccattagtgaatttttacaagaaaactccctgtgggtgcaatgagtctggaaaagaccattgagtcttctagaagaaaacattaagagattattggcacagccgtgggttacgcaatgatttcttagtacacaaaacacagcaaacataaaaagttgttacacttcatcaaaagtacaaagttctgttcatcaaatgatgctgttaagatagggaaaagacaagaaacaggactggaagaagatgtttgctctaaggtacacctgacaaaggaactctcatagaaaatataaagaatccctcaagttgaaaaaaaaatcaatttaaaggggagaaaacttcagcacgtctcaacagaagaccaccaaatggccaataagtaagtgaaaatgtattcaatgtcattgctcctcaaggaactgtagagtaaaaccacaatgtgctgtcactctagacagtcaccaggatgattaaatttaaatcacaataacaaggctgatttcagatgtctcaccacaaagaaggaggataagggagcgaggtgatggatatgttaattagcttgatttaatccttccacattgtatacatgtatcagaacatcacattgtactccatcaatataatacaattattatttgtcaatcaaatattaataaaatcaaagatgagcagg

SEQ ID NO: 8356 - DNA, 21 bp, Homo sapiens
taaatacaaaaagtcacatgt

SEQ ID NO: 8357 - DNA, 1930 bp, Homo sapiens
gactctcccaagaggctcccgttccctctccaacctctttgttcttcttgcccgagttttctttatggagtacttctttcctccgcctttcctctgttttcctcttcctgtctcccctccctcccacctttttctttccttcccaattccttgcactctaaccagttcttggatgcatcttcttccttccctttcctcttgctgtttccttcctgtgttgttttgttgcccacatcctgttttcacccctgagctgtttctctttttcttttcttttttttttttttttttttttaagacggattctcactctgtggcccaggctggagtgcagtggtgcgatctcgactcactgcaacccccgcctcctgggttcaagcgattctcctgccccagcctcccaagtagctgggaggacaggtgtgagctgccgcacccagcctgtttctctttttccactcttcttttttctcatctcttttctgggttgcctgtcggctttcttatctgcctgttttgcaagcaccttctcctgtgtccttgggagccctgagacttctttctctccttgcctccacccacctccaaaggtgctgagctcacatccacaccccttgcagccgtccatgccacagccccccaaggggccccattgccaaagcatgcctgcccaccctcgctgtgccttagtcagtgtgtacgtgtgtgtgtgtgtgtgtgtgtgtgtgtgtgtttggggggtggggggtgggtagctggggattgggccctctttctcccagtggaggaaggtgtgcagtgtacttcccctttaaattaaaaaacatatatatatatatatttggaggtcagtaatttccaatgggcgggaggctttaagcaccgaccctgggtccctaggccccgcctggcactcagccttgccagagattggctccagaatttttgccaggcttacagaacacccactgcctagaggccatcttaaaggaagcaggggctggatgcctttcatcccaactattctctgtggtatcaaaaagaaaaaaaaaaaaaaagaaggagtcggggccgggcgtggtggctcacgcctgtaatcccagcactttgggagaccaagtcaggcaatcatctgaagtcaggagttcaagaccagcctggccaacatggtgaaagcatgtctctattaaaaatacaaaaattagccgggcgtggtggcgggcgcctgtaatcccaggtatttggggggactgagacaggagaatcccttcaacccgggaggtggaggttgcagtaagtcaagatggcaccactgtgctccagcctgggggacagagcgagactccatctcaaaaaaaaaaaggaatcggacgaagaaccacaggatgttgaagacaactgtctgaagtatttgtgagggacagcgatgtggccctctgtgttaagaataacgtgtcctgctttggcagagagaagaaaatagccactgcccgctttcaaggcaagatcgaccttttctgttttgttttgtttttctttctttttcctggccatgaggacaaaaattactgagtggcccttaaagagggaagtttgttttcagctgttctcttttgcccgtaggtgggagggtggggattgctgcgtcctagctagaggaatggctttgcttgaatgtgtagtgcacacgcacgggtgtttctgtgtgctagttgcttcttgctgctgcttcctgcttgtctgggactcacatacataacgtgatatatatatatatatatataaatgtataaatatatattttatttttttttaaatccctggagcttctggttcctatcagttcctgttgttaatcgtagaaccgttgtcccttcccccattcccgtatccatcatgttctttttcttttaaatatcaatataaaggt

SEQ ID NO: 8358 - DNA, 752 bp, Homo sapiens
tctcacccgccgccactaggtgtccccaacgtcccctccgccgtgccggcggcagccccacttcacccccaacttcaccaccccctgtcccattctagatcctgcaccccagcattccagctctgcccccgcgggttctagacgcccctcccaagcgttcctggccttctgaactccatacagcctctacagccgtcccgcgttcaagacttgagcggagcccgatattctccctgaccttagcgttctggactctgccccaatcgggtccagagaccacaccactaaccatccccaactccatggggttcgagactccatcttggtagttctgtgcctccccccagaccccgcccctggggaaatagcctcacggggttggctgttccagactcaggttccagaacagccctcggcctccgaggctccccgcctccactctagttctagatgagtgggaggcgtgcccccctcctccagtacgtcccgctgctgtgctctggggatttctgggatatatggaggattctttccccagaggctcccaatcagcttttgttctagacttccccatcccgaagccatcacttctccccgcagcccgcctgccgtgcatggctcctgtctggctcggacccaccccaactctccccagtgcctgccactctctgggactctcctcctcccctcctcttcccttagcctctcccacccggccacagctgctggagaataaatttgggatgctgatg

SEQ ID NO: 8359 - DNA, 721 bp, Homo sapiens
ggcccgcccctcggagctccccctgcctcctcctcctcctcgtcttaggggggtctccctgcaatgcagcgcccccttccgtcctcgggactcctcgctcccacccggaggaggctgcgccagctttaggccccgccctcctcccaatggctccgcccacagactcccttatttcaatggccgcgccctcttttcccgacctctccttttcattggtccctctcactcccaaatgactcctccccttcgttggcccgcccctttcctctggcccctcctctccaagaaaattagctcctccctcgttctccacctgctctgagctgggagcagccagaggcggtgcaagcgcccagctccccagagctccccaacctcggacctcaccgcaggggcgctgggctggagagcaggttcgggcagccgtcgggaataccgaccatcctcttctcccttctaacctgggcttcctttttccctgcctaatctcacctcctgacctgctgggtcctccggtgcagtgggagggccggcttgctccacccgcagccccggggtggcgtagggaagggggctggaagccacgggtacggttaacctggcccttccctccccatctcccctacttccctggaaggtcccattctttctcaccggctgggctcttttctgcttcctgaaggttacctgccttttagggggctcttgtctaaaggatctt

SEQ ID NO: 8360 - DNA, 36 bp, Homo sapiens
gggcgcggcgggggagccgaggggcgtgtccggggc

SEQ ID NO: 8361 - DNA, 475 bp, Homo sapiens
agccacgcgtgagacttctctaagcaaccaccgagccctttgaccttctccattgtacccccaagatctttttgccccatctcctagagaaactgtgttctccctgctcgggggcccatgtttttttacacgcctgcctcctgtccccttatcctttctccctctgtaaatacgtttttctctgtggctgtatgtgggttgcttgggggtgggatgggaagaggctctttgcaaacgagggtccccagagaagactggcggggacctgatggggtagctggggtgtggggttgggggatgaggtcagggggtcttgggtgggagttgggggccccttcatttcccaggtctggatcgattcacttgccgggagagactttttacaactcatctgcagctccgggtgcggttgggggagatagcgaagggtctggcctcgctgtgatctgatttgggattaaaggtttggaaattt

SEQ ID NO: 8362 - DNA, 59 bp, Homo sapiens
gcacctccactgacagaggcggcccctcccacggctcccaataaaaatgtgaaaaccaa

SEQ ID NO: 8363 - DNA, 277 bp, Homo sapiens
atgactgcgtgtgtccaaggtggcttcccactgaagggacacagaggtccagtccttctgaagggctaggatcgggttctggcagggagaacctgccctgccactggccccattgctgggactgcccagggaggaggccttggaagagtccggcctggcctcccccaggaccgagatcaccgcccagtatgggctagagcaggtcttcatcatgccttgtcttttttaactgagaaaggagattttttgaaaagagtacaattaaaaggacattgtc

SEQ ID NO: 8364 - DNA, 282 bp, Homo sapiens
caccggcccctccctctacccacccccttcccccgcatgctgatccccctgcccaggtgagggccctgccctggaagactggagggaggccccaagccacggggcatccccctctcccaggaagcagggagggggccgggaggttttcctctcagccccaccctgggggcccgggggcgagggctgccccctcctcccctccccagtgagggacattttttggtaaacctattttcattttggaaaatatttatgaataaatagttttatatgacggctggc

SEQ ID NO: 8365 - DNA, 308 bp, Homo sapiens
actccagagacctaggggatgtggctgtgtcggcagcaagagcctttctggatgttccccagctcttctctgggagtctagaacatcctcctacctttctccgcggttagtttttgattccaggttttcgaacactacatcttttttatgttcttccttgtttcaaagcacttattggctgtgtttttgtagttacctattttcacactgtgagcttcccgagaatggggcctgggtttgattcatctgttttctacagggtttaagtctcaggaggtctcaataaacttggtatataaatgttcatg

SEQ ID NO: 8366 - DNA, 70 bp, Homo sapiens
gtccacctgtccctcctgggctgctggattgtctcgttttcctgccaaataaacaggatcagcgctttac

SEQ ID NO: 8367 - DNA, 540 bp, Homo sapiens
ttccttccctggctgccggaggagaccccactaacccagcctgcctgggctctgaccactaacactcttggccatggacagcctgcacaggaccgcctccctgctcttggccactgtgctcccatttctgtccttggccttgggagtagctgagggggcagactagggagtagggctggcaggggagggggcagacagcctcgcctcgcacccttcatccctggctgccggtcccatccttggagggactaagctgggggtgggggacatgagtccccctgctgcccctgccacatcccagtgggctctgaccccctgatctcaactcgtggcactaacttggaaaagggttgatttaaaataaaagggaagactattttacaagcagctgggtcctccttatttctcctctcccttgattcggcctcctggccagggctgggacatcctccctgctgtcctctctcccccggcctcccagctgccaggaatttctgcgcctgtccaggctcagcaaggggtccaaagacattgttcttt

SEQ ID NO: 8368 - DNA, 1088 bp, Homo sapiens
gcacccagcgaggaggggcgggggcaggggctgcagcccccagcgctgcctttgcggattctgtttttgagccgtggacttgggttgtaaatttatttgtggggagtgcgctccaggaagagccaccatccctgcccccgttttcccaccggggagtctgtacagagatttttctacgtttttattttttgcctcagagggatgggattggggaggaggggatgggcagcggagggttgggggcatggtctgcaggctcatctgtgtccgcctttcactccactaatgctgtctcagtgttttctctctctctctttcgagcttgcactccggtacccgacccggcgccctggcccatcccatgccggggggccagtggaaagaagacaggccgtccagcccgtgcccgcctgcggcgggggcacccagcaagcccgcccaccgcccgctgcctcacctgcttcgccacagactcttgttcccagccccttggggcctccgtgtttggggtgggggagctgcttagagactgtgcccgtcctcggccccccaccctgaagtgccagcaccaccagcaccagatcctccgccgccacaccgcactgaggacacgccggccgggccgcctcgtctcaagttgtataaagttgtctccgtgtcccctcctccctctgcccccagtgtttcttctgatttttttttcccctttccctccctccctctccgcattcttcccttggttcagcacaggtaaaacggttcccctccctccctgccttcatggatcaccagctcacgtcatgttgccttctcttttctttgtgtgtgtgtttatttaagttatttttcttcctcctctcccttttctttttggccctccctccctccctcttctgccatgtaactggaggatgtgctatgagtttgcaaacagctggactgtcaggctgctttttttccagatgttcctcctctgcctccccttcccctcctctcccctccttttccttccttccttcctttccttggagcactgagcaccatttggaagcttgagagaaaccaaaattaaagagagaaagagagag

SEQ ID NO: 8369 - DNA, 116 bp, Homo sapiens
atgaggagaaatggcctcccgtcttgtgaacttcaatggggagaaataattagaatgagcaatagaaatgcacagatgcctatacatacatatacaaataaaaagatacgattcgc

SEQ ID NO: 8370 - DNA, 208 bp, Homo sapiens
acagcagagaggacaatgcatccttcagcgtggtggagcctcagggacagatctgatgatcccaggaggctctggaggacaatctaggacctacattatctggactgtatgctggtcatttctagagacagcaatcaatatttgagtgtaaggaaactgtctggggtgattcctagaagatcattaaactgtggtacatttttttgtc

SEQ ID NO: 8371 - DNA, 673 bp, Homo sapiens
cccagggggggacgcagaccccacactccatggagtctggaatgcatgggagctgcccccccagtggacaccattggaccccacccagcctggatctaccccaggagactctgggaacttttaggggtcactcaattctgcagtataaataactaatgtctctacaattttgaaataaagcaacagacttctcaataatcaatgaagtagctgagaaaactaagtcagaaagtgcattaaactgaatcacaatgtaaatattacacatcaagcgatgaaactggaaaactacaagccacgaatgaatgaattaggaaagaaaaaaagtaggaaatgaatgatcttggctttcctataagaaatttagggcagggcacggtggctcacgcctgtaattccagcactttgggaggccgaggcgggcagatcacgagttcaggagatcgagaccatcttggccaacatggtgaaaccctgtctctcctaaaaatacaaaaattagctggatgtggtggcagtgcctgtaatcccagctatttgggaggctgaggcaggagaatcgcttgaaccagggagtcagaggtttcagtgagccaagatcgcaccactgctctccagcctggcgacagagggagactccatctcaaattaaaaaaaaaaaaaaaaaagaaag

SEQ ID NO: 8372 - DNA, 258 bp, Homo sapiens
gatgcagccgggaggtgaacagcagagagaagaatgtacccttcagagtggtggagccttgggaacagatctgatgatgccaggaggttccgggagacaatttagggctgatgctatctggactgtctgccaatcatttttagagggaggaatcagtgttggattgcagagacattttctggagtgatccatgaaggaccattaacctgtgatacctttcctctctattaatgttgacttcccttggttggatcctct

SEQ ID NO: 8373 - DNA, 376 bp, Homo sapiens
tccaggggggacccagaccccacaagccatggagactcaggaccccagaaggcatggaagctgcctccagtagacatcactgaaccccagccagcccagacccctgacacagaccactagaagattccgggaacgttgggagtcacctgattctgcaaagataaataatatccctgcattatcaaaataaagtagcagacctctcaattcacaatgagttaactgataaaacaaaacagaagtcagacaatgttttaaattgaatgatcatgtaaatattacacatcaaaccaatgacatgggaaaatgggagcttctaatgaggacaaacaaaaaatagagaaaaattaataaagtcaaaatgtttattcttgaa

SEQ ID NO: 8374 - DNA, 440 bp, Homo sapiens
cacggaacttccaaatgctgagcgcagatccaaagttgtcttctgtccactagcaccacagtcaggccttgatgggatcttctagggagacaatagccctgtctcaaaaccgggttgccagctcccatgtaccagcagctggactctgaaggcgtgagtctgcatcttagggcatcgctcttcctcacaccacgaatctgaacatgcctctctcttgcttacaaatgtctaaggtccccactgcctgctggagagaaaacacacttgcttagcccacaattctccatttcacttgacccctgcccacctctccaacctaactggcttacttcctagtctacttgaggctgcgatcacactgaggaactcacaattccaaacatataagaggctccctcttaacacggcacttagatacgtgctattccacctttcctcag

SEQ ID NO: 8375 - DNA, 306 bp, Homo sapiens
ttttgctccatttgtctaaaatgagtaggctgcaactcctcttgaagtgataccttttctagctcttgttggaggtgtctcaggactcattacttcggggaacctgcaactgtgtcagtctggggaaactgcaaatattcttgtcttacatttgtctccagccaattgtgatggactccagtgacctgcaattgctgttattgcaggtaaaatgtacctgagtcaggccacagttctcctggactatgagcccctggccatgttcctgaggcaattctgttcatctaaatataataataataacac

SEQ ID NO: 8376 - DNA, 532 bp, Homo sapiens
tccaaagttgtctcctgcccatgagcaccacagtcaggccttgaggggatcttctagggagacaacagccctgtctcaaaactgggttgccagctccaatgtaccagcagctggaatctgaaggcgtgagtctgcatcttagggcatcgctcttcctcacaccacaaatctgaacgtgcctctcccttgcttacaaatgtctaaggtccccactgcctgctggagagaaaacacactcctttgcttagcccacaattctccatttcacttgacccctgcccacctctccaacctaactggcttacttcctagtctacttgaggctgcaatcacactgaggaactcacaattccaaacatacaagaggctccctcttaacacggcacttagacacgtgctgttccaccttccctcatgctgttccacctcccctcagactagctttcagccttctgtcagcagtaaaacttatatattttttaaaataatttcaatgtagttttccctccttcaaataaacatgtctgccctc

SEQ ID NO: 8377 - DNA, 513 bp, Homo sapiens
gcaccacagtcaggccttgagggcgtcttctagggagacaacagccctgtctcaaaaccgggttgccagctcccatgtaccagcagctggaatctgaaggcgtgagtctgcatcttagggcatcgatcttcctcacaccacaaatctgaatgtgcctctctcttgcttacaaatgtctaaggtccccactgcctgctggagaaaaaacacactcctttgcttaacccacagttctccatttcacttgacccctgcccacctctccaacctaactggcttacttcctagtctacttgaggctgcaatcacactgaggaactcacaattccaaacatacaagaggctccctcttaacgcagcacttagacacgtgttgttccaccttccctcatgctgttccacctcccctcagactagctttcagtcttctgtcagcagtaaaacttatatattttttaaaataacttcaatgtagttttccatccttcaaataaacatgtctgcccccatggt

SEQ ID NO: 8378 - DNA, 503 bp, Homo sapiens
gcaccacagtcaggccttgaggacgtcttctagggagacaacagccctgtctcaaaaccgagttgccagctcccatgtaccagcagctggaatctgaaggcgtgagtcttcatcttagggcatcgctcctcctcacgccacaaatctggtgcctctctcttgcttacaaatgtctaggtccccactgcctgctggaaagaaaacacactcctttgcttagcccacagttctccatttcacttgacccctgcccacctctccaacctaactggcttacttcctagtctacttgaggctgcaatcacactgaggaactcacaattccaaacatacaagaggctccctcttgacgtggcacttacccacgtgctgttccaccttccctcatgctgtttcacctttcttcggactattttccagccttctgtcagcagtgaaacttataaaattttttgtgatttcaatgtagctgtctcctcttcaaataaacatgtctgccctca

SEQ ID NO: 8379 - DNA, 406 bp, Homo sapiens
aggcgtgagtctccatcttagagcatcactcttcctcacaccacaaatctggtgcctgtctcttgcttaccaatgtctaaggtccccactgcctgctgcagagaaaacacactcctttgcttagcccacaattctctatttcacttgacccctgcccacctctccaacctaactggcttacttcctagtctacttgaggctgcaatcacactgaggaactcacaattccaaacatacaagaggctctctcttaacacggcacttagacacgtgctgttccaccttccctcgtgctgttccacctttcctcagactatttttcagccttctggcatcagcaaaccttataaaatttttttgatttcagtgtagttctctcctcttcaaataaacatgtctgccttca

SEQ ID NO: 8380 - DNA, 625 bp, Homo sapiens
ttggatcactgtgttttcacacagagaaaaatcactcgcccttctgagaggcccaagacacccccaacagataccagcatgtacatagaacttccaaatgctgagcccagatccaaagttgtcttctgtccacgagcaccacagtcaggccttgaggggatcttctagggagacaacagccctgtctcaaaaccgggttgccagctcccatgtaccagcagctggaatctgaaggcatcagtcttcatcttagggcatcgctcttcctcacaccacgaatctgaacatgcctctctcttgcttacaaatgtctaaggtccccactgcctgctggagagaaaacacactcctttgcttagcccacaattctccatttcacttgacccctgcccacctctccaacctaactggcttacttcctagtctacctgaggctgcaatcacactgaggaactcacaattccaaacatacaagaggctgcctcttaacacagcacttagacacgtgctgttccacctcccttcagactatctttcagccttctgccagcagtaaaacttataaattttttaaataatttcaatgtagttttcccgccttcaaataaacatgtctgccctcatg

SEQ ID NO: 8381 - DNA, 476 bp, Homo sapiens
ggagacaacagccctgtctcaaaaccaggttgccagatccaatgaaccagcagctggaatctgaaggcatcagtctgcatcttaggggatcgctcttcctcacaccacgaatctgaacatgcctctctcttgcttacaaatgcctaaggtcgccactgcctgctgcagagaaaacacactcctttgcttagcccacaagtatctatttcacttgacccctgcccacctctccaacctaactggcttacttcctagtcctacttgaggctgcaatcacactgaggaactcacaattccaaacatacaagaggctccctcttaacacggcacttacacacttgctgttccaccttccctcatgctgttccacctcccctcagactatctttcagccttctgtcatcagtaaaatttataaattttttttataacttcagtgtagctctctcctcttcaaataaacatgtctgccctca

SEQ ID NO: 8382 - DNA, 734 bp, Homo sapiens
aaattggcacagccatacggcactgaacaaggaagcctcggcagatgtggctgaaccgagctggagccaacagatgtgtcagccaggattgacctttgcacgaacaccaagtgtctgcaagtaaacacctggaggtgaaggcagagaggagccaggactgtggagtccgacaaagctacttgaaggacacaagagagaaaagctcactaagaagcttgaatctacttttttttttttttgagacagagtctggctctgtcacccaggctggagtgcagtggagcaatctcggctcattgaacctcttgggttcaagtgattcttgtgcctcagcctcccaagtagctggaattacaggcacataccactgcacccagctaatttttgtatttttagtagagatggggtttcactgtgttggccaggctggtctcgaactcctgacctcaggtgatccacccaccttggcctcccaaagtgctgagattataggcatgagccaccacgcctggccagatgcatgttcaaaccaatcaaatggtgttttcttatgcaggactgatcgatttgcacccacctttctgcacataagttatggttttccatcttatctgtcttctgattttttatatcctgtttaatttcttccttcattgttcttctctttttttatttattttatttatttttatttttatttttatttgagacagagtctcactctgttgcccagg

SEQ ID NO: 8383 - DNA, 707 bp, Homo sapiens
agacgtgcactgagagtgaagtgaagagaggcaaaggctctcactccaggacagtggagagagaaaggcttccccaccacactttccgctttcacttcctcgctagagttctccagacagggttcattgaaaacttagtctgtggagaacagaagggctaactcagtttgtttcattttatttatttcattttattttccgggatagagtcttgctctttcgccaaggctggagtgcagtggcacgatctcgactcactgcaaccttcgcctcccaggttcaagcaattctcctgcctcagcctcctgagtagctgggaccacacagacagggtttcaccatgttggccaggctggtctcgaactcccgacctcaggtgatccacctgcctcggcctcccaaagtgctgggattacaggcgtgagccaccgcgcctggccaggctgcacacattcttattaggattccaccttgttctggtgttgtagagatgtgattaggtatttagtgaattcaccaagtgaggagagaatgaaaagaaaacacaacctgcctggccgggcgtggtggcgtgagcctgtcgtcccagctactcaggaggctgaggcaggagaatcacttgaacccaggaggcagctgttgcagtgagccaagatcacgccattgcactccagcctgggtgacagaacgagactccacctcaagaa

SEQ ID NO: 8384 - DNA, 200 bp, Homo sapiens
agaatgaccatgagacacagtggccatgggtggatctgaaagctggtgttgagcctgggcggcgtgagctctgtgttggacccacggaggagggagtcactgcagggaaagagggacactggcattccatttgtcagagcatcccggacgatgcagagggtgggagaactacatgctaaatttctttttttttttttttg

SEQ ID NO: 8385 - DNA, 239 bp, Homo sapiens
atccccccgagtcattcattctccatgaagtcatcgattttccaggtgttggtgaactgcctgtgactcctctcctccccggcccctacccctcagggataatgagttcattgctgggctagatgttttagccatgattctgcctctgttttatacctgcacacatccttatctttgttacatatgaaatatctgtatcacgggtatattgagagaaataaaggtgagagcattcacaa

SEQ ID NO: 8386 - DNA, 309 bp, Homo sapiens
cctgccaggcgcccttcgcaaagagtgacgaggccccgtgggagaacggactcctcagactctccccaatagcggaagtcgatcttctgaaggatggccaatctgctccggccctggtcttcccccatcccggtggacagacttaacgatccttgctgcagtccctccggagaggatctggactggctgggagtggggagggcgtggagacagtctacggaaagcgctagcagacccccgagagggtgcagtggagccctgagcattgtaatatgcggcccagcctataaacagcctccgtgcttagca

SEQ ID NO: 8387 - DNA, 465 bp, Homo sapiens
ccccacggggccggggagggaggggacccccctccaccccccttccgtgccccccaactgtgaatctgtaaataaggcccaaggaacatgtcgggaggggggtggacacaaaaaccggccttgccctgcagggatggggctccacaggccgtgcccaactgggggtggttctaggggaacagggggcgggggagctgtttctattttatttattgattaatttattattttatttattgatcaatctctctgcggggtggggtgggggagggacgggagctggttggggtggcttagcagatccggacagggccctctgtccctgtgtcgtccccaaccccctcttcccgggcccctcctcccctggtcctccccccacgaccttctgtacggatttgctctccggaaggaattctggtttcgcgtgatcctgcctgcgtccgtgtctctgattccgccggcggc

SEQ ID NO: 8388 - DNA, 671 bp, Homo sapiens
caggccggacggggaggcccagcagggagagagggtctctctcctagctgctacccaggacctccagaaggagcccttggacctctgggagggagctgacccttgactccagcatagctctgaccctggaatggggttggtttggacacccccagggatctgagccctgaccctttgtgactgctgacccctgagccacccccactcccacagggagccccggccatttgctgccctccccacccctgccccagcctcaggactgcaggagccatccgcccccctcagccccttcctccccagggagcaaagccataaggggcaggggccaccccacggcatctccccagaagtacaggcctcaggaggaggtggaactgatgtagggggtggcactccccagagactgccctcacgaggggactgggttcgctctcagctctgcagctgtctgcggtggggggaaggttggggggtgtctggaggcatgttcccctcaccaccccccgtgggtctcagggaggccgggtgtgacctcatctttctcatggtgctatcctggtgctattggggtggggagctccctcccctcccccacaccagaaaggggtatgttgggggcttggaagcacttgaactttttattttattaaaaccttgttataagcagc

SEQ ID NO: 8389 - DNA, 41 bp, Homo sapiens
gggagtccccgggggactgctcaatacagatacggtggacg

SEQ ID NO: 8390 - DNA, 3749 bp, Homo sapiens
gccccctgcccccagagcaataaagtcagctggctttctcacctgcctcgactgggcctccctttttgaaacgctctggggagctctggccctgtgtgttgtcattcaggccatgtcatcaaaactctgcatgtcaccttgtccatctggaggtgatgtcaatggctggccatgcaggaggggtggggtagctgccttgtccctggtgagggcaagggtcactgtcttcacagaaaaagtttgctgacttgtgattgagacctactgtcccattgtgaggtggcctgaagaatcccagctggggcagtggcttccattcagaagaagaaaggccttttctagcccagaagggtgcaggctgagggctgggccctgggccctggtgctgtagcacggtttggggacttggggtgttcccaagacctgggggacgacagacatcacgggaggaagatgagatgacttttgcatccagggagtgggtgcagccacatttggaggggatgggctttacttgatgcaacctcatctctgagatgggcaacttggtgggtggtggcttataactgtaagggagatggcagccccagggtacagccagcaggcattgagcagccttagcattgtccccctactcccgtcctccaggtgtccccatccctcccctgtctctttgagctggctcttgtcacttaggtctcatctcagtggccgctcctgggccaccctgtcacccaagctttcctgattgcccagccctcttgtttcctttggcctgtttgctccctagtgtttattacagcttgtgaggccaggagtttgagaccatcctaggcaacataatgagacaccgtctctaaaataaaattagctgggtgtggtggtgcaccgcctgtggtcccagctcctcagaggttgagtagaggctgaggtgagcggagcacttgagccaagagtatgaggctgcagtgagcccatgagccccaccactacactccagcctggaagacaccatgacacacagtgaggcctggatggggaaagagtcctgctgttgatcctcacatgtttcctgggcacctaactctgtcagccactgccagggaccaaggatccagcatccatggcacccctggttcctgccatcctggggtacccgattcaaagaaggactctgctccctgtctgagaccacccccggctctgactgagagtaaggggactgtcagggcctcgacttgccattggttggggtcgtacggggctgggagccctgcgttttgaggcagaccactgcccttccgacctcagtcctgtctgctccagtcttgcccagctcgaaggagagcagatctgaccacttgccagcccctgtctgctgtgaattaccatttcctttgtccttcccttagttgggtctattagctcagattgagaggtgttgccttaaaactgagttgggtgacttggtacctgctcaggaccccccgcactgtcccaatcccactcaggcccacctccagctggcctcactccgctggtgacttcgtacctgctcaggagcccccactgtcccagtcccactcaggcccatctctggctggcctcactgcgctgggactccgccttcataaggagagctcactgctcacgttagtagatggccccttctcgtgaggcctctcccctggcacctgcttcagttgtcctccacagcactgatttgcagcccacaagctggcaggtttatctgtctcatgtttgtcttgtgctggtgggcaaggggtttgtctagcacaccagcatataatgagatgcttgatgaatggtgcatattgaatgtataaagcccaccggtcctgagagtttgctcactggagactttctggagatggagtctcgctctgttgcccaggctggcgagtgcaatggcgcgatcttggctcactgcagcctccacctcctgggttcaagcgattctcctgcctcagcctcccgagtagctgggattacaggtgggtgtcaccacacccagctcagtattgtatttttagcagagatggggtttcaccattttgcccaggctggtttggaactcctgacttcaaattacccacctgcctcagcctcccaaagtgctggcattacaggcgctcgaggctttctgatgtggctgctgctgctcagaaggccttgtccttaaccacctccttgcctgccctggaggcttgtgcctctaggccccaccccctgtggagtcctgctggctttctccatccctatctgaatcctccctgctgtgtggcctcccctggtctcatccgtaacacagcccagcttagtgggcctctgttcctgcgggtggccagcctgtctgtgtggctgggctggggaggccacgtctggtatctgaatgctatcggtgggttggggtggaggaaccaggagagggctggagggagggagatggtctcagccccacagagtttggagtcctcagtgtgctgagcaaacgtggagacaccatttccctcctctagacctcatcttggagagagagatgttggatggggccatctattccagctttattcacacaaatcatgtctgttggcctggaaattggaaaaccagttaaaccaaaaacatgatattaagaaaacaggcaggctcaccatagtaaaaatgctgaaagccaaagacaaaattgggagaacaaaagaaaagcgtcttgtcacatacagaaggtccctgataaagttagtagctgccctcatcagaaaccaggcccaggcagtggggacacatccagagtgctgaaagaacctcccccaggtcatcctatccccaagagtgatgcccggcagcattcccagctcagggctaatggttcacggaagccaggaatcaaactgcctgggttccagtcccagctctgccagttatgcccagctgtggggacttgggcagctcgtttagtagcaccgtgcctcagtttcccatatgtaaaaggccattttgagtgcctttcacagccctgcataaggcaggtgtctcagtgttcactgctgtctctccagctcttagtccagtagctgcatggtgagtgagcgtagggcgcaccctggaaggctgccaagcccaaagttgtgcagagcgctggggactccagactccccacagcagcagagactcgggactgaggcatcctctgttcacaggacatgctggcatctactgggtcagggctctgctgctcggtggctgtgcaaccttgggcaagttcctcaacctctctgtgtcttcgtaccctcatctgtaacatgcgtgtcgatagaccctactactcagggttgatgagaagattaaatgtgcaaaacctgcttgactgtgcccacaaatcctgattgtaggaataaattaatgactttttataaatattttgatcagatggactcatgatcacagatgtcttcacatgcctatgactaatttgtacacaaactaatgctcgtgtttcccaagcacctggaagacatgccagatccatgtgcagtaatgcctggtggctccaggtctgccccgccgtcctgtggggctgtgagctttcccagcctcctgcccgtgtttgtgaatatcattctgtcctcagctgcatttccagcccaggctgtttggcgctgcccaggaatggtatcaattcccctgtttctcttgtagccagttactagaataaaatcatctacttt

SEQ ID NO: 8391 - DNA, 114 bp, Homo sapiens
ggagaggcagtgattcccctcccgccccgcacagagaccccgactcactgccagccggggcggggcagggtgccgcaggctgggcttgctaataaagacccgagtctccccgcc

SEQ ID NO: 8392 - DNA, 612 bp, Homo sapiens
agctacagactgacagccagggcaggggaggagggaggggcgccagcacctgatgatcgcctactgtctgcgggttcttttacctgctctccctcagtgagtcctcaaccaccctgggcccagaaacagaggcctgccgaggggaggagcctggcctctgtccacccgtcagcagtgtgaagtctgttgtgtttgagcttctcagagtggaatgactccttttccttcctggccctcgggggcctctcgaggtcagcctctccaacccctacctcagctcctgtctgcactgagaaacctccccgggtgatgtctgcaaagtctgtgctgtccgtgccccaggctgggagagctatctggggagggggagaggaggccgagcagaatacaccccagagttagggtttgcgactccgcctccctgggacctggattgggtcagatgcctgtccttggaggggacaaggttgactgcttaggaggcgcgacgcacagggctgccaggcctggcccctctctgggaaggttgagagctgagacgggcagccctgtcccttcctccagatccgtctggttttttacaccgtttgttaataaagcctgaaaccgctg

SEQ ID NO: 8393 - DNA, 232 bp, Homo sapiens
cccacacccccggccatcgctccctgggccaggtttagagcagggagtttggctggtgctgggcctgagccagggggccgggacacccttgtttccggtggtcttcccgttgtgggagcaggtggagggtggagacctaaactttggggtccagctgccttcagcccccctcccccagactaacagacccttggaggcaggggctgtggaaataaatctctgcctgctggct

SEQ ID NO: 8394 - DNA, 442 bp, Homo sapiens
gctcgagacccggcctgtgctgccctgcccgtctcagggccaccaagtctgacccacacagcgtcactcactcccacacacaccccctggctctgctgaggttactgccttaccctgggcctcagtttccccaccttccaaagggaggagcatcattccttccttaccccctttctagctgtgtgatgtagaccaaagtcgttgcccctccctgggcctgggaaccagtcggaactgggttccagtccagctgtgctgtgtgagcctgtgcaagtgacatgacctctctaaaccttggttttctgctctctggagcggtgaaccggtggttgtctgcggggaagagatgataaagagcacgggcacggtctggttcatttctgtatctaccccccttccgcccacgcccccgaccctttgctcaataaacattccgcactcc

SEQ ID NO: 8395 - DNA, 457 bp, Homo sapiens
gccgggctgccgggtgccccaggtaccacaggactttgcagggagcctggactcctgtccagacacctggtgagagcctgaggctggtgttcagggccctggacacagacacagagcagccgcatctcaaaggcagagccctgcctgaaggaggaatccgtgagtaatcttcaggtcctccgtgttctggagctgagatgggaatgagcccctacacagaatggagtcctctagcctaaagatatcagctgttccatggcagagccttgactggatggaggtggggagtgtggtgtgtaaagtctctggcctcataaaaggtggctgtgggtcgtcaggaatctgcgccatcttcctggggcttctgcgctgttgttggggaagggaccccagtcctgccttccaccccccaaccaggcctgagactgatcaaacaataaacacgtttcccactctg

SEQ ID NO: 8396 - DNA, 412 bp, Homo sapiens
tcgcaccacgcctccgcgcctccacccgggccttcctcccccgtggaccccggtggatgacctgcccctctccccgccgcgcccctgcccctcctcctcgctccctgggttgggggctcccttagccgggcccccaagcgcgacggccccggaccggccgcggccccttcccgaacgccggcacccccttccgcttgggctgcccagccctgtcctcgccgggccccttcctcctggaaaaccaggcaggcgggtgcccccccctcgagtgggggactgtacagaccccgtctccgccctggccccgcggaggagctgcccacctgattcccggacagacctccccaactccgcgtgagacagagaattattcagataatttaaattaaaaaacgacgtgaaaatttggaat

SEQ ID NO: 8397 - DNA, 647 bp, Homo sapiens
aggcggctgggggagggtgggggcagggctggctgggggcttctccccactcccgccccccccttatccccctctgaagacgatgggcagaggagtgacagccgcagacacacgacagccggcagcaactggaatggcagcaattaagggtggggggcgggggttggggggttggggggttagggcagggaggggactggggaagtgcgcacacagcccacacagacaacacgcacccacacagacacagagggaaggggttgggatggggacagggtgcacagcagggcggggtaggaccccagcccctcccaaaacagcctctccttctcccatagacccctttcttctccccttccccacggtaggaacatagcgtgtttatattttatggccaaactattttgaattttgttgtccggccctcagtgccctgccctctcccttaccaggaccacagctctgttccttcggcctctggtcctctctggtcccctcctgggtttcttacgtagttgatttttcctctttagtctcccccgacctgcgcccagccccgtggcccctgcccctctcctactctctgtggcagtttcatatttgctaagacgaatttgctcattaaacattttgttgtattttacttt

SEQ ID NO: 8398 - DNA, 410 bp, Homo sapiens
tccagggcggaagggggcctggctccatccggctgccccattccggctccctgggagatcagtgttgtgagtgcatgtgaaatgggggatccccacccccagtgcccttccccttcctggggcccactcacactacaccctcttcctttcccaccccacctccccggagagaaactggacatggggcctggggaggggagctggccagaggaggacccctttcccgtggcattagaagggggaggggtggctggggcccccacccattccccctccctccaaactcccaacccccagtcagtgtttgagcctcctcgttcccctcacgcacccgctcacgcaccctcggtgaatccttggtgatgattttggcaactttgggaataaatggcaattcccacgggcttggc

SEQ ID NO: 8399 - DNA, 265 bp, Homo sapiens
ttgcgaggaacctgggctctgactcgaacacctgcaaaggacagggactgggaccgttacttacatgacactgcacccaggagatacaaatcattgatactctgagttgtgagatttctggcaccccattcatagatttgatatgatacacgtggtttttatgtgctctgtggccttggatgagtcactgaaaggccttcatggtctctcggtctcacaaggacctcttaacccctcaataaagtgttacatttctaaacattgg

SEQ ID NO: 8400 - DNA, 715 bp, Homo sapiens
gccgtccagtcatctttctctggggcttgattgatcagttcccactctgacaactggcaaataccaggcgttatcatcctgtatgcattaacgtactttcccctgaaacagagcaacccagtcaacaccacagaacctcagctttgaaccctggagtgaggacggtgatgccctgtgtgtattaatatgctatgtaaggctgggcgtggtggctcacgcctgtaacccagcactatgggaggtcgaggtgggcagattacctgaggtcaggagttccagaccagcctggccaacatggtgaaaccccgcctctactaaaaaaaaaaatacaaaaaattaggcgtggtggtgggctcctgtaatcccagctgctcgggaggctgaggcaggagaatcacttgaatctaggaggcagagtttgcagtgagctgagatcacgccattgcactccagcctgggcgacagagcaagactctgtctcaagaagaaaaaaaaaatacatatacacataaatatatatatgtgtgtgtgtatatatatatatatatatatatatgctatataaagtttaaatgaaatgctttgagtcacctaagacaggatatagacaaagtcttcatcgtcttcttgcttcttctacctttatttattctcagctctgaatgtatgaacctgctcaatcacctcatcttaaaaataaaatcactgtccctag

SEQ ID NO: 8401 - DNA, 278 bp, Homo sapiens
agatacggaaacctgccccactcacacccatctgatggaggaactttaaacgctgttttctcagagcaagctatgcacctgggagttccttctcaaagatggagaatgatttctgattctcacaaagccctcaatggtagtgattcttctgtgttcactctacgttggttactggatttgaaggctagagaccttcaagtcataggactcagtatctgtgaaatgtccgtcatatctcagagcatatagagggaattaaataaacacaaagcatttgg

SEQ ID NO: 8402 - DNA, 691 bp, Homo sapiens
ccgcctcccggccagcgccatctcccgcccttggtgctgcccccgggcggtacctgctctctcccagcgccacttggcctcttcctctcctccttccctcccatcgtcctcctccacctgcgcctcccttgtctgaacttcccaacgccttcctattcctttccaactccttttcccccaaatttcactttccttctcaggtctcacctcagccccccccttctccctgatttctcggcctctctctctgtgtgaaggggcctctccctaatgtctcctccttcccccctcttctctctcctgcggcccagcctccctctccctcctccattcctctctccctgcccttttcctgcctgaagagcagaggtgaggacctgggacccctgaggggcaggccaggaggagctcgggcgcaggccaggcccccttggtgaagcagaggctgaaggaaaggggtctgggtcttgtccctaggaattctcctccctcaggagattgggggttgggggaggcagcgggtgatggctctgaagctgaacccagggcctggctgtggtcttcttggtcttgctgccccctgtgacccaaaggcatgggatggacagagatgcctgcccccgtgaagctggttggggagggcagttcaccagcatccatagagtaataaagtcactgtgtgtagacccgg

SEQ ID NO: 8403 - DNA, 505 bp, Homo sapiens
atgtcttcaaatccctgttcctatccttcttctccagctcctcctgctccctctgaaaccttttctaggtaccctatgctgagactaagatcctgaagttaaatacccaggtctcatgaagacattgtaaagcatttgaattattctaaaaaatttctggagtttcttaggttttattgattcatccttgaaatcagtataatgtgctattaatggaaccaatagtaattcgaggactagttgggagattctggggtaatcagggaatattcctgcaacacatttaaaggaattgtgttcttttggaatcatcccaattataacacgagctattgcataatacaaataaccctcttaagtctgagagtctgtgtctttatttgaaaagattcttcaaattgcgtacttactcctccatattctttcaacccacatgagtctcctcgagaagtgaggagaggcagtttggagcagaatggagagaataaaatgtttcttgtcaaac

SEQ ID NO: 8404 - DNA, 663 bp, Homo sapiens
atatttctggaatccacctcttgaatccatttccatcccatcatccttgtccaatgcacattaatatatttgacatgggatactcgagtagctttctaattggtctccttgtactcaccattgtctctgtcagatgtccacattgcaaccaaatttgtatttttaaaaatatgtttaatctcatttctccctcattaaaatccctcagtggcatcccatggtttttaagttaaagcacacattcttcaaaatagcctaaaaacctagcctctaacaccttgttccaggttaccttccaaagtttctatcttgtgtcactatccatctcattctctgaatacttatccaggattaagatacatattccaggatcaaaaagacctgggttccaatctttgcacttccatttcctgccctctaatttgggggcagcagtttgtgctttgtaagcttcagtcttatttatagtgtgggaataataatggttctacctcagaagttaatagaagaatgaaataatgcatgtaaattgctcagcagcgtgcctagcataaagtaattactcaaaccataatgtaaagtaaaaagataaccatactatacatagaaagccaatcatctcagccatgattatctcagaaataaaaagagatgcagcagctc

SEQ ID NO: 8405 - DNA, 2952 bp, Homo sapiens
gaatgtagtgcatgtggccaagcctttagttatcaccaatcccctactgttaatcagagatgtcccactggataaaaaacatataaatgtaagaaatgtagaaaaaccttcagccaggaggctggcaagatggccgaataggaacagctctgatctgcagttcccagtgagatcaacgcagaaggtgggtgctttctgtatttccagctgaggtacctggctcatctcattgggactggttagacagtgggtgcagcccacggagggtgagctgaagcagggtggggcgtaacctcacctgggaagtgcaaggagtcggggatctccctcccctagccaagggaagccatgagggactgtgccatgaggaatggtgcactccggcacagatactacgcttttcccatggtcttcgcaacccacagaccaggagatcccccttgggtgcctatgccaccaaggccctgggtttcaagcacaaaactgggcggccattcgggcagacaccgagctagctgtaggagtttttttgatagcccagtggcacctggaatgccagtgaaacagaaccgcttactcccttgttaagggggctgaagccggggagccaagtggttcccatgcccactgagcccagcaagctaagatccactggcttggaattctccctgccagcacagcagtctgaagtcaacctgggatgatcaagcttggtggggggaggggcgccaaccattaccaaagcttgaataggtggttttcccctcacagcgtaaacaaagccatggggaagttccagctgagcagagccctccacagctcagcaaagcctctgtagccagactgcctctctagattcctcctctctgggcagcgcatctttgaaaaaagtgcagataaaaccctcatctccctgggacaaagcacgtgggggaaaggggtggctgtgggcacagcttcagcagacttaaacattcctgcctgccagctctgaagagagcagcagttcttccagcacagcgcttgagctctgctaagggacagactgcctcctcaagtgggtccctgacccccatgcctcctgacggggagacacctcccagcaggggtccacagacacctcatacaggagagctctggctggcatctggtgggtgcccctctgggacaaagcttccagaggaaggaacaggcagcaatctttgctgttctgcagcctccaccggtgatacccaggcagatatggtctggagtggacctccagcaaactccagcagacctgcagccgaggggcctcactgttagaaggaaaactaacaggaatataatcaacatcaacaaaggacatccacacagaaaccccatctgaaggttaccagcatcaaagaccaaaggtagataaattcacgaagatgaggagaaaccagtgcaaaaagcctgaaaattccaaaaaccagaatgcctcttctcctccaaaggatcacaactccttgccggcaagggaacaaaactggatagagaatgagtttgacaaattgacagaagtaggcttcagaaggtgggaaataacaaactcctctgagctaaaggagcatgttctaacccaatgcaaggaagctaagaaccttgaaaaaaggttagaggaattgctaactagaataaccagtttagagaagaacataaatgacctgatggagctgaaaaacacagcatgagaacttcgtgaagcatacagaagaaaaaccttcagccagattgaatgctttacagggaagaattcatactgcagagcggtcttaacaatgtaaagaatgtgcaaatgtcctcagacaagatgcacaccttgctcattagtgagttcatttcaggcagccagctcttcctcacccactacatcaccaagtcctgtggatatatctgctaaatatttttggaatttatccacttcttttggttccccagtccaaaacacagtcatttcacctggactatttcaatcattacacaggtgtccaaccttttgtcttccctgggccacattggaagaagaaaaattgtcttgtgccacacatacaatacactaacattaacaatagctgatgagctaagaaaaaaaaaaagtctgtgcatagttttagtgatacaccacctccgataagcaaaaaagtcctcacattcaatgggttgcatacccatgaattctaaaacttcatcctcttttgtccctttcgagttaacattacagccacagtgacctttcaaaaatgcaaattaagttactcttaaaactctagttaaaatacttgatgtacataaagtgcttagcaaaatgaccaactcatactaagtgcttagtaaatgttagataagtattctccagaattgatgtaaattatttttaaacagtgcattcttgaaagcagtatggcagtcataaaaattttggaaccaaaacagtatctttttttaagctaaaaaaaaagttttaaatggtgtctttctatgttgcccagggtggtctcaaactcctgtgctcaagtgaccctcccacctcattctcaagtggctgcaattacaggcaaccagcctgacttaaaacagtatcttaaggtagatggtgattagcacatgtagtatgcttaacatttaatattataataagacatcacagcggctgtctcatgattaaggctgtgttcccttgttggtgaggaaattaattatgacttgataaatagaacatgttttaagaagtggctatatagctctggataaaacgaacaaaagaattagaattcctgcggggaatatatacaagactttatttagtcaagtaaaaaaaaatcactaatgtttaactgaagaaagagaaattgaataatatagttctatttcaacatgtgggttcacagatttattctaaccttccaagtaaagttgttccactagtaa

SEQ ID NO: 8406 - DNA, 1408 bp, Homo sapiens
cctcgagacgtcatttctgtttgactactccagcagtttaaaaccccatctccctgcccttttgttttctttttgtcccttattagttagttcttcacataagtgtaaatgtaacttattcactcctcttgtaaaacttatagtttctttaaattggttaatgtgtgagatgtgctcagcacagtgcctggtccatagtaagtgctcagtaaacttagctgttttaaaaactttgtatttgaacattgaaaagttacagtagtcagctctgataaaaaaatgatgcagtagggtgagggtaggaaaaagcacattttctatcaggaacagaattctccagtagtgggtgaggttttgcctttgttggttttaaaacttgattctataatgccaagttagttttgtggctttccatctgaccctatgtgaatgtaaggtgatgtgaccttgttggtgagaaaattaaactttacatttgacttgatttgttttagaaagtctagggaccatgaatgaataggccagctgggacaaatgaatttaaaaaatcagaaaaatgcaagatttatatgcatgaagttaaaacaactgacgttactcaagaattagaaaactttgcaagatttgacttgtttaaaaatcacatttataagtgaaccgtattaaaacttttaaggaaccattcattgtgaggtaaactgatccagaataggggtcagcaaactatgactcatggccacagtctcactgactgtttttgtatggtccatgatctagaatttaaaaaaattttaaagggttgaaaaaagtgaaaagaatattttcaacatgaaaattatatgaaatttaagttttggtgtctgtaaataaagttttgttggcttcagccacacagtgatttacaccttgattgtgctgcttccaggctgtagcagcagagttgagcagttgtgacaggagaccatgtggcctgcagagcccaaatatctactgtctgatcctacacagaaaatgtgtgtgatccctgctatggagcagaggttatcaaactaaagcccatggaccaaatcctatctgctgcttgtttttgtaaatagagttttatcaaaccacagccatgcttacttgtttagctattgactatggctgctttagacaactgtgacagactatatggctcgcaaaactgcaaatatttcctatcctttaacagaaagtttgccaacctctgctctagagtagagaaaaatgtataaaagattttaattttatgagggcaatacaactgtcacatcagaaacaagaaaacaaatgataaaggaactcatttatcaatagaggtgaaaggaaattattaaactatattgaaaaataaagatgtcaataaaaggagaaatgatatttttct

SEQ ID NO: 8407 - DNA, 4311 bp, Homo sapiens
attcaatctcgtaaatgcttctagcatccatctgcttttttccagcacatgtcccatcatcatagtccaagacgcaaccatctcatctggatttctgcagtagcataactgttgccccttttgcttctatcaactacatgtttaacactgtaggcagcctaaccttttaaaaataaaaatacataatttatgttattttcccatttaaaacacttgatttgaaaaatatattaactaatccatttcaaggatttagcacacactggcatatagttattgctaaataaatgctagccattaaggtaaaggtttccttacaaactatcatattaagcagcaagtaaaccaaacagtaagtctaagactaagattttagagcagacagaagactactctcctggtagagaggaaagatgaacaaactcagaattgaaagatttatggtacacaaggtaacatggtggcttatcactccctctgtgacattgttgatgagcaactctcactttacctgacactgagaagtgagaatcagccaattagaacaaaagcttttagctgggtgcggtggctcatgcctgtagtcccagcactttgggaggctgaggcaggcagattgcttgagctcaggagttcgagaccaacctgagcaacatggtgaaaccctgtctctacaaaaaatacagaaattagccaggcgtggtggtgcacacctgtagtcctagctactcaggaggctgaagcaggaggattgcttgagcccaggaggtagaggttgcagtgagtcatgatcacaccactgcaattccagctgggcagcagagccagacactgtctcaaggaaaaacaaagaacaaaagcatttggtagaatgtaggactaaccagggtaggtagtagtaaaccaaaagtaacaagccaaaaaaacttgaatagattaatagccatgaaacactgaaaagggtagttcaatactttggcctttataaaagtaccacagacaattcgtgtggtatttaaattgttctagcataaaataaaatgcaataagaccttccatcttgttccatgagattgacaagacatgccaaaacataaaaatatgtacactgcaattagtttctgaatgtagatgttacaacttaaacttatttttaaaatatttaaaaataggaaggctagacatgcctctgtatagaaaatctgataaaaatatttctccctaaattgtaaattcattgatattccagtaaaaatttccatatttttttagttgagaagctgattctgatcatctgtagaattttgattttaacgaggaatgtagtttacattaggaatgtagtactaatactaattgaacatttgctaatgtttcacacactattttaggtgctgggggatacagtaaggtacaagatggacaaaaatacgtgctcttacagatctagtagaacagaaaaaattaaatgcatgctatgtgataagtatatgatatgtcccataaagagaaatgatataaaaaagaagctagggagtgctggatcaggcaccttactatccccagaacatgttggtattagaggatgagggaagaactagaggtaactgtgagacacaaaaggcataatgaaaatagtcatgatagtcccaaggcagatattgtttatgatgctttgagtgttggaggaagggaggattgatggtttaacagagatcatggcagttatgttcactcatataaatgttgatttagaagctggtggaagggtattttttgagtgacagctttattgagacaaagcaattctggagaacacccatatccttctctctgtatccatcagcagaagtgaagagggagccccaaagttccacttaaagtgtacaacttatggcttttagttcattcacggagttgtgcaaccatcaccaccatcaattttagaacattttcatcacctcaaagaggaatcccttgtccttttgtagttatggccatccctggaagagtacttttttttttttttcaactgaagcacccagagctcttgggttccctcttaactgctttctgtggaagtatagagggccatgtgagggaagccgttatccagagtacatgactgctagaaaatggagtttggggctccctcttcacttctgctgatagaagcataatggctaggggatgggtagtctcaccagagaatgtggagctttcagactctccttatatatgataaaaaggatttttcattgtagtggggaaaaggtggtttgatcaaatggcattgggaaacttagctcactggaaaaacagatctgtacctttcacactaatgaaatgcctgagatattaaaggtctaaatgtaaaattaaagtacatgaaaaacagaataatatatatgtaccctcggtttgaaatagactttaagcactaatgcataaccccaaagctgacattaggcttttatatggtggaaaacatcatagtcaatagataaatgagagactgacacaaagtgtttgcaacagatataataaaggactgtaattcgtgatattcaaagtactattacaaaccaataataatctgcaacttagaaaaatggactaatgtcccattcacaaaagatgcaataaaagcagttaatgaaaattatccaatatcactagaaatcaagaaatgcaaattaaagtgattatctactttttccccaaaagactgactaatcgagtgataacattcagtattggtgaatgtgtggaaacaagggaattccattgttgattacatatctattgctttatgtatataccctttgaattaatattccttggaaaccaacatatacaaaggtagataaatgtattagtggcaaaaaaattaatggtaaactattaaaacaacaagtgtccatcagggtaataaataaattaattatggtatatatccattcaataggaattatgcagctgttgaaaaaaaatcaatgtgtgtagtcatagaaagatagctgtgctatactaaatgaaaaattgcagacctgtattgtagtataggcccataattgtgatatcaaaaataaaaatcaaaatatatattatagtaggcatttgtttttctctgcccagtttcccttgcctcctccttttggctgcactatctcatcttttccttttgagtaactggccataccctaccatatgtttttgatggacgtggccaataaaattgtctctgaatttcaaaaggcatttggatctgtgtcatccaatggcaactccctaaaagctgatgcagttattcttttgattggtccttggaaccaccctggtttttgtactttccaagtctgtgattcctcaaactacccattgtctttccggtacttgatttttgcctcctgttggtcagttgcttgcaagtaaagaaacaatcatacagaatttggtacgaagattgggtaatgggcattagaatctttggaaaaatcaggtattgggagttgctttttggatgagatggggcgaataagacttatattctagactggaaagcatctcatggtgtgcgatgagcaaacgcctgattattcattatagtcacctgggatgaatagaggtctagggttctggataatgataatttaaggaggatggagaatgctgaatccaaaaggtatatgtaatactggtatctaactgcttggaataacttaaagtttagctcttgaatttctagcattaaggcaaaaaaaattcacctaagggattttgtatgatattgttgaaagatgtcttacattgtttaaagtcatagggttaagatggctcataaccaaatttagagactatttttatgcattgttaaagtggaatgctggttaaattttatactttattcacaagagtcactgtgaattgaattgtgaattcagttctgaattgtgttcccaccagcaccaccaaatgctggcctctaccaccaccaaatttacttgttgaagtcctaaaccccaacatgactgtatttggacataaggcctttaagaaactaaggttaagttaggccataagagtgaggccctaatcccataggactagtgtccttataagaggaagagacaccagaggtttgtctctccacatgtgcacagaggaaatgctgtgtaaggacacaacaagaatgctgccatctgcaagccaggaggagagacctcaccaggaaccagccctgccagcaccttgatcttggacttttaatctccaggactgtgagaaaataaatgttggttgtttaagcca

SEQ ID NO: 8408 - DNA, 1417 bp, Homo sapiens
gcgcctctgtgcagggctctcactggcggtgcccaggacggacgccagatggctgcgcgctttgtcagcagtgctgtgagaagttctcccctggggtggggactcggggtcaggggagctcaggaatgtggggttgtggaggggctggctgatcacacatgccccctccttactgagcctcagaaagcaagcccctcggtgtctgacgtatctggggacacttcaaggttcactgtagctgagccatggccgctggtaacagacatcagggttccagactagccctcttgagtaactgtcctagagctgggacaggtcacgcctgcctccacatctctgtttcttcagcgggaaagtggagctggtggaggggagggaggagacatctccctctttgtcagatacatcctggagtccagatgcagcttgtcaccatctgcattttctccgtgggttgggagcgtgagggccttcctatccctccacccaccgtttccctgcagtgcacgctggcagccaccaagctaggaagtggcaggagtttgccggttgtttgtgaggggaaaaatttttttttcagagttagcaaataacagtaactactgctttgaatgccaaagtttcttagagtggtctgttacgttttttaaaaataaaacttttaattaagggagactatgttattttaaacagtcttctgttttggccagttgtctggtcaaaatcggcttcagtgattgtgggaggggcaagaaggaaaagaaacagcagcaggtttgatattcagaaagaaatatgcatggattcaataagtatatacatctgagcacagattatttttatagtgatttttgcagctaaatgtgaaggcaactgtcttaagtcccttcctgctgctgtaacaaaagaccttagactgggtaatttataaacaatagaaatttgtcactcatggttctggatgctgggaagtccaagatcaaggctctggcagatttggtgtctgatggggtatgttcttcataggtagtgcttgtgtcttgatgtgtgtcttcacgtggttgtaaacggcagacttcctcaggccccttataagggtgctaatcccagtcacaagggccctgacctcatgacctcccaaaggtcctccctcttcatactgttacattggggatcaagtttccaatatgtgaatacagggaagcaccaacagaccatatcagtaacttcgagtgagtttcctaaggccgactgaagctctgtttacacataagagtgttccccaaagtgcactttctctggggccttttaggccatacttttaattttgttatttgatactactggttgctaatgttctggcatttccagttgttccacactccctgacactggtgtacacaaataaataatacag

SEQ ID NO: 8409 - DNA, 479 bp, Homo sapiens
cagactcactcggcctcacttcatccttgcaaagagaatcctgtacttcatccttgcaaagagaatcctgtacttcactcagaatgaaggaacaagtatctcaggatgaaatctcaatgaaaaacacttattttgggggaatatctattttaactgcttcagacacctagatcccagaactcaggcgcatatgcatattttccctgcaagattagaatggtgctcttcacgttttgacggtggttttcaaaatgttgttcttcaaccagcaacagcaacagctagggactgattagaaatgcaaattcttgggtcactctctagaccaactgatgcagaaacaggaggtgtgagccagcaatcagatggagattctagtgctcatgaaagtttgaagaacactggtaatgtgtggagtatcttggtgtattttgctactgttgatatggattgcttatgttatataaacgattttcatt

SEQ ID NO: 8410 - DNA, 9863 bp, Homo sapiens
gaaaaccttctgttgctgaatattacttgtcatctgaagagtcatattagaaattcgttcagtctagagccttattctccatctgataatttatcctggagagagacccagtggttattgtgcacataggagaaccttcagctgcatctttctccttagtttacagtgcaattttatctcaggaattatttttaaaaggaggaggggacatagaaaaaatgaaatgcaagcacacatcttttcaggcttctctgccaagcctatggcgctttgtcatggatttcttagtgtatttgggggaagggaaatgtttcaaggtaaagaaccttgaccctttatgtgcttgtatgtacatttattgctatccagtgtcagaacagttagtttaggaaaagtatgcaaactttaatcgcacatcttctgtattccacaatagtacttactcttgagaagcataactttatgacaacttagggggcttgagccatgaaatactcacgtttaagtcagtaaggatacacatgttaacattcaggcttttgtcttgatgcccgtcttttggtttacgtcatcattgtagccatatggtaaatttttatttgttaaatttttaaaaattacttagctcaaaatgtcagtggtaaatttttaaattgagtaaagtgattcttctttgctcttatttaaaatcgacagcatttctagttcctttgacattccatataatttttaggattagtttgtacttatttacaaaacagtcttgttcagatttttacagaaattgagttaagtctgtggattaatctgttaagaattggtatctttactatgttgggtcttgtagttcatgagtgcaggagtaggcctcttaatttataatagttaagcattccttaaagtatttcattaatgttaaaaattttcagcgtatagatccctatgcatttttgttagaatttgcatcctagggtgcttttttgtttgtgtgtgtgtgtaatttgagtgattgtaaatggcattgatgtttgaactttgaattgcacacaatttttggtagtatacagaaatataatatttttggacattgttttgctaccctgcaaccttattgagttcacttattatttttagctatttctttcgacagaatccttggaattttctatatagaaatgtcatctgcaaatacagaccattttttatctttcatcttacctgtaatataccttttatttcctttttgtttgtcttattgcattgcacaagctgggacttccattatagcgttgaataggaatagtgagaaaggccatccttacctggttcctgatagtaggggggacaatgttcagttttttgtttttttgttttttgtttgagacagggtctcgctctgtcacccaggctggagtgcagtggcacgatcttgtctcaccatagccttaagttcctgggctcaagtgatccccccacctcagccctcaccaccccccagtagctggtactacaagcatgcaccaccagtcccagctaatttttgtattttttggtagagacagggtttcaccatggtgcccaggctggtcttgaactcctgggctcaagcaacctgcttgcctgggtctcccaaagtgctgggattacaggcgtgagccacagtgcacagcatgttcagtttttcatcatgaagtataatgtaagttttataaaacatatgtcctctataagggtaaaaaatttcctctgttcccagttttctgagactctgtgttgctatgaataagtgtggaattttgttcagtactttttctccaccagttgatgtcattatgctattttccttctacatcctattgatggaatgtattgctttgatcaagttttgaatattgagccagccttgcatccttagaataaaccatacttgtttgtagagtataattgtttttatatatcatttgacatcattccctttgtttgtattttgttgaggaaatattcctctaatttattggctaataatgtgtagttcttttttcttttgtttcttatgttctaaatgtcttatgtgtggttttgatgtctaggtgatcttgacctttcaacatgaattggaaggagttctcttctaatttttggaagactgtgtagaattggtgttatttgttcttgtcatgtttgatgacctctagtcaaccattgggccagagatttttcttctggaggcttttaaattacatatttattttattggataggtagaactattcgaagtatctatttcttgtgtaataaattttgatagtctgtcctgttgaaggaatatttcatctgtatttgtagcactcccttattcttttgatagcaggatctgcacttctttttatttttaatatttaaaatgtgcatactcattttatgattgagtcttcttagacatttatcagttttattgcgcatcatgctgaaagatgtaatttttgcttcatctctcacttcagagaactagcactttatattaatgatttgtctctattcttgatttctttgatttctgctctgatcggtattatattccacttgctttggttgtatttggctctttctaacttttcaaggtggggttttagattattgatttgagatttttttgcttttttaatgtaagcattacattgtataaatttacctcatatcactattggtttgatcccacaagttttaatgttttcattacattttaattctaatagtttttattttttgagacattctctcttagccatgaattatttaatagtatgcttaattttctggtgtttggcatatttgttactgatttctaatttgttccatgtttgatctgactgtttaaatgtgttaacatttttttatgacccaggatagggtctatcttgtttcgtatagctgcttgaaaagaatgggtgttctgctgttactgggtggagtttctataaatgtctctatgatcctgctcattgttattcaagtcagctatgtccttgctgattttctgtccagcatttctgtcagttgctgagaggggtgttgaagtcctgaacataggccgggtgcagtggctcacgcctgtaatcctagcactttgagaccactaaggcaggtggatcacctgaggccaggagttcgagaccagcctggccaacatggcaaaaccctgtctactaaaaatacaaaaattagccaggcatggtggcgtgtgcctgtaatcccagctgctggggggctgaggcaggaggatcagttgaacgtgggaggcagaggttgcagtgagctgagatctcaccactgcactccagcctgggcaacagagcgagactctgtctcaacaacaacaacaaaaagtcctgaacatgattgtggaagtgtgttgctctttcaagttctatcactttttgtttgcaaagttcaaagctgtattgtttggtacatatacatgtaggtttgccaagtctttgtggtgaattgactcttctgtcattatgtgatgtcatttttttgccttttaatagtcttgtcaatactttacctgatgttctcatagtgactcctgcatattttgattaatgtttgcatggttaatatttcttcattttattttaaagcttacctgtatcattacttatgaagtcagtttctttgaacagcatatactcaggccatgctttttttattcattctgcatatgtctctcttaattggtatgttgaaatgatttacattaaaataattattgatattttagggcttaagtgtgcccttaaatgatttttgtgttcttttttattgttcctctgttatttggggttgtttactagtcttcctataggttacttcaccttttttttttttaataatttgatttgatacatatgtagtgttttttagtatagatcctccttgacttatgatggggttatgtcacaataaacccattgcaagttgaaaatactatgtcaaatatgcatttaatacacctaccctgctgaacatcatagccgatcttgccttcagaatgctcagaaaatttacattagcctgcagttgggcaaaatcatctaacacaaggcctactttataataaagttactgcaaagaattttaaataaaaattcaagtgtggtttctactgaatgcatgtcgcattcgcaccattgtaaagtcaagtagtaagtcgaaccatcctaagtcagggactgtctgtatatatctgcattttttagtgattgttctactattacagtgtaaatatataacttatgacagtttaataagttatcagcaatttagcactttacttccattaggttcctttagcttacctactaatgtaactatcttaagtaatagtaattcctcttcaaaaattgagcgctatgttgcaagatgtaatttttcttttccttttttttgagaccaagtctcactctgtcacccacgctggagtgctgtgatgcgatctcggctctctgcaacctctgcctcccgggttcaagcaattaactgcctcagcttccctagtaatggattacaggcgcccgccaccacgcctggctaatttttgtatttttagtagagacggggtttcaccatcttggccaggttggtcttgaactcttgacctcatgatccacccgcctcggccccccaaagtgctggggttacaggtgtgagccactgcacccggccacaagatgtaatttttactttatctctcacacgtattttacaaaacgtcatgagaaacattgtctcttgaccttttttttttttttttttttttaaagagacagagtctcactctgtcacccaggctggagtgcagtggcacgatcttggctcactgcaacctccgcctcctgggttcaagcgattctcctgcctcagcctcctgagtagctgggattacaggtgtgcgccgccacacccagctaattttgtatttttagtagagacggggtttcaccatgttgctcaggctggtctcaaactcctgaccttgtgatccgccaaccttggcctgtcgacctctttacccattccattgttcattcttctttcttgaaatcccaaaccttctattaacatttcttttcagttatacactgaactttactgtagcctttcttctagagtaacaaatgttctttgttttccttcctctaaagatgtctttatgtttccttcattcccaaagaatatttttgtggaatataagattcagagttggcagttgttttcttttagacttcagagatgtatctctctgttctgtacattattgtttaatataagaaacctactagcattcaaataatcattccctattttacaatgcatcagttctgtcaagcttcattcaaagtgtttttcattgtctctagtgttcagaagtttggctgtgatgtgcgtggcatggaagtttttgggtgtattctatttggcgctccctggtgcttgcccagctttttgatctgtaggattatgccttttgcaaaatttggggaactttcaactattatttcttcaaatattttttcaccccccagtcttgtcttttttagggacttcaataacatgagtggcagatcttgttttacactcccatgggtccttcaggctctcatcttttttctttttccagtctattttctgtcttgttaatattgattaatttttattgaccttccatggtcctcactgattgttttctttgtcatacctaatctgttgagtttgtgcagtgagttttcattttggttttgtattttccagttgtttaatttccattgggtgggttcttttgtacaccttctgtttctttgcttattttttaacgccaaagaaagactctcagagaatagacaactatattccaaagtcatggttctctggtggtttgtcttgacatttgaatagaaatgttaaactatctgggggaatagaaagcccacagtcttctgagttgtgctacaccaatatttctatgaacagatcttacaactgagagtgatctgcagatttttcagagtcatgttctccatggaatgtttgtaaaattccctagctctctgcactgagctgagatcgtgccactgcactccagcctgggcaacagagcgagactccatctcaaaaaaaaaaaaaattctctagctctctatgccttgttgtatcctcaggaaggagtcacctctcttccaggatcactcttgccttttgttattggacacattttcctacctcctgcccagtcttttttaggctctctgtcatacttcctcgcctagtctttaacttgtctctgataaccagatttttcccccataatctgtatctgtattcaagtctctatcctcatccccaaatggatttcaccccgcttgtccatcagtctctgcccatttcttctgtctcccacagacatggtctgtgtagttgttctgcacactacccgtcctcgccccttctcatttccctcactccacggacagctacaggagggcttccatcatttgtcctcttacttccttgttagaactttgtgctgctgaccaccactctgaaccaaaacttctttcttggttcttgaaagttgctgtctttctcctccagagggtctgtgtcttccttccaactcttaaacatttttgtttcccagaatccatcattggccattgctttttcacttgccatgagctctgtgaatgagatggttcctgctgaagacatttactttcaatgatctacagaatttcccaaatctatgtctccagactggatgtttctcacgtctgtggcccactgggcatcttctgcactttctctgcatttgtaaacactgagcctgtatgcgtgtctatgtggccatggccctggccgtggggatgcacccataattataatgagagcaggtgaatgtcatgtggctatgtatgagacattgttgtgaatgttttacatgcatcagctctttcaacatttacagcatctgtgtgtggtaggtaatgttgtttccttcattttgcagagcagaatatagataggctcaggttaagaatttgcccaaggttacacagttatgaagtttggatttaggaatgggaggccacgtagactggcttcagaattcatgtctttaaccactttattgcttctcatgttggggggtttgttttctggtcactatttttactaaagttgattcaacaatgctataatctgttactctcattcgacaatacatcttgactgtttcttcaacttgaggaaggtaaaccaaagccactctttaatgggtgcaaatatctgttgtaactatgtagaagatacagtgtctgggtttgaggacaggggagtgggaaaactgagtagggaagcggtaagacatgcatctggctttaggagtgtttgaagtgcctaaagatcagggtgaatttcccaaatttgaatcttgttgcccaagccacattgcaaccacctctttttctcttacctcgtccccacatccaggcactgccccattctgttcattccacctttttttttagtagaccctccatatatgtgtgtgttttggtgaatggccacacacagcaaagttatttttattgcaattttgttgttgttgtttgagacacagagtctcatactctgccacccagactgaagtgcagtggtgcgatctcagttcactgcaacctccatccccccatgttcaagcaattctcctgcctcagcctcccaagtagctgggattacaggcatgggccaccatgcccggctaatttttgtattttttgtagacacggggtttcaccatgttggccaggctggtctcacactcctgacctcaggtgatccacccgcctcggcctcccgaagtgctggcattacaggcatgagccaccacacccagcctttattgcaatttttggttccctcacagaatgtttaccatgaagctgtgcgtataggtggtaccatgtatgacataccttgacctcaaagataatctacctgggctttttttgtttgtttgttttgagatggagtctcactctgtcacccatgctggtgtgcagtggcgtgatcttggctcacagcagcctctgcctcccgggttcaagcgattctcctgcctcagcctcctgagtagctgggactacaggtgcctgcgaccacacccagctaatttttgtatttttagtagtagtgggatttcaccatgttggccaggatggcctccacctcctgacttcatgatccacccgcctcggcctcccaaagtgctgggattacaggcgtgagccaccgcacctggcctacctgggcttttttggacagatgtacatgattttagaaattgttatgaatgactgtcttgggatcctcaagaacacccccaggtttgacgatttgctgagaagactcaggtctcagcattctgtcatactcaacagctatgatttactgcagcaaaaaaatacaaagcaaatagtaaagggaaaaagccaaaattcagagaaaaccaggcacaatcttctgagtcttgtttcagtgaagtcacaggatgtgccttatttaagttccatctggtacttatgacaacacatgctatatgtccactgggaagcttattagagactcagtgccagggtttttattgggcatgttttctagcacatcccacaattctggacttccagaaggttagcaggggttcagcttttcagctgaaaacgttatccccctttcagctggggggaaaaaaaggcaccgaaaaacagggcagtgagctactcctgttttgggtgggtggagcagtagtaagcctcccaaaatctaaggtcccacactccagcaagggtgaaccttgcaaactcaaaaggatagcagtctccaacctgctgttttatacagtgacttaagtggtactaaaatgctatataagtcaaatttacgtaacattaagcaaataattttttttcagcaaaaaaataatggtcatgactttgtggtgaaggcttatgtaatgattgtaataaattcaggtggctcacgcctgtgataccagcacttttgggaggctgaggcgggtggatcacttgaggtcaggagtttgagaccagcctagccaacatggtgaaatcccatctctacaaaaatgaaaaattagccgggcgtagtggtacatgcatttagtcctagctacttgggaggctgaggcaggaaaatcgcttgaacctgggaggcagaggttgcagtgagccgagatcatgccactgcactccagcctgggtgacagagtgagactgtgtctcaaaaaaaaaaaaaaaaaaaaaatgcctcagttttgttaagaggaaaaagcaaatcctaagttacagtggaacttatgaacaccctagcctagagatttaatttagtgatgaaaaggtacagagagagtctttcaagaaaggacctagtctgctcgcgttctctctctctctctctctatatatatatatgtatatgtgtgtgtacatatggaccacttcaagctacacacacacacacacatatacacgtgtatgaatatatatatatggctataagtggtgcgacttgcaggtactccctttgttcacctttgtaaagatgttattgccagttcagtgtgtatttctatagtatatatgtaaacaatttgtcatccttttgttgctgcttttgaaactagttcatggcttcagtgggggagagatttaaataatatgggtttataatttctgcattattaaatgcagataacttgtgattaaagagtatgttattgg

SEQ ID NO: 8411 - DNA, 130 bp, Homo sapiens
gccctgtctgcctctgttccctttgtgtgtgttcagggagctctcctggctctgccacctcatttgtctttatttttttctcttttaagatgtaagatgctaattaataaaagctgaatcatttcatacc

SEQ ID NO: 8412 - DNA, 1838 bp, Homo sapiens
cagatgtggaaagactttttacgtacacttcagtcaacatccaagaattcctattagcgaaatagttttttaatataaccactgaagaaaatctgtggtgagaggaaacatcttaccatctggtcattcatactgaagagaaactccataagtatcatctctgtgggaaaacctgttttagatcatcatttgtcatctaaacaattatgttagaaattgacacagccaagagtcttattctacatctgataattcacccatgaaagagacccagtggttactgtgcacttaggaaaaccttcagccacatctttcttattagtttacagtgaaatgttatctcagggacattcaaacaaaggaggaggagtcatagggaagagaaagaaatggaagcacagcttctttcagacttccctgacaagcccatggcaatttgtcatcccctccttattttatttgggagagggaaatgtttcagaaacaaaagggcctcatcccctttattttccctgtgtatacattcactgctgtccagtgctgtagacaaacggtttgtttgaaaacattttgtgaaagcctgctttgttccacagcattgtctccactcttgaggagcagaagcatatatctttatgagaaagatggaggcttgagttatgaaatacttttacatttaaggagataaaggatgtacatatgaatgggcacattttactgcacacttcagacgctttgacttttttaaaaaaattgtttctccgtgtgtctttaaccacccagtaccatacttttttcttgatctggatctacttgtcaatttcttctttatttttctgtaggatggagatgatattgtagctgtttgtacataatgtaatccagggagtcctaattcttccctctgattgtggtttctcagcttttttactgctctttagagagagtaaatagttcaaaattcacctcaacaattttctagaggtcaatttggaaccaaaaatgaaataagacatgtagctaaagtaagttaaaagattatgataaactcagaaaataaacacagagaaggaatctcatttttcagtcttacagaagattgtgtgaaggctgactatacataaagtgactggaattttaacaggtgaacctgcatatgtatatgcaggtagttgtcaccatggattgagtccagtcgtagtaattaatatgtttaatcagaatattttggaatttctcttttggtattctttttgtttcttttattgtttttaattgacaatgtttatggggtttggtgtgatatttcaatacatgtgtgctaagagtaatgatcaaatcagggtaattagcatatccatctcaatcatttatcatttctttgtgtttagaaacattcacagtctgcttttctagctatttgaaaatataaaatgtattattgccaattgtactcattctgcagtgccacagaacactacaacttattcaaatggaatcttacttgctgtaattttgtatttgttaaccaatctctatctgcctctctgctgtccttcccagcctctggttaccaccattctcaaccttttatgcttgcatatgagtagaaacatggagtatttctctttctgtgtctagcttatttcacttaatgtctttcaagctcattcatgttgctgtgaatgacaggtttatttttcatggctgagtagtattccattgtgtatatatgccatgttttctttcttcattcatctgataatggacacttagactgatttcttagctattatgaatagtgcttcaataaacataggagtgtagatctctctttg

SEQ ID NO: 8413 - DNA, 1511 bp, Homo sapiens
aagggaacatcttaccatctggccattcacactgaagagaaacttcataagcatcctctctttgagaaaacgtgtaatagatgatcatttgtcgtctaaacaatcaagttagaaattgaaccagcctggagtcttattctccacctgagaattcacccatgagagagacccagtggttgctatgcacttaggaaaactttcagccacatctttcttcttagtttacagtgaaatattatctcagggatattttttttttttttttgagacggagtctcgctctgtcgcccaggctggagtgcagtggcgggatctcggctcactgcaagctccgcctcccgggttcacgccattctcctgcctcagcctcccaagtagctgggactacaggcacccgccactacgcctggctaattttttgtatttttagtagagacggggtttcaccgttttagccgggatggtctcgatctcctgacctcgtgatccgcccgcctcagcctcccaaagtgctgggattacaggcgtgagccaccgcgcccggccatctcagggatatttaaacaaaggaagaggaaatatagggaagagaaagaaaccacagcttcttttagacttgtctgacaagcctatggcaattttgtcgtccctttgttattttatgtgggagagggaaatgtttcagaaacgaaagatctcatcccctttatttttctgtgtatgcattcactgctgcccagtgtcagaacagttatacaaacgagggcttgaaaacattttgtgaaaacttgcttagtcctgcaacgttctccactctcgaggtgcagaagcatacatctttataaaaaatatggaggcttgagttatgaaacacttttataaggagataaggatgtacatatgtttggacacattgtccacttcagatgcttgtttaaaaaaatgtttcaccatgtgtctttacccaatacacatactttttcttgatgtggatttactttttttttttttttttaagttttcctgggatagggatgatagtgtaattgttcatgcccacagtaatcctgggaatcttagttttttcctatgattgtggtttctcagcttctttacctctcctttgagttaggtccacctcagttttctaaaggtcaaattaaggcccccccaaaaatacagtatgtagctgaattcctttgaaagatcatgataaactcagaagaacaaacatagaaggaatgtcatttttaatctttttaaagagtgtgtgaaaattcactttaactggaattttaacaggcaagccggcatgcatatatgtagggatgtgtgactttcacagttgtcaccatggacttaggcttgattaaaatgctacacatttagagcgttttgtaattccttttttatatttttaagactagattttgagccatgtgatagttttacctcatattaaatatattgtacagaagtaaaaataatcatgtattcactttgaactcctc

SEQ ID NO: 8414 - DNA, 2046 bp, Homo sapiens
caccagaaaattcacacaagagaaaggccttatgaatgcagaaaatatgtcatcttgttcatcctcataggactcacaccagagcaatgctctgtgagtaccctttgtgagggaaccatcagctagcagatgagcaccgtatattcattccaccctggggagattcctgataagcaccacatatgtgggaggctttcatgaggtgtgttgcactttgtaactgtctagagctcttgatggaattatatcactgccagtgcctgtggcggaagccatcttattgctaccagctgtgtgtgtcaatcactccattttgctcagggaaggcagacttctgtgctttctttcctgttccctacaggtaatcatgaatattttcaaggacttccccccccccccacttcaccccctaccattgagggtcctcatcttttccctcatgattaggttctgagcaaacatgatctagctctcaccaaaaggacctgagctagggtctgctgggatttcctgacacgattttccatcttcatggacaatgttaactgtaaacgtgatagctgtgacttacttgtcttactgccaaatcgcccaaatttggaactgcttgtcccatgctgctctgatttatacagtgataagggcctattgtggcagtctttactcttggggattttgttactgtgtagagtggattgagaaaagaattgggttctgtcatgaagggagtagcaccttttgtgggcaccacctttatgtgcctcagaggggaccaaaggatggcagaaaactgttctcagtctagtttgacctaatttacactattgccctaggcttgctaggaaagactgaaaaaatttttgtgcctaactttgtggcctggctgccaggatttcctgtgagcccagtgaggagggcatagttggtgcgaaaatctcctgtgcttgtggaagcaacataagttgggtcccttaactgtcacgtactccccagcactgttgagggattgctgtcttctgtacctgtacaggatcaagtccctgatatccagaaccccataggcaagtaacattgactgtaagacctctgtagggcaatgtgaaaatcatgattgctacagaagcactgagataatggagtggggatgactgtggcaaacaaaaggagattcgaacattctagaggggcatccacaagtctcggtgcagttatgatggtgtgggatgggagtgcatagaaattctcaggaccttcagacatctgtatctcctgtggccaaggccactgtcagaggaaataatctaaatgtttgtggattcctgtgtctccctgggcagttgacctgcacagacaggaacctcagcagtgacagaagagagatccagggatgggtcttctctgacccagccagcattccgagtgactgaggtggatgtggacatcattgcttaccaatttttaccaacattgaggcagggctcactctcctaaattgtagggagaggaatatggtaaagccaaaatagttgacagatctaactttcctagtggaacagtatatatagattttaatgaggaacatttatttaatagctttatggaggtatgattaacatgcaataaactgcaaatatgtaaagtgtaaaatgtgctgtttcagcatgtgtgtacacctatgaaaccaccacagtcaagatatccaacacaacaaaagattgtccctttataatcctcaatttttccttatcttgttttccacaattcacaagcaacagcaagcattttctataattttataaatgaaaccatatggtgtgtactttttagggggtggggctctggctttttcagtaaacataactattttaaggttaatccattatcttgttgcatgaatcaattgtttgctcatttgtattgctgcgtagtatttcagtatttcattgtataccacaatttttcttctttgtcaacttaattgttatggatgtttgggtaactttcagtttttggctattacaaataaacctctgaagatttgtgtgc

SEQ ID NO: 8415 - DNA, 1370 bp, Homo sapiens
ggcccttatgaatgcagtggatatgggaaagccttcagtcaccaacatattgtggctggacagcaggcagtacacactggagaaagactgaatgccgtgaacgtgggtaattatgtaggtacagctctccagtcgctatgtatcagagaattcacactgcagaaatgtgtgttcagcaaactcgggacattattttggtttgactctcatctcattagacattggagagtttacactgaagaagagtcttttcaataaagtagaaagtggtaaagattcaacatgcaagattgtacttattgggcttcagaatatccacactagtgaaagtcttctgagtacagcaaatgtgtgacattattttgctactactccacactacttagacatcatgtagttcacactggaaaaaggccacgtatgtgccttgaatgtagccaaaatgacgaacaacacccagaaatctgtgatttagcactgagaactagtattatatggtttttaaaaaacaatggtgaagtacatgccacataaaatttgccatcttaactattgtaatgtcttgtttaatacttgaagtacattaacattgttgagcaaagaatatcctgaactctttatcttgtaaaatgaaactctataaccaccattaaaaaaacaactcattcccacattcttcagtccctggcgaccaccatatttttaagtcattatgactctgactattcttggtacttctcagaagaagaatcttagagtgtttttcattattttttttcacttaggataatatcctcaaagttcattcattttttagcatgtgtcagaaattttaaggctgagcaatatttcattgtttgcatttaccacatttcctttatttctgacatctattcatggacacttgggttacttctacctctggctattgtgaatattgctactacaagcataagggcacaaatatctctttgagaccctgctttcaattcttattgggtaccccaaaaagtggaactgctggatcacatggtacttctaactttaattctttgatgaactgagaaacttttccataaaacttgcaccgttttacattcctaacattccacaaaagttgtgatttgtcctcattctaatccatagaaggcaacatttctaacaggtttctaggtgattttgttgttgctgatgtagggactacattttgagaactgtcctatcccatttttataacaatgcagagcttctctgtaaataccccttgtttctatgttctatcctgtgagccttttcattttgttaatttttcccagtgtttacaaccaggaaatagcttgtcatctttgatacaaaacagaaatctttgc

SEQ ID NO: 8416 - DNA, 1528 bp, Homo sapiens
ctattgtaattgggtagtaatgttatataaattccacatttttatgcaactaatctccagaacatttttcctcttaccaagaagtaaaatgctgtacccattaacaacaactcattccccttccctacttccccagaaatgtctcaactatatttctatactctatggtacttatatgaggtaccaatagatatctatgaatttgatatatatttgtacctcatataagtggattctacagtatttatcttttgagactggcttatttcacttaggataaggtcttcacggttcacccatgttgtataatgtgtcagaatatccttcctttttaggtgaaataatattctatggtatttatataccacatttatttatccattcatctgttagtggatacttgggctacttccaccttttgcctattgaaataatgctgctatgaagatgagtgtacaagtgtctattcaagattctactttcaattcttatagggtatatactcagaaatggtggtgctggatcatataggatttctattttttttttttgtttgtttttgagacagagtcttgctctgtcacccaggctggagtgcagtgctgtgatcttggctcactgcaagctccgcctcccaggttcatgccattctcctgcctcaccctcccgagtagctgggactacaggtgcctgccaccacgcctggctaatttttttgtatttttagtagagacggggtttcaccgtgttagccaggatggtcctgatctcctgaccttgtgatctgcctgccttggcctctcaaagtgctgggattacgggcgtgagccaccgcgcctggccaggatttctatttttaatatttttgggaaaatttttccatagtacctgtgccattttacattcccaccagcagtgcacaaggattgcaatctatatacatcctcaccaacattgttcattttctatttctgtttttggggttttttgtagtgccttttgttttggatagcagctatcttgttggatgtgaggtggaatctatagtgtctttcatttttattttgtgaatgattgatgatgttgaggatcttttcatgtgcttgttaggcatttgtgtatctggaaaaatattcaagtcttttttttccatttttaatgggactatttgctttttgttgttgagttgtagttctttatacattctggatattaactccttaccaaatatatgctttttacatattacctcccagtccataggttgctttttcgctctgttgattgtgtcctttgatgaaattttaagttttgatgtactgttgactctttctgtctgtgggttctgtattcatggatcgaagcaaccatggatcaaaagtatttggagcatccatggattgcagtgatcattaatcaaaaatatttggaaaacaaaaagggtagttgcatctgtactaaacatgaacagacattttttcttgtcattattccctaaactatatagtataataaatatttacatagc

SEQ ID NO: 8417 - DNA, 458 bp, Homo sapiens
agaatgtatatataaagcagatggggaaagacttcacacagaaatctactctgatttagcactgggacctacgttttaaaaaaagtattcttgtagaatacagataacataaaatctaacatcttaaccatgttaaagtgtatagttcagtactgttaagtcattcacattgtgcaatgaatatctagaagtcttttcaacttatgaaactaagtctataccttttaaaaccttattcctcactccatccagcctcttgacaagcaccgctctgtatgaattttactagtccgggtacctcatataagaaaacttaagttttggtcttcttgtggtttattttgtggcttattttgcttaacgttatatttttaaggtttcatgttctaatccattagaatttccatcctttttaaaggctgaataaaattctgttagtcatgtgttgcttaacagtg

SEQ ID NO: 8418 - DNA, 941 bp, Homo sapiens
atgtgggaaattattttgtcacttttttttttttttttgagatggaattttgctcgtcacccaggctggagtgcaattgtgcaatctcagctcactgcaacctccgcctcctgggatcaagtgattctcctgccacagcctcctgagtacctgagattacaggcacccaccaccatgcccagctaatttttgtatttttaatagaaacaaggtttcaccatgttggtcaggctggtgttgaactcctgacctcaggtaatccacctgcttcagcctaccaaagtgctgggattacaggcgtgagccaccatgtccggcttgtgttgtgacatttaacacaagatttcccaaagaagaaaggccttatatatgctgtgaatgtgtttttgcttgttagtttgttttaacttggtatgacggcactggaggctagcctttgagaagagccttctctgatgtgactcatgtatccaaacatccatggatttcccataaatttgaggtatgtgggaagcatgtgtagctatgttgtactctctaaacctgcccagggaccttaccagattcgtgtcactgccagtttctgcggctgaagccttttcatcactacccgctgggagacccacagagtgtgcatcagtcaccaccccaacatgctcagggaggcagagttcttccattagttggaggaaagcacgagtagtctaagctcttaggggggtttctcatttcctcctgtggctacatagtgcatataactaccccagtgttggccccaggacctgatctgagttctgctggcagcttccagaggattgccttttttgaggacattgttgatctcaggcgatgcttgtgatgaagcattttttagcttccaccacttaccaggaactgcctgttaactggcttgtgcaatgataaaggccttttgtttaagt

SEQ ID NO: 8419 - DNA, 338 bp, Homo sapiens
tggagtgaatgcaggaaagtcaccaaaactgtcacctcattcagcaccaaaaggttcacatcggaccaagaacctattaatatatgtaaatctaatgttgaaagagttcagatggaaatctgcgaggatttcctgctgggaactacattaaaaacatttatgtccaggcgtggtggctcacgcctgtaatcccagcactttgggaggcagaggtgggtggatcacctgaggtcaggagtttgagaccagccgggccaacatggtgaagccccatctctactaaaaatacaaaaattagctgggcatggtggcaggtgcctgtaatcccagctattcag

SEQ ID NO: 8420 - DNA, 590 bp, Homo sapiens
ttgtgtgaaatcctttagccagcgtttcaacctcattcaacaccagaaagttcacagtggaaaaaatcttgaaggtaacagatggaaatccgttagccacacctccagtctcattcaacactggacagtttacaatgtggacaatgtagtgaatatggaaaaaggtttcagccaaaggcctaaccctattcaacaccagaaagtttacactggagaaaggccttagggtgacaggttatgtactgtctctgaatcaatatgacctcacttaaaacagaaactctgaggatggcctttatgagggagctggcaattgaacatcattcatctaaatatgcacactggaggcaagatgagaattcctgacagattgtccttcctgagaagacagccctctgccttggagctccagagagagggagccctgtattcttggctgtacccgtcgaatggagttttgatctcgctgagtttggagttgggggaggaaaggagtggtcttggttcaaatgtgactcacttttgctgttcttgtgaatgttagatcttctttaataaatatttatttcccatacacccttatgaccatt

SEQ ID NO: 8421 - DNA, 716 bp, Homo sapiens
ttgtgagaaatcctttagctggtgtttcaacctcattcaacaccagaaagttcacagtgtaaaaaagtcttgaaggttactaatggaaatccattagctatacctccaaactcattcaacactggacagttcacagagtggacaatgtagtgaatatggtaaaaggcctcagccaaaggcctaaccgtattcaacaccagaaagtttagactggagaaaggccttagactgtcgctgaatcaatatgacctgacttaaagcagaaacagccaggcgtggtggctgacacctgttattctcaccactttgggaggctgaagcgggcggatcacaaggtcaggacatcgaaaccatcctggttaacacaatgaaaccacatctctactaaaaatacaaaaatttactgggcatggtggtgggcgcctgtagtcccagctactcaggaggctgaggcagaagaatggcatgaacctaggaggcagagtttgcggtgagctgagatcacgccactgcactccagactgggtgacagagtgagactctgtctaaaaaaaaaaaaaaaaaaaattagcccggcgtggtggcaggcaactgtagtcccagctacttggggggctgaggcaggagatttgcttgaacccgggaggcggaggttgcattgagccgagatcacgccactgcactccagcttgggtgacagagtgagacttcgtctc

SEQ ID NO: 8422 - DNA, 1836 bp, Homo sapiens
caattgttgggatgtgtaattgtcttattcactgtaggacaccagagagctgatttttcaagggatccaacagacagaaattcaccctcatacatctgcatatcactagttgaaagattcactacaaggtccaagtacttgggaagctttctagagattacttgtactttctaatctgcccagtgttacaacagacactaccatgtggcatatcctcaccgttttcatcagtcactcacatgtgctcaaggaatgcagaccactgtgcttaccaaattctgaagggaataatataataaaagcctgttgagggtcctcttccatcttgctgaactgttcgaggcaaagacaaaacccaactttgaccaagaagagcaatctggattcttgtagcccatggaggtttaccttcttcataggttttttttttttttatgtgattgccatagtgggatattccctctcccacattacccaagagggaaatgggctgtcttaccatgtgctgatgtatgtgctctgccagtgtgaagggtgaacagctccaactttatgtccccccagggacatagtatgagatcggaaaatagttcttagtcctgtttgtcttaatttttattggtttccaaggtctcctaggaaggagagcagagctgtgtggtcctaatcatggtgtcgatgccagatttatttgtaggtccagaggtctccctgagaagaggcatttgtgacaaactcaagtgctgggacctgcatgaattgtttatttgcagtgatgcttcatatttcccagcactgttcatggtatcttatttcccaggtccttcattgtagccatgggcactgaaggactgaattggtaggtaggtcactggttgtaagacctactggggccaggtaagaacagtaattggcccagacaggtaggtgtgataaacagagtagaaaagattgtggccaagaagagtgaatgtgtcccatccaaaggtgcatccagatatgtctgtgttactatggcttcatggtttgggggtatatagaaattctcaggacctcagacctttgattctcctttagcaacacacatcgtcagcataaggcatctaaagattttgtggactcataacttatgtactgtttttgagatgattgctgcacgggcaggaaagcaggatttgagagaacatacaccttgccttccagatatgtggtttttgtgattcacccagatctgttgtgccagttaggaattatctttattacttcccgtttattgccactgctgagaaggctgtccttcctaacttgtgaggagatgaatccttaataataagtaaatcttgtgttatcctatagtctggttttccaaaaggagaggtagatgcatatttttgtgtggaaccatttatcttaaaacattgaggtgcagttttcatacacaaaaccttctatctttttaagaactgtctgtatggtttattgcccagttaatgggttttgatagtcatgttatctcagtaagtgtcttgtcttagaaatatgtgtgtataggctgggtgcggtggctcatgcctgtaatcccagcactttgggaggccaaggcaggtggatcacctgaggtcaggagtttgagaccagcctgaccaacatggtgaaatccagtctctacttaaaatacaaaaattagccaggcgtggtggcgtgcatttgtaatcccagctacacaggaggctgaggcaggagaattgcttgaacctggggggcggaggttgcaatgagccaaggtcgcgccattgcactccagcctgggcgacagagtgacacttctcaaaaaac

SEQ ID NO: 8423 - DNA, 1114 bp, Homo sapiens
aggcctcatgaatgcagcaaatgtggaagcgccttcaactcaagatctatcatcatttagctcctgaaagtccacacttaagtagagccttagacctacagggaaagtgctgtctctgtagtattgtagcagtagagagcctttgtgagggagccatctgcctgaagttgaacctcattcttccttgtttctctggtagaaaccatctaccctctaccaccttgcacagtgggcactggtcactcctatgtgctaagacaaggcagacatctgtgtgttctcttaagtctttggaggaaatcttgagcagtctaagcctttagagaaaattcattcttttttctgactgatcacagcatacgtgtgacccagtttgggtcaggagggcccagccttggttctgctggacacttatgtgcaaggattcccttcatgtaaattcttggtctcacatgacacttggtcattcttccagcctccatgtcaccacgtggtgaatggctgcctcacattgctccagtttgtgcactaataaaagccttatatttgaatctacctgtagtcttggggttctgtttactgtgtggggtggctgggagacagacttcaactctatatgaaggaatggatggcttttgtgggcctctgcaggaaagtaagatgacagagtaattctaattctggttttggtcatacttgctttgctacctaaaatctcctaggaaaaaatgcaaggttttggttattctaatttgtggcctggatccctattctttctgtgagactagaggtcatcctgaggagaggccagctgttatgacaagcatgtgtgcttcagggaataggacaattttattccattgtttccagaggatgtcatatgatgcccagtgctgctgagaagcttttcatggggttctataaggaggcatgccctgatatcaaacattccataggccgatgtcacgcagaagacaacgcgagtcacatgtgaactgtaattggtacagaaatacctgggtatttctgtactgtgtgtactgtagcaaactagttggaatgtgcctcttataaaagtacatttacaaatcttcccgtgactgtggctttgagc

SEQ ID NO: 8424 - DNA, 865 bp, Homo sapiens
gagtgctttgaatacaacaggactcatcaatcagatgttgaatttcatgtatctgaacattgacacaaaggagataccttatggtgccaggtacgtgggaaccttctagggatatgttgcactttctgacttgctcaggttttttgccagagttatgtcactgtcaatccatgtggccgaaaccatcttaactctaccagctaagataccccagcattggggaaggcagggttttgtattgtccagtccctggagaaaatcatgaaatgcctgagttcattgggggtcctcattcccttctgtatgacaggtataggtatggatatgacccatttttagccaagagggtctgagctgtatctgctggtggcttatacaaaaagtttactttcttcatggatattcttggtctcacatacttgtaatcaagtttttccagcctccaagtcacctggcctgggaaagtacttgcctcatgttgctctggtttgtgataataaaggctttacagtttaagccacatttaatcttggggcttcttcttatggtctggggtggattgaaaacaggctctgccaaactgaagacagcctttgtgcggtgcctccaactttgcctcaaatgggacagtgggttgagggagaacagttcttagtccagttttgatgttaacttccatagctgacaaagcttgttaagtaagaattaagatcttgtgtagacctgatttgtctggattttagagttatttgagagcccatatttcaccttgaggagggtgctgctgctgtgacagcctgcagtgttttgaaacagcatggattgggtgtcttgtttgcagcatgtgtcccatgttccccaacac

SEQ ID NO: 8425 - DNA, 586 bp, Homo sapiens
ctgtactgagaatatgcaatttccttttagtgtaattatactgaaggagtacacctgtgagagagacaagtacctgatttggaagccccaacatctaaggatatacagtgggcggattccccttaagttccaggtatgtgttacactttctaacatgccatttagaaagtgttagactttctcacctgccatttatggctcttgccgtttatgtcactgacagtttctgaggcagaagccgtatcatgtctaccacctgtgaggtccacacagtgtgtatcatttacctcctgaacctgctcaaggaagcagacctctgcttctccccatttgctagaagaaatcatgaatagtctgagtcttcctctctgacaagttagggcatggacttgacccagctttgtgccagagaacccaatatgagtgttgttggcagcttgccaagaaggactgtctttttcaagacatactggtttcatgtgacacctccatggatttttttccagcctctaagtcaccaacttgggaactgcttgtctcacgttgctttgttttttacaataataaaagcattattatttaagct

SEQ ID NO: 8426 - DNA, 232 bp, Homo sapiens
gctgctggtctgataatgtgtataaatatgtatgcaagtatgtatattcctatagtatttatctacttaggatataagatataatctcctgattatgctttcaatttattgtcttgcttcattaaaatgtaaggctaaggagagcatggaatttgtcagttttgttcactaaagtattccaagtggttgggaaagtggaacatttccaagaaccaataaatttctgttgaat

SEQ ID NO: 8427 - DNA, 1511 bp, Homo sapiens
atgtgaagggaatgtgctatttctttattcagtataatagcactggaggagactgtggtagccatcttcgtaaatttaaactttgagcacccacagtggggtattcttcataagtttcaggtatgtgggaagctctgaggaggttcattgtaatttctaatctgccgaggcctatagcctgatttatgtcactgccaatttctgaggctgaagccatttcacatttcacccctaccacctggcaggtgcacaccatgtgcatgagtcacttccccacagtgctcagagaagcaaacctctgtactctcccatttgcttggggaaattattaatagcccaagcatgtagggtcttcatgtcttttctctgactttagagtatacacctgacccagttgtggtccagagaatctgagttgtgctgtcagctttctaaggattacttttttaaggaacattgtcggtctcacatgatgcttgtaatgaatttttccacattctgattcaccagcctggaaactgcttggtgcacattgctttaatttataatgtttttataaaggttttaaaaaaatttacgcacctttaatcttgggtgttctattcattgcatagaatgacttgtaagcagaatagtgatgtcagcatgaaggggtgaatagattttgtggagatctcaaactttctgtactcagaagggacaatgtgatggcagaagacagctctttgttctgtattgctctaattggcctgctgcccaaggcctcaaagtaaagactgccaggctttgtgttcctgtattgtggcctggtgccatttttgtcaggtcagaggtcaccatgaaaaggaggcagttgtgacaatccccagtgcttctgtgaacgtgaattttgttcagttgtccacaggagatccacataattcctagcactggtgaggggaatctgttgcccaggtcctgcaaaggagccaggtgccatggcatataagtcagtgtagactggtgccatttgttgtcagactataggtgtggaggtgaaattacaggttcaacagtaattgggacagaaactccaggtaaatggggagtggagaagactgcagtaaattagatggaatgactcttctaaaagttcatctacaaattttccagtgaatatggttgtgtaggatcagtgcatacagaaattctcaggatcttctgtttactatcgctgagatcattatcagaaaatagtctggccgggcatggtgtaatcctaacactttgggaggccaaggcgggcggattgcctgagctcaggagttcaagaccagcctgggcaacatggtgaaatcccatgtctactaaaatacaaaaaattagccaggcgtggcagcatgcgcctatagtcccagccacttgggaggctgaggcaggagaatcgcttgaacccagaaggcggaagttgcagtgagctgagattgcaccactgcactccagcccaggcaacagagtgagactccgtctcc

SEQ ID NO: 8428 - DNA, 3470 bp, Homo sapiens
aaatttggcagatctgttggtaaaaagagcaccctcattcaacattcgtgagatcacactggaaagcacttatgagtatggagaatgtgcaaaatcatctagccaaaaggttggcctcattcaacaatagcaagatcacactggggaaaggctttctgagtgtagagaatgtatgaaatcctgtacatagaagttttgcctcaccaaataccagaagggtcacactggagaaagaccctatagttatggggaatttgggaaattacctaacaagaagtcccacctcactgaacactactgagttcacagttgagaaaggccatatgactgtaaggaatttgtaaaattatttagccagaagagctgcattactattcatcagataatttacaatggagaaaggccacataataatttctcacataataaatgtgagaaatcatttccgtacagctctgcgctccatgttcgtaagagttcacactggacaaagccttatgagagcagcgagtagaaaatcctttgtgggaaaactctggtttcattaaacacaggagagttcatgctagagaaaggcctcaacagtgtagcaaatatggaaagacattcactagaagctctgccctgcaagttcacactagagaaagcccttctcagtgaagtaaatttggaaaattgattagtcaaacctctatgctccttcaaaatcagagttcacactggatcaaggctttatggtgtgacaaatatggcacattctttatctaaatgtctaacatattatgcacagacaagctcctgctgtggaagtgccttttgagtgcagagcatttgcgagggcttcactcttctttcactggataccagaatgttgacaggagaaaaataacatagatgtgtgggaatattacttcttgtccagtgtaactgtgggagagagcccttatgaggacaccatcaacctatattgaatgtcatatgtccagtagctgcataaattccaggtatatgggagctgtattgcatttcttatcctgcgtatgtccttgccagatttatttcattcttaggtctctggcaaaagccatttcatctctaccacttggcaggtacctacagtgcatcactcatgcactccatcatattccagaaaaaaagttcaagttgtctcccattcagcagtggtatttttgagtagcctctgcactcgttcctttctcatttctctatgaagagttaggccatggacctgactcagttctggcctagagcagaagtgtccaatcttttggctttcctggtccacattggaagaagaattgtcttgtgccgcatatgaaatacattaacactaatgatagctgatgaacttttttaaaaaatcacacaaaaaccctcataatgttttaagaaagtttacaaatttgtgttgggctgcattcaaagctgtcctgagatacatgcggcccacaagctgcgggttggaccagcttggcctagagaatttttctgattacttgacaagatgggctgtctttcctaggaatctcatgattgtcatgattcttaaaatggaattttccagcctcttaactcaccaacccaagtacaagctgcctctcattgttctggtttctgctatgatgaagtccttatttaagcttccttcaatcttgggaattgtattgactgtattgtgtgaattgtatactcactgcattgtgtggcttagatacaacatggttctggtaccatgaaggattctggtaccatgaaagtttgttggggttactaaactgtgtgactcttagggaacagtatgaaggcagaatatagctctgcatttgtggcctagtttggatggctgcctaaggcctccaaataaagacttcagggctttgtgatctttatttttagatgaaatagtgcaataatatgtgttttcataaatcaacctgagtaggggacagttttagtgacacactttggtgcttctgagaacagcacaaaattattctcttgtttataatggatattgcattctgctcagtactggtgagggaaatctgttctcaagtcctacagtgcattcatgtgtcctgaagtccagaattctgtaggatagtgtcctacgttataagcctggagaaagaaatcataattctttaatttttatttttttagggaaatgatgtcactctgaaactcaggctggaatacactggcatggtcatacctcactgcggcctcaaactcctgggctcaagtgatcctcctgcctcagcctcccgagtacctgagattagcccaggtaatttaagaattttttatagagatagggttttgctattttaccctgactgatgttcaactcctggcctcaagtaatcctctagcatacgcccttgaaagcactaggattacaggtgtgagccaccatgcccagcccaaaaataatttttgtagaattagcatttctaggtagtgaagcagactgcaacagaatagttgggatatactttttttaaaaaggcatccacaatgattcagtcactatgtctgtgatggacaagcaggtacagaaattttcaggacctccataattatgaatctagtgtagcttaggtcattgtcagactaaatctaaaggttttgtggatttctgtagcctatctgggctgcataccaaaaagccatccctgaattagtaggaggaagaggatagggagaaaggaaatctcttagtccagtgatgtggcctttgcaaccagccagcattccaatttaatcaggtggaaatgatcttcctggctcataagtatttggtatcacacaggctaattgccccccttagggcgtgatgagagttaggagagtcaatgtaaaatcacataacctatttgtcaaaaataatgttaaatccagatagttctttcaaattaaatttttaaagctgtaataagactgggcatggtgactcatgcctgttatcccaacactttgggagtccagggtgggagtattgcttgaggtaagaagtttgagactagcctgggtcccatagtaagaccctgtctcttaaaaaataaatactatctttctctctggcctctccatgctccagacaatcactgaattacaatatttgcttaacagtagattaatgtcaattttctggaattttatatgactgatataacatgtttcctcttttcatacctgagtactctcctgagccctatttatttagatgttcttcttttttctttattattatttttatttcacatagcagggatgcatattttgacattcatcaatcatgatatatgagtagttcattctttttatcttagaatatgacatgctatggaaatcactgtatacgaattcatctgcttatggatatgttattgcttcttatttttgtctgttaggaataaaactgcttgttaagcacatttgaatgc

SEQ ID NO: 8429 - DNA, 818 bp, Homo sapiens
agcaaattttggaaattctcttgcccaggctttttgctccttcaaggccagagagttcacaccagatcaaggtgttatgagtgtgacaaatggggaatattctttagctagaatgctagcttctttacataaaagagtgctcccactgaagaagtgccttttgagtgcaatgaatgtgagaaagccttcagccctctctcattggttaccacaatatttacatgaggaaaataccacagatgtggaggtaatattattttttcttcaatataacactggaggaaaccccttatgaggatgccatctgcctaaattgaatgtcatacatcaaatagctgcatacattccaggtatgtgggaactgcatagtatttttcgacctgcccaggtctcttgctagacttctgtgacttacagttctcttctaaaaagcatttcacctttaccacttggcaggtgcccacagtacatcattcgcctaactcatcatgatccagaagtaactttgattttgtttcattcaacagagggattttttagtatcctcagcactcattctattctcatttctttctctccaatgagttaggccatgaacctgactcatttttggcacagaggactcttctgataacttgaaaaaatggactacctttttcagggatcttttggatctcacagagttcttaagatggaattttccagcctgccagtcatgaatctcagacagcctgccacctattgccctgatttgtgttataataaaggccttgttgcttaagacaccttcagtctttgcaggagggcatggaagctcc

SEQ ID NO: 8430 - DNA, 4978 bp, Homo sapiens
gtgcagtgaatatgggaaatcgtttgctgaagcatcccgtctcgttaaacacaggagagttcatactggagaaaggccttatgagtgctgtcaatgtggaaaacatcagaatgtctgctgtcctcggtcttaagcgacttcgtgttgagatggagtcttgttctgtcacccaggctggagtgcagtggtgcagtcttggctcgctgcaacttgggcctcctgggttcatgcaatcctcctacctcagcctcctgagtagctgggattatgagtacacaccaccacgcccagctaatttttgtgtttttagtggagatggggttttaccatgttggccaggctggtctcaaactcctgacctcaagtgatccacccaccttgactcccaaagtgctgaaattacaggcatgagcctctgcacctggccttcattcttttcgtattgcttagaatatgacatgctgaaccaggcatggtggctcatgcttgtaaacctgatgctttgggaggacaaggtggttcattggaggccaggagttagagatcagcctgggcaacatagccagacctcctctctacaaaaagaaaaaagaatgacatgcttcttgtttttgtctgttataaatgaaactgctatatttgaatgcagttgttcatgtaggtatgtttcactatggtaatatggtggtgtgcagtgcctgagtcacgtgatagattaaagtacaactcttttttgagacagagtctcactctgtcacccaggcgggagttaggtggcatgatttcggctcactgcaacctctgcctcccaagttcaactgattcttctgcctcagcctcccgagtagcagggattaccggtgtgcaccaccatgcctggataacttttttttttatttctattagcaatggggtttcaccatgctggccaggcttgttatgaactgacctcaagtgatctgcctgcctcagcttctcaggtgtgacctactgtgcttggcctaatgtacaactttttaagcaatgccaaactatgacttaagaatgaaattattgctcatttgtatatctatctaccatcagtgtccaagaatttctgttctatcttaccaagagggagtatggttagtatttgaaattgtttattattttaataagtggttataacttttgagtcagtggtttatgttttgcattttttttgttttgagacaaagtctcgctctgtctcccaggctagagtaccgtggcacaatctcagctcattgcaacctctgcttcctgggctcaagcactctgcccacctcagcctccagagtagctggaaatacaggtatgcaccaccacaactggataacttttgtattttctgtagagagggttttacctttttgcccagtctgatcgcgaactcctgggctcaggcgatccacttgcctaggctccaaaagtgcttggtctacaggggtgaggcaccctgcctggcctcacctgtaggcttgttttttaaaatgaattttatctatttcccatttcattaatatatttaaaaataatgaaataacaaagacgtatgttggacttcattcattcttcagtgatgtcactttgctgcaaggaatatttggttttcttttttttttttttttccagatggagtctagctctgtctcctaagctacagtgaagtggcatgatctcggcccactgcaacctccacctcctgtgttcaagcgattctgcctcagcctcctgagtagctgggactacaggcatgtgccattatacctggctaattttatttatttattttagtagagatggggtttcaccatgttacccaggctgctctctaccttctgagctcaagtgatccacctgcctcggcctcccaaagtgctgggattacaggtgtcagccactgtacctggctgaatacttggttttcagtaccacaagaactatgagctggttatccacttcatgtggaatcataagcgtcccaaagtgacaatacatatagattgccaggcagtgaaacagttaagatgccaccatagctttcttttcaacatctttctaagattaccttactatttcttttgttccaagtttgtacttcctcacagttctcacatatggaaaggatacacactttgtagaaacaagaactttatgttatccaagttctaggatagccatgagctccaattatctcagagctctgagtcctctactcaatacccattgagatttatgtgttctgaggcttttgtcttctagctacttacttcattctccatgggtaacgtcattcatccacattaactaatttcctcactccaagctcttttctagagataatctccagtccctgtgcagaaactgtcattgcactttctgctgaaatggcagtttcttctcagcaaggtgagattatggaatccagaatcttttttcaggggtcacatgcccatttccccacttgcatgaatgtcgacactgcagccacagttttggccgtaaatgtgaatttggcaagtaaccactgttcccagggaaatgtcccaatcagaagaagattatctgggacactgatactgacagggagatgggacattctgagggacccggaggcagggtgccacctcctcaacttccctgagggctgcctagaatctgtttcctctcactctgaattattcttcctcttatggctgaccaaaaacatggaacctcacaaagtccactgtaacagctttatatttgtgaagtgaagaacatgaagacagtttcaagcaaagttattgagtggacactttgtgttttttttgagaagtctcactctttcacccaggctggagtgcagtggcacgatctcggctcactgcaactccacctcccgggttcacgccattctcttgcctcagcctcctgagtagctgggaccacaagcgcccaccacgtcagcttaatttttttgttttgtttcttgagacagagtcttgctctcttgcccaggttggagtgccgtgtcgcaatctcagctcactgcaacttctacctcctggattcaagcacttctccttgcctcagccacctctttagctgggattacaggtgcgtgccaccacacccagctaatttttgtatttttagcagagaccaggtttcaccatgttggtcaggctggtctcaaactcctgacctcgtgatccacccacctcggcctcccaaagtgctggaattacaggcgtgagccactgcacctggcctgtattcttttctttagtagagacggggttttactgtatttgccaggatggtctcgatctccagacctcgtgatccgcccgccttagcctcccaaagtgctgggattataggcgtgagccaacacgccctggccacttcttgtctttgcaacattttttagatatgtatttgtgttttttggggagcttaatttgctaatggaatctctgttattttcctaacatgcttggtggatacaagagttaagacttcctgtcccgtttagtgtaacaaaagaaagttaagaaatgtggataaaagattgtaagttagaaatggcaagataatcagctatatgaagaatcttggccaggtgtggtggctgaggcctgtaatcccaccactttgggaggctgaggtgggcggatcacaaggtcaggagttcaagaccaccctggccaatattgtgaattcctgtctctactaaaaatacaaaaattagtcgggcatggtggcgggtgcctgtagtcccagctactcgggaggctgaggccagaaaatcggttgaacctgggaggtggaaggtgcactgagccaatatcacaccagtgcactccaacctggtgacagagagacacatcatctcaaaaaaaaaaaaaaaactcaatccataaatgttatactttataactttataacagcatgttatatgggcttagatattatccctaaatttttttttttttttttttttttgagacagagtctcactctgtcacccaggctgaagtgcaatggcatggtctcggctcactgcaacctccgcctcccaggttcaagtgattctcttgcctcagcctcccgagtagctgggcctataggttccctccaccacgcccagctaatttttgtatttttagtagagatgggctttcactacgttagccaggctggtctcaaactcctgacctcatgatccacccccctcggcctcctaaagtgctgggattacaggcatctgccaccgcactcggcttatccctagaaatcctatgatagcatgatgtataggcacctaaaggcatggcacttgagaaatgtgaataagattgtaagttacaaatagcaaggtacagtcagatgttaacagtctcagcccctaaatgtcaccttgtattacagcatgttatataagcacatacaggcacatacatgaaatagtgatacttcattctcagtaatatcttcatccttctcactggaaagatctttgatgatttttaatcaacataggagtttcaatgatatctagaagtttaaaagggctcgttcaaacaaattatgaccacacacactgaagagtatgtttgtctcttgtggtgtaaatttttttttattacaccaaattatgttcacacaaaacctttgtaatcagggggaattaaagagccttcctggaaaatggaggttgcaatcagccgagatggtgccatcgcactctagcctggggaatagagtgagatcctgcctcaaaaaaaacaaaaaaattctttattttctccataaactacagtttatataagcaaaagtttcagtactaagcaattttagtctctgcagtctcttgtcttgaattaatacaacttttgttaattctcttatgaagttaatcttcctgcttgtatgtgaattaaatatatgtcaaactttttttgtacaaaag

SEQ ID NO: 8431 - DNA, 580 bp, Homo sapiens
atggccagcctcgggcctcggccacccggccctgagtccctggggggagctgatgggccccagaagatgggggacatcccccagccccaccaacccctggccaccttgggactcctcttgaaggacacaagctgtttctcggaagaccctggacacctgctccgaagccaagcacgggatggggcttcccagggtctcagctgagaagcagcagttccacagcacagcctggtcagtcctgcgcactatagttttgcaagtggcttgaagaggagtttcattcgcgtcccatctttcagaagccttgtccaggtctccctgttagcacctgactcagcggcagcttctgccgctgggttttcatttcactgtggatatccctgaggccatgagggtgggagccggcctgggcagctccaactccagagaagggtacagctgaccccggctgccctcctgccagcttagcccccttggaacctaacagataaacagggttttgtttttttccttttttgggtaaagtacatgcaacataaaatttaccatttcagtcattaaaaatgaacagttcagtggc

SEQ ID NO: 8432 - DNA, 944 bp, Homo sapiens
acccactccacatgtgctggggacataggaagaccttaagccatagctcatccctttctagatttgacccaatcatacacatgagaaacgtacattcatacacaagccttttcacacagcactcccctcagacaccctcagagagttcacactgatgggaaatgaccatgggaccaccaagctctaggtcatccatctctgcatccaaatagtagggaaacgtggagataatcaacactcaggaccttcagccttgaacgcccattagtgctatgttatagaacctacaaaaaagaaatggaacaaatgtagtggatccagggaacgcttttgtccaaggattcaccgtattccaaaccagagatgttcaaattggtgagaaacccaacaaatgcctttcatatatacgagaaccaaatgaagtcagaatttgccattattgcacatcacatttttgggggggaaagtgcttatgaatggtgcaggttgactctgatattcattcccaaatgacagtatggcagagtgttccagaaatgagagtggcatctttatggaatcactgtggatactgactgtctcagtaaacagctgtcttgtctgtgtgtatattgtttgatcagggtacatggcagccagtcacagattggaattacatatgacaaagtatcagtgtactataaacaggtttttagttatccctgcattatttttgcaattaatctttatatgcaatgagattgaaaagctttgtatgggaagactcaaaatgtaaagctgcttccgtagagtctcactgattctgagatggcttttgctgctctgttctccctctacatttctctgcagaactcgcgttagaaacacagatatttgttttacaaaaagggagatttttcctttgttaaaccatcgtcttataagcaatagcaaattcatgttag

SEQ ID NO: 8433 - DNA, 418 bp, Homo sapiens
ctctcaagccagttgaagaaaccttgccttttcagcttgaccctgcaatataacatgcacaggcctgcttgtgaatcaggactgaatgtgaaagggaagtattgagtgaggacattcccaaaaccaaaggacaactgaggagactgcccagcacataatgaataaataagaaaatgagtgaggagttattaacatcatttggaaaaaagatttcccattcacttgatattgtttgttcactcatttagtcattaaaagtgagattaataaaatctgaaaatgttatataataactttaaaaagccaggtaattaataatctgcactgatattacatccacagtaccacagtatttatgtgtatgaattaaggattaaaagataatgtggataaataaactattgatctatgtctgtgt

SEQ ID NO: 8434 - DNA, 888 bp, Homo sapiens
gagtgcagtcattgtgggaaagctttcatccagaggtctcccctcatcatgcaccagaggacgcatgtcggtgggaagagctatcagtgtgacgtgtattaagccagcggttgtgactcattgaacatcagaggacatatcctggagaaaagccctacgaatgcattgattgtgggaaagccttcaatgatcgctcaacccttagtaaacacgagaggacacacactggaggcaaaccctatgaatgtgaccattgcgagaaagcctttagccaacggtgtcaacttactaggcagcagagaattcatactggagagaagccctgtgaatgttaacaaatgtggaaaagcttccagttatgatactttccttattcaacatgagaaagctcatgggcaagaaactctatgaataaccaagatggagccgggtgcagttgccaacacttgtaatcccagcagtttgcgaggccgaggcaggtggatcacttgagcccaggagtttgaaaccagcctgggtaacatggcaaaatcctgtctttacaaaaaatacaaaaattagcctagcatggtggcgcatacctgtagtcctagctactcaggaggctgaggtgggaggatcacttgagcttgggaggcggtggttgcagtgagctgtgatcatgccatcacaccgctgccttgtgagagattgagacactctaaataaataataaccaagatgggaaatttccctgccagaccttgtttactagaaatcaggtggccaaaacatgactctcagagtggggcttcatgaccatgtgcatcagaattgcctggagtgtgcactgaaactgtgtattaccaagctcactctagccaactaaataaaaatctctggcagtaa

SEQ ID NO: 8435 - DNA, 352 bp, Homo sapiens
gagagaaactttgctgatgacttttaaccacaagtaaaaaatgtggtaagtccacatagtgtactcatggaaggaggggctgggggtagaaatgtcatgggtgacttctgactttctaaggaaatgatgcttcccaagcacccgaggttggttggtcccaaatctatcaaactcagtgccctctttagcgacatattttgtgacattccttccattacaccacagtgagttcacaggtaatataacctacccacctgtgtaatgtcaaaaaaaatcaatatgcggccccattttgtaaaggatcattaaaatgaaagtaatttatggtagagtaaattgtagagtaacgtgt

SEQ ID NO: 8436 - DNA, 3003 bp, Homo sapiens
ccggaagtcgcccctgggggcgtagcacagcgtcttctcggaggctcgaggtctaagagaaacgctgagttcctgaagagccacagacagggtgggtgattgatgagttgtcaaaatgataggtgcctgagggcagactcgggctgtctaggaaccactctgcatttgaggaaccctgatgagcacaaggtgattcaggccagctggagaagcttccagaagggccctgcactgctaccctctatttcccactcagggctgtcccagagagaaggcagccgaactgaggatttagactggttctgagggccagggcaaatgaaggcgcatgtctctcagaactcagcgtcccaagacgctctgggcgggccaactgtagcttgttctcatgtggttcttcttgcctgcttttctgctgcttagcccagaacggacacctgccatgcccacctctgtgccttggcacctactatttccactccagactattttgtgcctaactgcaaggctgacttttgagactgcctcttccacgatgccttttctacactctgcctctctcatggtttcctgtcgtaatcagtggtgctgcttgacacctgcccagcatgttcctgtctctccttttccttccacatcccaccagtcaccagcgctattgttttaacctaaagcttatctgtaattcacctccttttccaccactgctaccttatgtgagccctcattgcctcttgcctggattatagccggggtctccttcctgaccacttcctgcctttattctctgcccctgtatcactctccaggggactcttgatattacttagatctgactgtgtcactccaaggtggaaagctctccaacccatcttctacagcacagcttcctgaacagggtataagtatgctgagatgcaggctgctctgggccccgagcaacctctccagttatcctcatatgcatgtatgaatactgtcatttttctgtgcgtgcagtgaaaatggcctcatctcataccatggctccaccttccatacaccagccacacggaactactgtggtccctgaaggagccatacattttcccacttatgtgcctttgtacctgtgcctggaaccctcctcttctttttctttttcttttcttttctttttttttttttgagatggagtctcgctctgtcgcccaggctggagtgcagtggcgcgatctcggctcactgcaagctctgcctcccgggttcatgccattctcctgcctcagcctcccaagtagctgggactacaggcgcctgccaccacgcccagctagtttttttttttttttgtatttttagtagagatggagtttcaccatgttagccaggatggtctcgatctcctgacctcgtgatccacccgcctcggcctcccaaagtgctgggattacaggcgtgagccaccgcacctggccctcctttttcatctaaggtgtttcaaatgttgcccaaagaaacctccctgctctccgggagcagacttcagcttgccctctctgcttccagagcacctcctagatacctctcttacaactcctgccaccttgttttacttatttgctccttgtagagctgccttttccaaggataccataaactcctgagagcaggggccatgtcttactctcagtatctacaacacacaagactcagtaggccctgactgatgtctcttacatgaatgtgactggtgcccccaggaggcagtcaccgtgctgtctctgccccacattgtccttatgtatgtttacatggatgtctccccagcagcttgaaccctggagagcaagaataatctgattttcctgggggccagcacccaaataagcctggcatgcagtggcctcaataaaatgtgactgtattgagtcattttctagggccccagatcccctggtgtcatggacttagtctttgccagcattctgtccatgtgttctctggtcttctctcacaatgctgcatccctgtcccatttttagggtccctgtctatcactggatgctgcagcttctgttcattactgttagtgtatcattcttcatgcctctgtttctgtgatggtctcatcatatgtgaaccatttgacctggcgtattgtgtactagtcaccgtcaccatctctccatatgtatctccctgtatttcgggcccattccctctatgtcaagagtaaatagaggcacagagactgatgagaaacgttcataacatgaaggtaagactcagggagacagagactttgtggaagtatctctgagggagtcccagacacaggcagagagggccacatatcgtgtgccagaggctgagagactgagagggatgacaggcttaggggaaaactcagagaggagagatgcacattcctagtgaaattgcacaggcttccagcatgctggagggaacagaaaaggcatgggcctgaattcaggctgcagagcctgactcctccctgtggctacttttgggacctaagataagtgactttcctgaacctccatgacctcctcatatgtaaaccagggacaggacccaccttgtgtagtgcctgacccaaagcctggccctgcacactgtctctgactcacagcaatcatcagcacctctctttgcctcctacttgctcagtctctgtcacaagaactggatctccatccccttgatgctctgagcatcttcacccatttggtcgttgagacatatctgtccatgtctgtctaaaaggggaggagatgagggagaaaaaagggaatctactcagagcctgtgtgtgctgcccagtctaccaaataatttatatacatctcagtcctcacacaaccatccctgttttatagaggaggaagtggcttagagaatgtaactgaccaaagtcacactgccaggaactggaagcactaggatttgacagcatatccaaatatgtcagcaatttcaataaacatgactgtactcaac

SEQ ID NO: 8437 - DNA, 53 bp, Homo sapiens
ttttcccagctgctgcccaataaacctgtctgccctttggggcagtcccagcc

SEQ ID NO: 8438 - DNA, 539 bp, Homo sapiens
caccgtgttcatcaggaaaggtcttattccagaaaggaggttaaggagagtggccgtgagagtgccatccgaaagaagctaaaccttgcacatcccaacacccaccccagggagagttcccgtgtgtgcctggtgtgtgggacgctttcgggagccacattgcactctgacttgcctggggctgttggcagtgtcacatcactgagtttatccaccgccatccacctctatccaccccataaggtccctacagcaagtgggacagcagaccttgtgctccttgctctaaacagtagagaatcgttaatagtggagcccaaaacaggcctcattccctacccttgactggtttagctgtggacatgacccacctctggccggaggagctgagctggtatctgctgggggcttcctgggaaggtttaccattttcatggaaatggttgacattacacatggtatttgtcatgccctagcatggactgtctcatactgctctggactatgtggtaataaaggctttattgtttaagccgctt

SEQ ID NO: 8439 - DNA, 1253 bp, Homo sapiens
ggtcacaggtcgcagcccaaccctttcttggccttctgtgaatcccttccacagctaaagggtccgagtgctcttcagatccacgatggggaaaagctctgtgcctgagagtcagggacgagggagaccctttggctgtggttccatttgcaggtggggacaggatttgccagtttagtcatagctcacacctccatcctcaaagaggtaacactgcagaaacatcagagggaggacatgtcagctggaactctggtggggctgaggctgtagttggggccataggacgccgacaaaggcagcgctgcatggtggtgctacttcatgtgttatgagagtggatgctgaggtgagggggatgcggacatggggtaggatgacctagagaaacttatgatgtctgcacacaaactggccgctagacggacgctgaggacattttccccctgaggcctctattcaaggcttcctgggggccatctcagcaaacaggagactacaggggactggggatcagggtgtggcctgtgagtgtcagcctcctcctcggaaaaagaaaagctttgggtcaactcagcatcatgtttgcagatgctgacagacgggatcctaatgagagtcaatgtgtgctcactgccagctcctgggctgtgctctggtcagccaggtgtgagggcctggcctggggtcacacagctgactcaggagaggaatgcccatggttctcagcattggaaggacaaacctaggatgatggctttccagtggcactcgttcaggttttcgtccaagtctcagcttggccaaggcctgtcgctcactcatttacaaaagtcgatgtgaggaggagcctttacacctgtggagacagtgatagctttggagcagataaggtggagctgctcatttttgctggatttggtggccgatccccgcccccacccccaccccctccatctcacctttcccttgttatgcctcctcaattggaggctggacagagagctgaataggaaggacttgccattacctaaggccatgtgtgacagcctcctgaggacctccccaacccagtgtgatgggcctgcatggcagagacaaaagggtagactgggggtcatttgcttcctgtggccttaagcctactaggccccatccttacctgagacctcacctccaagaaattaatggtcttttcaatggagaaaaaaaaagactagtatttgcaacttcaaatagatgtagtttccttt

SEQ ID NO: 8440 - DNA, 1244 bp, Homo sapiens
ggtcacaggttgcagccctggccttctgtgaatcccttccacagctaaagggcatatgtcctctgcagatccacagcagagaaaaagtcccgtgcttgctagtcagggacaagggaggccctttggctgtgatttcatttgcacgtggggacaggatttgccagttcacccacagatcacacctccatccccaaagaggtagcactgcagcaacatcagggggaggacgtggtggctgaactctagtggggccgagactattcagagccagtaggaggccgacagtcacagcactgcactgtggtgcggcttcatgtgatatgacagtggatgctaaggtgagagggatgcaggcatgggttgggggtggcccagagaaacttatgacagctgtacacaaactggccgctggagagatgcccgctgagggtattctcccctcaacccactgcctctgttcatccaagacttcctaggggccagcctagcagacaagagaccacaagggactggggatcagggtctgggctctgtcagccgccacctctgggaaagagaaaaggtttgggtccactgaacatcatgtttgtagacgctgacaggtggggtcctaatgagagccaacacatgctcactgccagctcctgtcctgagtactgggaagtttctcctgaagccctgtgagatggctctgtggctggtatcccgacttggaagatgaggaaactgaggcacacggcctggcctggcttcacacacatagccgactcaggagagggatgcccatgggggaacatgtgactctcagcattggaaggacagagctaggatgatggctttccggtggcactcgttcaggtttttgcccaagtctcagcttggccaaggcctgtcactgactggtttaccaaagtcgatgtgaggaggaggctttatacctgaggggatgatgttaacttcagacaagatggagctgctcacttttgccgggtttggtggccacttcacccccaaccctgtctcacccccattatccctcctcaattggaggctggacagagctgaataggaaagacttgctattgcctaaggctatgtgtgacaccctcctgaggacctccccaccccagtgtaatggcccttcatggcagggacagaaaggtggactgggggccatttgcttcctgtggccttcagcagaccaggccctgtccctacctggagcctcacctccaaggaaattc

SEQ ID NO: 8441 - DNA, 504 bp, Homo sapiens
gcagccagacagcacagtccctcggggcctcggtgttctcggggcctggatacagcctctggggcaccagcagaagactctggaggcagcaggggatgccagagtgaacaaggggtcccaagccagttccctgcccctggtctggtctcccccaaaagacctgggtgcaaggaaaaggagctgctctctctcttcttgcccctgcctcctagagggaggtctgggttcccttctatggctgaccagtgcctgtggggtgactgccaagcaccaggctccctccctccctgtgacatggcctgggctgacaacactccctctcctgggacctccttgcctcaggtgggtgttcaaaaactgtgccttcccactcgtctgtgcagaggctgggcctgaggtctcagtgtggagagcagcagaagacccaggaaagcacagttggcttccgtttctcctgctccctgtgtgtgttagaattttaacataaattccactttcataata

SEQ ID NO: 8442 - DNA, 162 bp, Homo sapiens
ggctggagcccccatggccagcccagcctggctctgttctctgtcctgtcaccccatccccactcccctggtggcctgactcccactccctggtggccccatcccccagttcctcacgatatggtttttacttctgtggatttaataaaaacttcaccagtt

SEQ ID NO: 8443 - DNA, 342 bp, Homo sapiens
ggccggaccccgcccaggcagggagctgctgtgagtccagctgaggcccacccaggtggtccctccagccctggttaggcactgagggctctggacgggctccaggaaccctgggctgatgggagcagtgagcgggctccgctgccccctgccctgcactggaccaggagtctggagatgcctgggtagccctcagcatttggaggggaacctgttcccgtcggtccccaaatatccccttctttttatggggttaaggaagggaccgagagatcagatagttgctgttttgtaaaatgtaatgtatatgtggtttttagtaaaatagggcacctgtttcac

SEQ ID NO: 8444 - DNA, 1115 bp, Homo sapiens
ctcctggccgcgggcggcgtatgcggcccagactggacttagcgctgccgctgggcccgcctctgtcagtcttcctgaccccttccccaccccccgggccttggggtagcacctccttctgcttcagaacacgtcaggactggggtgaggtggctgggccgtgagcccttgcccctgtccacacagaatggacccacggccccacccagcgccgtcagcgcccggcactgccacccgggtccgggccgctgcctgcacgtgggatccgtcgggcagccggggacagaagagaccccgccgttgggacgcagggcagagccggccacctagtcccttccagccagcagaggcgagggaaggcgtcactgccccggcggggagacgggcaggacgccctgccccgcaccagcagcctccgccggggcgccctcagctccctgcttggctctgtctctccacacccggcagggccgcgggctgccccagccctgggggtcgtgggcagctgctactcagtgccaaccccgtggggcacagagccatatacctcgctgtccggcccccaccccagcctcgccttcccaccccatcgtctccacttcaggaaaagccgcactttacacccccacctgcctcttccccctccatccctgctccccgatcctgagcggttggggtggggtccctcagcaaccccaggcgtgggtttgaggagacaggtgatttacatcccctttgctgtcctcccccggtaccaaggcagggagcctccggaggagccggccctgctggccacgcaggggccagactccagcctgtttccccagccctgcaggtcttccttctgtgggaagcttcctagcaagatggcttggagtcctggtccccctcctccctggccctctcgttcgtttctgtttctgtttacacgttggagtggggtcctccgtgggcggcggcgcgccctgccccgggtgtcgtccggcctcttgtgctcgagcccctttccgagttggactcgaccatccctcaccccaccaaggaccacactgtgaagtgataactgccttgaacccccctttgctgttttatttattaaacttgatttgaagccc

SEQ ID NO: 8445 - DNA, 141 bp, Homo sapiens
gacctccgctcccagtaaacaccctcaggcaccctaaccctgtgtatgtgattattctgagctttttggcctggagaagggagggcgggctagaaggccaaaagaaggatgaggaggacaataatatttatttttgcatcc

SEQ ID NO: 8446 - DNA, 1235 bp, Homo sapiens
tctacttcttccaccactacgagctgcctgccatcctgcagcaggtccgcatccaggagatgctgcttcaggcgccgccactgggccccgggacccccacggcgctgcccgatgacatgaacaacaactcgggcgccccggctacagcccctgactctgccggccagccccccgccctgggccccgtctcgcctggggccagcgggagtcccgggcctgtggcagcggcgcccagctccctggtggccgcggcagcctcagtggcagcagctgccggtggtgacctgggttggatggcagagaccgctgccatcatcacagacgcctccttcctgtccggcctgagcgcctccctcctggagcggcgtccagccagcccgctgggccctgctgggggcctcccccacgccccccaggacagtgtccccccgagtgactccgcagcttctgacacaactcccctgggggctgcggtaggcgggcctagcccggcctccatggccccaacggaggcgccctcggaggtggggtcctgagccgcacagctgagccgcctctgacccctgctggctgggcctgaccttcccgagcccgtgggggtgggggaggccagccacctccttcctctgggactgcccagcctgtgtcgggggctttcagggtttcgtggggtttgcccggaaggcggctttcctccccctggtgtgaggtcgcgcccgaggcttgtacccgctagtgaggtgtttgagctggtcagcaaggagagggggtggggttccgcggaaggttctggaggggtcttggtaggtctgcagtgaaccgtcctgaggatggagtggggtcccatggtgcaggtctctgagcaaggcggaggtgtggaggagaggccggcttggggtggggcctcgcgccctagtgccggccggcctcagcccggctctgcctggtgctccctgcagtgccttctccatggccccgccctccccgcgtgtgcgccaggcttggggtccccgggagagcagagcttgcgcctcgggcatagggacgtggggtgcaggcgccaacatcagtggcagcagccagggccgtggtccagtcccactcggggatggagtgggccggcggccaaaccagtcactcggggaggaatgcggaggagcgctcattccattctatttaattgcagtgtacaaaattgtgtttgtatatagaataaactgtctgttgacagcggc

SEQ ID NO: 8447 - DNA, 484 bp, Homo sapiens
gccaggcctgtttcccacacagtgaacggggggctggcgggcctctcctggggcctggctttggctggaggggctagaaggcgagaggggctgggaaaggagtcttccctcccctttcctgaactgtccaggtccttctaggacacctgatccttccagtccctgggggctgtgacccatggccctgtgcagggtgcagggtgagtctccttccagtgccccagtttcttccaggtcacgccaggccaggccaggccaggtggggaaagggacaccttccggccctccccagtagctggctggagatggagcttcctgtgtcccagaactcggcgtccagctccactagggcctggatccccatcacagcttgggttagccccggtcccagcccaaactcaggctggaggcagccccgaggcctgtgcctttcccactccaccttctacagttgcttagccaataaacctttcctgggctggag

SEQ ID NO: 8448 - DNA, 51 bp, Homo sapiens
caccccgtgagccttgtcagtgtgtaaataaagctcttttgccacccccag

SEQ ID NO: 8449 - DNA, 598 bp, Homo sapiens
gcccacgtcggccgtcgggaaagcacggggcctttcccacccaccctcagccagcgccacacggcacccacagactgggtgccccggcggcgccacgcttggctggtcagcgctgcaggtcccgcctgttccagggcaggacccgggcccggcccaccggccccctggcttgggaaggcgtgggccacatggtcccctctggggcgtccccagcctccccgtcctctgtctaacctcaccctctaaacgttcagcggtggaaagatttttataattttaaattattactgctttgaaataaacggacgtttgagctcacgtggcggccatgcatggtttgtggcggaagacggggcccagcggctcccccagcgctgaagcacggggttcagcggctcccccagtgctgcaggtgccgccaggacgggccacgtgggcccccagcctccccctcggccgcctccacgacccggagtaggggggctcgggaccatgaggatgaccagcaaaattcaagaacaaaactgctccaacagacttttttaaaggaaaaaatatgtgtatcttgaaagctatttaaaatacactacttacaaag

SEQ ID NO: 8450 - DNA, 170 bp, Homo sapiens
gccacaaccttgcggcatgcaaatgagatggccgctccaggcctggaatgttccgtggctgggccccacgggaagcctgatgttcagggttggggtgggacgggcagcggtggggcacacccattccacatgcaaagggcagaagcaaacccagtaaaatgttaactgac

SEQ ID NO: 8451 - DNA, 52 bp, Homo sapiens
cgcggcggggccgggggcgggcggggggcgggccgagggcgcgggcggccgc

SEQ ID NO: 8452 - DNA, 139 bp, Homo sapiens
cggccgggggtccaggcggaccttgtggtgacccggctcgggcgtctcctcggtttccttgcctcacccgcggagagcgctgaacctggacaagcagcggctgggaaggacaggtccaataaacgccctctgcgcccag

SEQ ID NO: 8453 - DNA, 934 bp, Homo sapiens
tggcggccccgcggagaccccgctgccacctcgcccagccatcaagccctccgataccttcggctaaaatatctttcatatttttagaatttgtcctcggaaacctttttcgcttggggtggtctctctcactctgccccctcctcacgcagctcttggcagtcaacagacgctggcggctggggctgcccatgccatcccagctccaagcttcccactccgggacttgtgtttgggtggggagacctgacctgggcatgttcctgtttcttcatcgttgagcttttctggcccggtctgaagctcaagtgaggagggggaggctgggtttttatcacttttaatgaatttggtgtgatttgttgtagatttttaaatttcccttttggagagaaaaaccaaaaaaactcgccccactggtaaaacatgggtcttggtcccagcccctgctcagcccctcccagtttttagcttgaatgagggtggggtctctgggaccctgcccctcatgccagaagcatcttgtgttgtatatgtgtgcgcgcgtgtgccctgagacccaggacagaagccacggtcctaagagccggttttatcctcgtcattctgcgtgtcctcccccacgccacctgtgtcggggctcagggtctcctgctttatatgagcccccttcctttcctcccctcctttatgctgggggtccaggacttccagccagaagcctctgcccttgcactaccttgtctgtcaccccatcccgtgtcccctcgtcccccagcctgactcctgcctgatagctcctgtgtccccatgctggtcctcctggcccaggctgcaggagccaggctggggggcctccgcacccccttgctgcgtgtgggtaattgtgttttgggggaaagtggggaatttaataaatttctggtgctctggc

SEQ ID NO: 8454 - DNA, 554 bp, Homo sapiens
cccctagaggcggacacacagcgacccccatccctgcaggacaaacgcccctgccctgccagaatccggcccccacagctctcacggctgctgctcctctggactccccaaggcaggtggcctccacccacgttctcccgtcctggggtgaggcttcctgtggcccagcccgccccattcacctgtggatttgtgcgagatgcagcctcagaaggaacaaggcccccagagggaggtcacctgggggcagctggtgccgggtcttcacccagaccacgctgggtcccctctgttgggggtttggggtccgggtctcccaccagccactgcttcctcctgggccctcggccttccacccctcgtcttccctccctcgggggccctgatgcgtggcggcccccgcccggcctcggctctttactccattcacagccatgcacgcgctcaagccaccagggtgcgagatgccagctctggagttctcggttgttgtaggaggttgggtgttttcaaatggtaaagatgttttgagcaaataaatttgcttgatacag

SEQ ID NO: 8455 - DNA, 586 bp, Homo sapiens
cacgcctttaggcgaaacatgccccaagacacagggaccgtttctcccctaggagcagcggtggggagcagggccaaggtcccctgaccactgctcagaggagccctaggccctggccgcagtgccttcagcgcccgacccgggcccccacctggtcagccctggcggggcccactcaggacagctgggggccggggcgtggcagggccctctctgtgcctctcctcccaagtaggaaggggctccgggtggctgctctgggactgggcacccacaagggctcagtgggcccaaacccttgaaatccgtgaaaccgggtggtcccaagagctagaaactcaggaaaccccaggtgctcagggccccgcgtctcgggggctccgtggggcagacccctgctaatatatgcaattctccctcccccagcccttccctgacccctaagttattgcccgctcacctctcccaggccccaggccgcggagctggcagggtggcgcctgcggtttctatgtatttatagcaagttctgatgtacatatgtaaaggacttttttaaatatatgtgccttttgcctacttccca

SEQ ID NO: 8456 - DNA, 945 bp, Homo sapiens
gggtagggcggtgggtggggaggaggggccccccgaggatggcgctggtactgctgcttgctggtggagtccgaggcctgaagggttctgctgtggtcccaggccctctcccacccccgccccgcccatgctcccaaggctgggcagactcctctcagaagctgctgtgaccactccggccagcagcacccctcccccaacccaagggcaacttccctgaagcccagggcccacgtcggtgggatgggaatggggcgtggggctggggcagagcagggttcctggggcagccctggtatggcgggtgaccctcacgtctgtgcactgtcctcctgctggttatccagcatgggtgggcagagagccctagcctggagcaggggctgagctggactcaaccgcgtccagtccatcccctgcggctcccacgtccactgggaggctgggaaaacgtgactcccggagagaagcatgttgacttttcctgggggcttccaagggagggggccccgccgtctgcagtccagcatggaggcaccctgcttaataagcaggcgccacagctcagggtcaatgcaagacgcatcccctgcaaaacacactggctcattttaaagctctcaccttccaaggcccgcccgagtcccaagtcccacccgcgtccaccctccctgatccagaggcgggatggccggccgggtagggggcgcggggctcggcggggctctgacggcgcggcctggcttgcaggctagaggcggccgaggcagcgggaggagcgagccccgattcccccccggagcgcggcgcgggcagcgcggggcctgagcagcagcagccgccactggagccggacgccgagcgggacgcgggccccgagcaggcccagaccagctaccgcgacctgtggagcctgcgcgcctcgcttgagctgcatgcggccgc

SEQ ID NO: 8457 - DNA, 905 bp, Homo sapiens
gcctggttggcggaggggagtcttaaagccgccgccatctggagaaccagctttacaaggaccctcactcactactcttcggcggccccaaagcctctggggggccctctatggccaccacttgctcctcgcccaggagtcatctcatgccgccgcctcccccagccctggtggaagaagccagcgcggacccctgcctctctgccccagaaagtcttcggagggatgaccctctgctgacaagctgggggaagttggcgtacagagacccccgctttgctgctcatcccagggaaatcccggccccactcctgacctcagactcacttccaccctcaagtggatcgaggtgggggtagccaggggcgctgtctccagtgacaaggtctctgggacccctcatgggctcaagaccccctcccccaggcagcagctgtgtgattcatcaccaccccctctgcacctcgggcccccccactacagccgccccactccccgtcagcggcagccggctgctgcgtcagccactcacgcagggtggttattaaaggagagagacatcagcaccgagctcccctgcgcccgccgtccatgcgggaggggccacccacccactggagccccagacgcgggcgccacatgcccagcctgggagcaattcaggcccattctttctgatctgcgcccccagcccccagccccagcagtcagcgcggtggacgttctctgacccagagcagcccttgtagggggggagttggagggggtgcctggtagtcacagcggcccctgcataattgcgtaattcttgccgctccccccagcccatcgttccctggttctgtgagcctctgccttttcctggttttgcgaagcgccgtgttcattcattcattcattcattc

SEQ ID NO: 8458 - DNA, 269 bp, Homo sapiens
gcccccaccccggcccggccacacccatgccctcctccgtgccttcctggccgggagtccagggtgtcgcaccagccctgggctgatcccagctgtgtgtcaccagaagctttcccggcttctctgtgaggggtcccaccagcccagggctgatcccagctgtgtgtcaccagcagctttcccagcttctctgtgagggtcactgctgcccactgcagggtccctgaggtgaagtaaacgccggcgctgggcttggccagtcggcagtg

SEQ ID NO: 8459 - DNA, 67 bp, Homo sapiens
gcctaggagttcaagaccagcctgggctacagagcaagacctcatctttcctaaaaaaaaaaaatac

SEQ ID NO: 8460 - DNA, 1831 bp, Homo sapiens
cctctcggggcctgcaggcttgggcagcgcacaaggtggcctgcacccaggctttccctgggggtccgtcggccccagactggcattcacggggtcccagcccacgtgggtgttgacacaggcgcccctcctgatgctggggctgcggttcatccgtcgtctcattcatgccgagttggtgggacccacccagctggctccgtcctgcgtgacctgagggccccactggggttctggaagaggatagggacattattgctgtactgtgattctgtcgtcagctcacagtggccgtgctctgcagtggggcccctgggagcaggtgccacctccttcctctcccggggcaggcactcgcctgtccacttctgagtccaggtgttgggatcgaggtgttaactgtgattccatccagcgagtgcccacccaatgtcagagcagcccgagggccagcctgagcccctgaccccacttccttctgggccccgggctcctcccacaagccacgttgatcttcacaacgaccctgggccgctggggtcacccaagagaagcagccctgagacccagccaggctgggcctagctccacggcacgggtgtctcccagccactgcccttgctggaggaccgctgtgagtcactggccaggagcccagggtgtcctgagtctcatagccaccctgccagctgcagcaggtcctgggcctgcttccctgcgggttctggccctgggggagggggcgttagtgcggcggagggtcttgccaaaggcttttcatcctaaatagcaacttgagtggaaacctgggcaaggcggcccagaggctgggccctgcacataaagctttcgtgtgtgtctggccgtctgaatggtgcctctgtgagcggctccgtcccggggccccggaagctggggagggatgggtaccggcgaccccgggaaccctgctcagtcctgccgggcactgcatgcagggaccgtccgcctgacccagagacctggggctgcctcaccctctctccagacccacagccagctttgtttcttgaatgtggaagatgtttcttattccctgaagaaagggggcctgccacacacagcctgggaggcgcctcatccagaaactgggacttggctagcccggcctgggccctagggacttctcactggtcatgcttctgaagctgctcacctggccgagggaggtcccggcagtgtcccagggtggaaggtggggagggggccggctcctgccatcccttcccaccctgcacttctgtgctgcttgcagtcatagctttccttgtccccccagctgggccagggctgtgctccctgaagtggctttgacgtggggccgtcccagctcccgcagcccctgtccaccattgactctccccggtagtggctgctgtggctgccccatcccagctgttgcaccagccacagctcctagtggctcatgggtgcctcctgccccacactggggcctgccataataactggcccaggtaccaatgcccaggttggaccccctgtctggggtgctgtgcaccccctggagcctgccctcccttgggaccagggggagactcctggcctcagccagtgcctccccggcccatctgggtggggtgcccacaaaccctgtgcccccagtttctgctttctggctctgcttccagggatctaacctggggggtctcagcaattctgtggcagcacatagacagcgatgaacctacccgcccacagcccattttgaggaagaggtgatggcggcaggcaatgcaagagctcagtttattaaatgtgtgcgagtcggaca

SEQ ID NO: 8461 - DNA, 331 bp, Homo sapiens
agttgtcagctcagaaagcgaccttgcccccgcctgggtccctgacaggcactgctgccatgctgcctccccaggctggccccagaggagcgagcaccagcacccgacgcctggcctgccagggatgggccccgtggaaccccgaagcctggcgggagagagagagagagaagtctcctctgcattttgggtttgggcgggagtgggctggggggagaggctggagcaccccaaaagccaggggaaagtggagggagagaaacgtgacactgtccgcctcgggcaccgcgtccaacctcagagtttgcaaataaaggttgcttagaaggtg

SEQ ID NO: 8462 - DNA, 991 bp, Homo sapiens
gcccctgcaggagccccggccacacacagcaagaaagatacatctgaccagcctcaacgtcaacgtatttcccctctcaccctggcttccaggcagctctgaaatacgtcccacctgtgcagctatgtgactccctcccacacacgcttaagacacctctgcatgcagtcaaagccactgtcacaagccggcaggcactggtgaggaggcactaaggagactctgacttttatttcgcctctctccttggctgccaggaagctcatagctatttatactcagaaagtttaacgctgctttctttctctttgcgcgcgtcacacttgcttggagacactgtcatgaacgagcatgacaccctgctgccctgggtacccagaagatcatctgtttacttcccagacactgtgctgtctctgctctctgctactcacacacaccctcatgtgtgaagggcagagacactgtcacaaacaggcatgccccttagaagacatgcctaaccaggcactgtaacgtaccaacgtaccaatttccccttttcccctggctaccaggaaactcggagacaatcttttcagcctcagcatttctggctggatttccacccatcaacacgtgcttgctcctcctttttttttttttctgaggtagacccttgctctgtcacctaggctgaagtgcggtggtgcaatcatggctcactgcagcctcaaattcctgggctcaagcgatcctcccacctcagcctccacagcagctggaactccaggtgtgaatcaccatgcccggctaacttttaaattttttgtagagatggggtcttgctacgttgcccacactgctctccaactactggcctcaaacgatcctcctgcctcggcctcccaaagcactggaatttcaggcatgcactatcgtactggctgttcaccccccttttattcctctttaatttttacaagcactttttaaaaaaaaattttacttt

SEQ ID NO: 8463 - DNA, 662 bp, Homo sapiens
gtggtcaggttacaataaaccggagagaaaaggtccgcttgcactttttttagttttcttatttttagacacccctcccctccagggtgatctttaaaaaagcaaaacaaaaaacacgacttttccagcgctcagcgttttttcctttcgtccgaagccgttttctgatttgacttttctcgccggccggtctcaggccgcacagacgttccagaggaggagggtgacatttttactccctttttggggctaaccatttatgcttttgtacatcaaccgtgcgcggccggagggggcaggggggcgggggcgaggggcgttccaatcaaatttctaactttctgttaattattaatcccctttttactgcggtttctgttgtcatttttaaaatttttttaatttttttttttttttacttttactttttacctcttgtgtatatgtagggaatttatagggaaatatgtactttatggaataaattttaagaactaaaatatattttattttaaataaagtaatggacctttaatcttacacagctaaattactgattatatatttgctgagctgatttaagggttaaaaaaattgtatcaagagttttattttttgacttcaaagccttcttaataaagcctcttttctacatgtgagca

SEQ ID NO: 8464 - DNA, 1661 bp, Homo sapiens
ggcaggtgctgcggggccacgggggctccctggagtcgggtcctggcagtggggactgcctggtgaacacagatgtgcttgggatgacgggtgcctcccaagagcttcccatctccctagaagagcccaagcgtccccgtcccgtggagtcgctaaagccagccctccctgtcctttccagaggccctgccgagagcccgtgctgcctgctggagccgcctgcagacgcggtcctcggccccacgtgaaccaggctcggcggcgaagcccagccttggagacacccaggaggaaggccgtgctcctggctccctcctcggcccgtccccacttcccggggcctcggggcacacagctggggctgcccccacccgaaagaccctccacgctcgtcctctacagagtccggcttcgggaagtgccgggtgctcctgggccctgcctggctccctacgacctttgggctcgaggccagctcctccccatgcccgctgtcccagctccttgagactggagagcagccagcaggtgcccggcagctcggcgccacggcttgctgacagctgggagggtttctcggtctggaggcgtagttttgaaactcacatcacccactgtgcagcgtgaggacgggactctggtctgctgtggggggcatgcaggacggcgccactctctgccctgccatgcggctggtggtgccacagagcctcaccgtgcctgagtggcatgcccaggaggccgctctccttcagtaaatgtaacacagtcgaggcacgtcatcgggcagccttccctgtgtgccaacgccagccttcgcttctgaaaaccaaactccagccgctgccagtcgggacttggtcgcccggcgctgccagaatgctccactgccagccggcccccctgcctcggtttcccttctgtttagtggcgacacaggcacccagctttggggtggtgctgacgctcccaggggtgccaggagccactgggacagggtgaggctcccagacgctcctcgaggtgcccagctctccagggagcttctggcccaaggccgtctgagggatctgctccttaaccccccagtgccttggcgagggcaggttccaagccacagacgcctgccccgagtggactctgcggccagtccctggtgccctcctggccctgctgcccagtgagggctcctacgggtgggttcattggcctgggcccagcgagcccccacctgcattgaccttaggcccatagagagggcctgtcccggtgctgccccagccaggatctggtcgctgccccagggggactgatgggcagagtcgcccctgtggctggactgtgaccatccctgatggggcctgaccgcgggagctgaggaagcgccgctccaccgtctgccctccaaggacccgcatggaggcagtgggctggcagcttcctgctgctccctgtcagagtcaaagcacaaatcctcaggacgggctcaagggccagggcagccgagggaagctccaggtggggaccacgtcttcctgaggttggtgcccactggctgggaccctttgcagtggggtggcctcccctctgtctgcctggtggagggagccgtgggcgtggggacgtgactgaataaagccaccatgggtggatgtgcttgg

SEQ ID NO: 8465 - DNA, 1041 bp, Homo sapiens
gtgcctggtggtgctagctcctcccacctcagcacctgctgcatctggagcagcccaagcctcaggatggacaagaggaaacccacagctcagcttcaggcttcttatgtttctgaaaacagcttggatattttaatgcacgttgcattaaacctcactgaaacctgctccgtgcccggatgttgatcatgctggtggcttggttactgtgactgtagctggagtggcacaggtgacccaggcgtcctttcagctccagaatgttgcaagtctaggagagtgttccaatggctgacagaaactgcctatttgaaatggctcataagtagtatctgcagtgtgttcatccgttgctgccttaacaagtcacccacacgtagtggcttaaagcaacgaacattcactctctcacagtctgtgtcagtcggggatttgggagtgatgtatctgggtggttgtggcccagagtctctcatgaggttgcagttaagacatcagccaaggccacttcgtctgaggaaggctcaactggggctggagccacttccaagccagtgccctcacgtggctgtcggtgacagccacagttccttcccatgggggcccctacacgaagctgcttgagcatcctcacggcatggcctctgccttccccagagcaggtgaaccaagggagaggaaggagcaagccacagtgcttctatgagccaccctgagaagtctcacgtgatcacttccgccacagcctgtttatcaaaagcaagccccccaggcccagcccacgtgcagagggaggagaatgaggttctgtgttttgaagggaagaatatcagaattggtagacatttcaaactgtcacattagggatacaaaaatgaacaggctgggagtggtggctcagcctacaatcccaacactttgggaggctgaggaaggggcatcacttgaaccaggagttcagtactaacctgggcaacaaagaggcccctgtctctgataaaaagaaaaaaaatgaaaaaataaaaatgaacaggtataaaa

SEQ ID NO: 8466 - DNA, 2411 bp, Homo sapiens
aaggtatgcctccgtgggacgagccacccgctttcagccctgtgctctggccccagaacggccactcgagaccccgggcttcatccacatccacacctcacacacctgttgtcagcatcgagccaacaccaacctgacaaggttcggagtgatgggggcggccaaggtgacactgggtccaggagctccctggggccctggcctaccactcactggcctcgctccccctgtccccgaatctcagccaccgtgtcactctgtgacctgtcccatggatcctgaaactgcatcttggccctgttgcctgggctgacaggagcattttttttttttccagtaaacaaaacctgaaagcaagcaacaaaacatacactttgtcagagaagaaaaaaatgccttaactataaaaagcggagaaatggaaacatatcactcaagggggatgctgtggaaacctggcttattcttctaaagccaccagcaaattgtgcctaagcgaaatattttttttaaggaaaataaaaacattagttacaagattttttttttcttaatgtagatgaaaattagcaaggatgctgcctttggtctctggtttttttaagctttttttgcatatgttttgtaagcaacaaatttttttgtataaaagtcccgtgtctctcgctatttctgctgctgttcctagactgagcattgcatttcttgatcaaccagatgattaaacgttgtattaaaaagaccccgtgtaaacctgagcccccccgtccccccccccccccggaagccactgcacacagacagaacggggacaggcggcgggtcttttgtttttttgatgttgggggttctcttggttttgtcatgtggaaagtgatgcgtgggcgttccctgatgaaggcaccttggggcttccctgccgcatcctctcccctcaggaaggggactgacctgggcttgggggaagggacgtcagcaaggtggctctgaccctcccaggtgactctgccaagcagctgtggcccccagggctaccctacacaacgccctccccaggcccccctaagctgctctcccttggaacctgcacagctctctgaaatggggcattttgttgggaccagtgacccctggcatggggaccacaccctggagcccggtgctggggacctcctggacaccctgtccttcactcctttgccccagggacccaggctcatgctctgaactctggctgagaggatgctgctcaggagccagcacaggacaccccccaccccaccccaccatgtccccattacaccagagggccatcgtgacgtagacaggatgccaggggcctggccagcctcccccaatgctggggagcatccctgggcctggggccacacctgctgccctccctctgtgtggtccaagggcaagagtggctggagccgggggactgtgctggtctgagccccacgaaggccttgggctgtgcgtccgaccctgctgcagaaccagcagggtgtcccctcgggcccatctgtgtcccatgtcccagcacccaggcctctctccaggtctccttttctggtcttttgccatgagggtaaccagctcttcccagctggctggggactgtcttgggtttaaaactgcaagtctcctaccctgggatcccatccagttccacacgaactagggcagtggtcactgtggcacccaggtgtgggcctggctagctgggggccttcatgtgcccttcatgcccctccctgcattgaggccttgtggacccctgggctggctgtgttcatccccgctgcaggtcgggcgtctccccccgtgccactcctgagactcccaccgttacccccaggagatcctggactgcctgactcccctccccagactggcttgggagcctgggccccatggtagatgcaagggaaacctcaaggccagctcaatgcctggtatctgcccccagtccaggccaggcggaggggaggggctgtccggctgcctctcccttctcggtggcttcccctacgccctgggagtttgatctcttaagggaacttgcctctccctcttgttttgctcctggccctgcccctaggtctgggtgggcagtggccccatagcctctggaactgtgcgttctgcatagaattcaaacgagattcacccagcgcgaggaggaagaaacagcagttcctgggaaccacaattatggggggtggggggtgtgatctgagtgcctcaagatggttttcaaaaaaatttttttaaagaaaataattgtatacgtgtcaacacagctggctggatgattgggactttaaaacgaccctctttcaggtggattcagagacctgtcctgtatataacagcactgtagcaataaacgtgacattttataa

SEQ ID NO: 8467 - DNA, 951 bp, Homo sapiens
cacctcaggaagatgtccttcctggggaagaagaagcaccagccacaggggcaggtgtcctcccaggaagtacagctcccccctacacctagctcatcattttctatggatagacaatccgctcttcatccagaaaaccaacctgccctccccaaatatgtgctcaccagcagcaacaggctatctgagtctttccaagagcaattgccaagggcacaggagaggtcattgtcacccaagcagaggccaccttctcctgagaagttgctgttgaccaaggagaggtcacattcttttcaggagaaatcactgttgcacagagaaagccagctgtcgtcatttgagagccagccacagcctctggggagccagtcatttctttcaggccagctgacgttggagagccagccagactcctcggaggagaagtcagcatttttgaagccctccacaccgttccggaagagctggcaaaaggagcctcacacccccaaggaggggacggtgccacttccagacaagacccacaaatctcaggtggagactctgccaccaagtctggaagaatcgtccacgtccacgagcgagcagcctatggaggtggagctgtggcccgcggagaagcagtcatcatcatccatggagtggctgctggtgcccggggaggagcagctatccttgcccccagaggagcagtcattgccctctgcggaggggaccagggttcagcagtgacgtagcatctgaatccctagacccatctgatgaagaggcatcttcgagcccaaaggagtcacgctggcatatcaggaagatgtccttcctgggaagaagaagctccagccagttctgctgcaagtcaaccagcatgcagggggccttcctctaaagacaaggactccacatgcttttctttttctaataaaccagggtccatctgaccccagcgct

SEQ ID NO: 8468 - DNA, 820 bp, Homo sapiens
cgcctgcccgcctcccacccgcctctcctgccgtcccgctggtccttagccccatgcctcttccaaaacagtgcaataaatctccggtaacccgtccacctggccgaggcagcccagagcagcgggatgagctggcggccagagaacgcccagcccagcccacccccgctcacgtcctgccgcacccctccgccggtccccaccctctgccccccagccctctggcgtctctagaaactgctgctgatggagaccaggacagagcccgcccccacccggcccgcagcccctcctgcccctcctgccaggccctccctcccgggtggtggccggcacctctgctcctcacgtgggtcgcggggcgggcttgtcccaggtttgtttgagacagtctttttttattttgtattgttatttttattatttttaatttaaacctgatgacttgcacagcatctttcccaccgggaagagcgggcctgctgccttccctcctgcggggtgggggtgggacagaccccagtgggggccagggccacactcagcgcagtgtgggctggacccgcctctgtgctccaggggctggccggtcttcgggggcgccggcttccaccactcgccgccccacccctgcactccgtgacctctgagaacccagctggcccctcgttagccccagggtctgccgtctagagggagcccaccggcctccggacactgtcttcccgctagagccccgtcctcctctgcggggctctccggacccccttccccctcacctccaggcagggacagaataaatgtttgtatggattttaga

SEQ ID NO: 8469 - DNA, 2059 bp, Homo sapiens
ggccctcgtgcagcccaccctgaccgccaggatgcttctgccatccaggggtgtagtgaggacccacggggagcctgggccccttccagccgtgggcaaaccctgaagacacccctgcccccctccagagagtgaggagggggcctgagactggacctgggtctgcctgacctcagaggtggctctcaggatgggtgacgggggcttgtgtctgtaaatagccatgatactaactttcttcccatctgtgcaacggggcccccccagggcagctaggaggtcctcccctctcctctccaccaccccctgctgcccccctcccggggtggggtttgggggggtggagtggacttctgggagccggcccggggaaagcaccccctgccccatccctgcagattgggatgaagtgttcagacagccatagaggagtcgggggttgacacggcccctgcctctccccaccccacccccaccccaccgaaagccatgggagtagttcagggaaatgggggtgcagcccagccaccccccattcgggtactcaatctcaggtgtccacaagttctgcccacggtaggggctgcctggccccccagacctcgggggtagagccaggagtggggcagcgttaggatgcccggaggggctccaggtgttgcttctgagacctgggatggggagggaggggacctctgggttcttccaaagaacatttgactcagtggggtcgggagggaatcctggcttatttattttcctctgtcctcgggtgtgggggccctagctcgccctctctgggtgggtgggtgagagaggctgcaggggaggctggcaccgggcttgggcctccagtccctgccttgctgactttggccgttgcggtatcacgtgacaatcaactctcccttaacgacgactgcggctgttgggctgcgctgccctccctggcctgcaggtggggccgtggagcccatgcccgccggggttgcaggctcttccgggcctgggctgcagcctggcccggccctgcttccctggcctcccctccttctcctgggtgcttggaagaggtgggtcctggcccgtggttgaggtcttgcctcgtggactggaagcagagggctggctgtgcagcctcctggggtagctcgttttttttgcaccgggtagaatattttttcaggcacggattcctttttttctgggcccccatgggtggtccggcatcctcagggggtgtgagtgtgtgtggggggtctctgagctgaacttgggtggggtggggacttgttcctcgggggccacctttgtgtccttgtcagcggtcgtcctgctgtggcctgggttgcatttcctcttggggggggtattgaggacccccagcctggaatgagaagggtccccggttccatgtcagacccagaaaggtggatccccccactgttggctgcaggaggtttttggtacccccttttgttccagaaccgtcctgcctctcgcttggggacaggggggctttggatggcactggtgtgcacctggacccagccccggcctggcaggatccagggatgggtgcctgggatcctggggggagggaggcaggggacgcccttctggagctgggctcggagggtcctgccccatccagccctcggctctctgtgttctctgtccctagcctcaaaccctcttctggcagcgctagtgagatgccttagtctgtgggggtgggtgggggactggggccccgttttcctttgtgagtcttggttggccccagccctggcaggggcctgtctggagcaggggtaggtagggctgtgggttccagaactctataactgggcccctctccagtgtccaggggcttggagagacctgcgcccacccctccactctcccaggagtcgctgatcactgggacctggttccagccgtttgcaggggaggcggctccgagaggcgtgtgctttccgtgggtggcgcccctcccccgccctgcctggcctcatccttgtatttaattaattaaacaagcccctttttaaaccct

SEQ ID NO: 8470 - DNA, 223 bp, Homo sapiens
cggcggccccaaccggccggacctcagcaataaggcggcccccggacctcaccccgcgccggcccccacccaggggctgcatgtggaccccccgggcggcccaggggaccccgccccgacccaggggctgtggacgatgtacaggcaacagagctacgcactcctttccttttggaagcaagaagaaaatacgtgaaaacggaaattaaagatttaaaatttt

SEQ ID NO: 8471 - DNA, 350 bp, Homo sapiens
tgatccccacgagggctgcagagtgaagggcacagcagggttcggcctaactccccggggagccctaggcgagagggcttggtcctggggagctgcccaggtcttctatatcccctggcctccatccagtcccgcacgactcagctcctggccctgtgcaccgggcgacgcctgctaggcgcatgaccctcagagtcaggcctgtactcacctcagcatctatcaagggccttcaaggatcgggtttttttaatcatcgtcaaatatatcgttactaaaaagatacgtacactttgggaggccgaggtgggaagatcacttgaggtcaggagtttgagaccatcctggac

SEQ ID NO: 8472 - DNA, 1040 bp, Homo sapiens
gctgcccgacaccgacaccgccctccctccgtggggatagccgcagccccaggccatcatctgctgctggggcccccccaccacgcggtgccaggcccagtgtcccccaggccgtctgtccactccatgccacctttctcagcatcaggacggggttgccctgtgttcaccacgagtgtggctgctggatcagggcagccggggaggtggccaggccagtggccaggccctgtggagacaatccctcaggactagggacagggctgtgccggcctgggccagggcccacggacccgcagctcagggcgcctgcccacgtcgtctgccggcggtgcgccgcgggcgtccctcgcgtctcttcactgcacattgcaatgcatttgcgattcccatttctctgctaggagccagcctgggtggcgctgctcccagagccgtgggtcccagaccttgcgttccttttgttcctgtccgtttatcaggacacgggccccacctgtcacgtgcccgaggccacccaagcccagcctgcggggcgttcccactgcctggatgccggcttgagttctgcgcacgcaggattcagtgtggggacggcccctgccggataggcctagccctggcccaggtggtgagcggtttgcagtgtccgttctcatccacctgatgggcccagataaaggcccccgctgtccagcctccctggacggccctcgcggtccctgcagcccaagatgggactcagaccctgtgccccagagctcccctgccgcagaatggggccccagccggccccgaccgggtccaggagcactgctcgcctgtacatactgttgccctagcccacctggtgccgtgggagccacccccaggtgctgggggcacagcccctccccactccggccacgcccccacccaccccgcgtgtttctgccctgtgactcctggaacctgcgtcctccccaaagccatgggaggggtgtcctcctcagaccatgcccccagatgatttttttaaataaagaaacaaatgcacctgc

SEQ ID NO: 8473 - DNA, 2142 bp, Homo sapiens
ccctcccatctcccctctgtacataggtcacccgtcccccaatcaaatctaaaggttttttaagctatcgccagccggtgtccagcgggctgcccctcctctgcctggattcccaggcactaagctcagctgaggggggtgttttatagaaggtttttgcttttgggttttttttttcctgtttccacccctccccgttattttttcctttggatggttaaaagcattgcaggcacccgggaaggtgagcagagggtaggtgggtgggcttgtcccctccccggtcccccgccctgctcacctctactatgaaggtgcccccaggtcacctgtgctgcccgccatctgcccacgtggcttgcagtgactcaggagagcaggcccacagcgtttgccatcttgcagagctggggaggggcacaggaccctgccctcgtgttccctcccagcccgcagtatttcagggacaggctcttcccctctatccctcaccctgagagcacccctggtggcttggttggggaagggaggggctgcctgtctctggaggtgtcaggcaggcaggtggcaggcagctcacccacccaccccatgggatcccccagcccttcacccgcgcctgccttgtccccatgatagttgacaatcggggcttcctgcaaggcccgtctgtctgtccaggactcctggtggccagattcggcctccgaccttgaccttaaactgcagctgaccccaggggctcgccgctgcccctcccctccacaccaaggcctgagacagcaggagccccgcctggcccgaagccgtttccaccgcagcaggcagaggggctggacaggcactgtcagccaatgtggggggtcctgaagacacccccttggggcacccgagtgccccttctcagggctcagtctgaccgtagccacgtcctgcctcgcgccgcccctcgggcctgacctggaagctccgtcagctccgtccttgtccttagagctgagcccagaccccggggtctggccgaatcctcacccccagggcagtgtttttggtctgccaccttcaggaaaacggctgcggcctcggcctcccttcgggcacccaggaatgcgggggtctgctcagtccccccaccctccatgctccaacccccgggggctgcggagcctgctgccccctccccgcgggtggggacgttctatgcaatacagggttccactttagaagtgcgcgcggctagggtcaccgcccgcccttcccggcgcagcccccgagctccacagctggggcagcccctctggcttctaaatccgcggtcgggattcttcctcctgtttagttttttagtttttccttaaaaaaaaacaacacatcgatggactttgcttccctgttcttgaagaatacttgaatgtcggggggcctgggggtgggggcctcggagaccgtctgcctggccctgctgcccctcctgaatctcgtatgatggtcacagtccggtggccgtgggggtgctctgccttccctggtccccactgcccatatctgtggactgccccttccaaagacccctggggggggtggggcattccgcccacccctttcccccatcacttctcgcctgtcagtgattccatgtttcgtaacgggggattctctgcctttttgtatcaaagaacaagcaaatggacccccgcccgctgcaggcgcccatagccatcgggtctctaaagctgagtggctagcagcgtttgtttgtttgtttttttttttttttctgaaggtgggacagtcacttcctcctccctccccacccctgtcgcatccacgtgcgacctggaggactggtcagaaccgttactgtgaatgagtgaagatcctggaggaccctgggccccaggccagctcccatcgctgggggacggtgaacggccatgtgttaatgttacgatgtttttaaaagacaaaaaaaaaaaaaaaacctcaaaagtttttttaaagtgggggaaaaacatccaagcactttaattccaatgtaccaggtgaactgacggagctcagaagttttcctttacaccaactgtcaatgccggaattttgtattctgttttgtaaagatttaataaaagtcaaaaaacttgc

SEQ ID NO: 8474 - DNA, 2357 bp, Homo sapiens
gagccccgcgggtctcccggtgcccgaaccgccgctggggcctcggagacttggaggaggacgctctggaaccatcatcccgcttctctccggcctgagcatctcagggagaccaggggccgagccgctgagcaggtgttggtcctcaggagctccaaccccggacggcagatgccttcctcagtctcgagcctcagtctcccgtctgggactaaaacgtgaactctgtaattctatgtgttactagcaaccggaaaagcccactgtgtttttaaaccacttccactttccaggaggctggatggcttccagggtcactccttgccctgggtggctcccaggctcctggaacttctgcctccacctcgctggggagcccccagggctgctgtggccacagccctgcctgggcctgtctctcaagggcacccagcttgctcggcctcctacatgtctcccgttggggaggcaagaggctgaggggcttccgagcccctgagagcggacatctcctcccgcaggcctttactccgcactccccactggcagccgctggtgtctcttcacacagaggcacaacctggacccaggcagcctctttcctccctccccaatctcttccatttttctacagatttttttttttttggtcatactagagacaggggtctcgctgaactcctggcctccagtgatcctccatcctcggcctcccaaagtgctggaatcacaggggtgagccaccgcacccagccctctctcttcctcaatgcactctgcttcttccgttcttccgaaacattcagctgactgtatccagggcttcctggactcctgggaccccacgtcctgcaccccggcttctgactcatttcctaagggcccctttgtgtatcataaagggtttgatttttatagtcacatttacaaccatcttgagatttttattttttttgaacggagtctcccactgtcgcccagactggagtccagtggcacaatctcggctcactgcatcctccacctcctgggttcaagtgattctcctgcttcagcctcccaagtagctgggattacaggtgtgcgccaccacgcccaggaaattattgtagttttagtagagacaagatttcaccatgttggccaggctggtctcaaactcctgacttcaggtgatccgcctaccttggcctccaaaagtgctgggattacaggcatgagctactgcacccggcctaaccaggctggagtgcagtggtgggatctcggctcactgcaagctccgcctcccagattcacgccattctcctgcctcagcctccccagcagctgggactacaggcacccaccgtcacacccggctaatttttttgtattttagtagagacagggtttcaccgtgttagccaggatggtcttgatctcctgaccttgtgatccaccagcctcagcctcccaaagtgctgggattacaggcgtgagccactgtgcccggccaagaatttttttatcgataacatagtgagctctctgcctcttcggaacgatgtccactttgcttatgatcaacccaagcaggactcttctctccctggacgcctctcccctggtctggaatcttccagttctgccagaattggcctttcccagatgctgcaaacttccagttgaacccctttttctgtgtggcccctggggctgcgagaccaaaatccatgagttctgtgtaccctagacctttggaaggtgagagcagggccctgagaaaaggcagccacctcctctccctggctgaacccctgccaccctactcctcaccagaattgtcagtggcctttcaccacagtggtccttcctgcctgagccctgcactgtcccagaccacacagaagtctggtcacctctgggcgcctgggatggtcaccgaagagaagcacgctgtccccgtctctcctggcttctgccagaaaatcgaacaagtgcaattaacacactgttactgccgaagcctgaaactcccaggacttgtccttgatccttccagaaaccaccaggtccggcacttggagccccccggagagggacctcccagccgagccctcaaagaactccatgaaatcaggaactgcttgatgaaatgtatctccttgtacctggaagatgaagcccaaacacccacacctctgtctcccccagggctcgggatgtctccagcagcccggccacgcagcttcccaggtgggctcggggaggtgggagcagggaccatctctgtcccctccaccctcactccatccacctcggagaccaccctcccccagccagatacggaataaaactacagacgcagacgtcgg

SEQ ID NO: 8475 - DNA, 1178 bp, Homo sapiens
gagctgcctgcgagccccgcaccaccccgcggagcacgtacccagggaccgcagccctgacgtgtctcgcctctcctcagtcgtgtgtactgtacccaagcctgagtgttaatttaactctatgttgtccgccgtgtagacatccgaggtcatttgttgcgttgaattatctgaccatccttttttactgtgactcttcccattctctttggcaagaagtccccttctcgcccccaaaccagcaagggactcccccacctgggtctgtgccctgccccgcgctgggggccgagtccttgaatgtggcttcaggggctcctgtcctgggccagggcctgatgggcaccacgtgaggggcacttggtggacagggcggggctgacgtggcctcctctggggtcgcctgcttttgacccaaaggtcctgacggttgcgtccgggggaggggaaggaagggccgctgtcgccaaggttttctctcccagaacccacagtgggaaagcggtcttgccaggcgttgtccattgtcagtgtgctcgtgggctggtgactgggtcttgggatcccaggccacgcgccagccaggctgtgggcagggcggggccagggacgccaaagagaggttgcagtcagaaccgtggacggggtgggttgaggcctctctgccacccgtcttcctggtcagcagaagtgcatctcggcttgggtttggggtggtccgcatcccctgcttgccactatgcgcaccaaggtttccccacatccttcccagcacccttaggaaggcccaggcagggcctggaagcagcggacctgggctgttctgtgttgaaggagtgtgcccagtgcccttgggcaggacctgtgagagccacctcacaggcagagcccccaccaggcagggcaaggagactccgctcactccccacggccagcgtgggcacaggactgacccttcttcagagataatgacattttatcttctccttttgatgaaaactgtcactttagcatgtaatccattacagaatcccatgcagtgattccaggatttgaaattgtatgatgtgttacataagaatttatttgctatcgacattcccgtataaagagagagacatatcacgctgctgtcatgattttgtgtcaagatgatccaataaagttgtaaaacaggc

SEQ ID NO: 8476 - DNA, 1324 bp, Homo sapiens
ccggcgagcgcgggccaccccaccctgttcatttccataaacgtgctttgagaggcggggtccgcatgtacgtactgcctgcccggggcttaggagggtggcaccggtgctgggacacacgggactgtgtcctcgccaccccccgccctgccccctgccagccagtgcagcttggatctcgggggtgtggggccctgtgccttcctgaagtgctggcagcccagtggcacctccttcaggcctttggggtattcccctagtgtgcccaagtcagcctcatattctgggcggacagcttgtctggacttcggagttgggggtggtcagacaccacaggagctgtcacctcctgcggatgggcaaataaattggtggaggacggagagaaacctctttatttccctcctgaggggtctctgggaagaggtgacgcgtgtccctggaaccccagctcggagggtctcagcctcccctgggttgggagaagtccatctttccccttagtgccaccgggctgctgagtcacgaggaatgtgttgctgctgccacccctgccccaaaggctaagggggacagccttccccttgtcagggcttgctttgaccctgcttcgttccaccccgggtcctggtggagcaccaggcaggtggtcctcgctgtgacactgaggtgctgagccagtgagctagggtggaggggctgtgtttattggaacaaagggtggtaccaaaatgcatccccatgacccacagcccccccacacccgtccttgggtagggtacggtggggtggggtgttgggtggcctgctgctcctgttgctttcacgtagagtctcggcctgggcagtcacgtggtggtcactcctggatgtgctgtcctatccagcctctcacagctgccacccgggtatagacacctgggaagtggggccggccacagccatagccccagctagtgaccccagttagcacccaccgtccagagggctccctgcaggccaggggtcccccagcgtcaccctgttggggagagaagaaagggggttcagaggccggtacctcccctacagcagcccttgggtcattggcccctctaggagtgaccctagtgacttcccctgggagccgcattttcactatctggaaaatgggctcaatgcaaaggtggcagacatttatggacacccgccacgtggtcccggagtggaacggtgcctcccactgcagcctctgcctgctctgccgccgaggcccggggatgggatgcggtgggttgcccaataaacggctgtggagtggaaattcctccagagccaaaaaggc

SEQ ID NO: 8477 - DNA, 684 bp, Homo sapiens
gcgcagggcacggtggtcagcgtgcagcgggacgggactggccctgcccagccatgaatcgcttggccatgcctggatctgttttgttttggtttttggtttttgggtcagggtttcactgtgttgcccaggctagagtgcagtggtgccacagctcactgtgaccttgaccttctggactcaagtgatcctcctgcctcagcttcccaagtagcggggatcacaggcatgagccgccacacccggccatcacacctggattttcagtgggaggtttttggtttggagacatccaaagcctgaagccaggtgggtgtgggcaggggctgcattttatgaaactgcccagcaagctgcgctccctggggccccaggatccacctaactggcctggcacctggtgccacgtgctgctgccgccaggatatgcgccttcccacaggtgccctgcctgagttgtgtgcatccaggggcctggtgagcccccaggctggtggcatggcccccctgccccgtgctgaatgaatgtacagagccagacaaagctgtgaatggcctaggggctgagtcccacaccagctgtgaattctcctgcagacaggagggccctggctgtgcacctggggaagtggttgccctggggccagggtgcttgttctgttcaaataaaggtacctcttttcc

SEQ ID NO: 8478 - DNA, 76 bp, Homo sapiens
gccggccccgcgccggagtccaggggccccttctggacgccccgcgactctggcgaaataaagcgagtgctgcggc

SEQ ID NO: 8479 - DNA, 1048 bp, Homo sapiens
ccccaacccagggcgaacacacctggtccaggcctgcccaggaggcagggctggggctgaggtcagcgtctccatgatagccaagacaccctcttcctgcagagtccaggagcgcagcagagagagcaatgccccactccagagcctcccctcccgtgctggggatgtgggtcaagggcttcccaggaatgcagctgcccctccagggctgggggctggccagcgcctcctgtgttgggcagcagctctctgaagccagggcccccacgccacttccaggtgtggacaaccccgctgatcaatgtctctctgtgttctgccttccccagcagccagggcgctcttccgcgtgggttctgtcattgtctccatgagaggccaatgccgggaccagaggcattcctggctctggagcacccccttgtgctgaagatggccagtgattttgggcatgtgaatgcccctgtccctggtggagaattgcttggtggtgtcacgggaagggaaggctccctgggaccttagacacccagctcatctcagcggggtctggactcaccttccctaaaacagtccccgcggttccctgccacctcccctcaatccctctgcgcccaccctgcctccctccctgttcctccgtgacacaccaacttctttcgcgcccccaagcatttgtgtaggctgttccctctgccatactgttccagttccactttctttttcttttttttttttttttttttttgagacgatctcggcttactgcaagctccgcctcccgggttcacgccattctcctgcctcagcctcccgagtagctgggactacaggcgcccgccaccacgcccggctaattttttgtatttttagtagagacggggtttctccgtgttagccaggatggtctccatctcctgacctcgtgatccgtccgcctcggcctcccaaagtgctgggattacaggcgtgagccaccgcgcccggctacagtttcactttctctaaacaaataaaggtgcccactctgggccatcgctagctcctt

SEQ ID NO: 8480 - DNA, 157 bp, Homo sapiens
cctggccgggggcgcggggggtgcagggcaggcccgagcagctcggtttcccgcggacttggctgctgctcccaccgcagtaccgcctcctggaacggaagcattttcctttttgtataggttgaatttttgttttcttaataaaattgcaaacctc

SEQ ID NO: 8481 - DNA, 2744 bp, Homo sapiens
acccacactcctcatccacacacctttctttacccagagccactgaaaactatttttatatcattggctttctttagttcttgatacatttctagagaatttctaagcgaactgccagaacgtgtgggtgggtctcccccagccctccctcctggcgggtctcctccagcctcacttcgctgccacttcgccgctgccccggagacttttcaatcccaccccactcctcatctcaccatttggtcaaattggaagcccagggccaggacccggaggtttagaagatgcttgggcttggagggaggagggccggcgaggctagcgaggggacaggagacggccctgctgcggacggagcgcggaaactgcgtaggaattcagtggtggtgggtttttttaaggctttctacaaaaccaaattcagaatccaggcgtcgacctggtggggcccggggccaagcctgcattctggctgcccagcttcggacagcgggaactcctcaggcagccacgcagcgggtgtgggccagcatggggatggcgtggcccccagggcgggttttcactccgctgcctgggcttccagattcccgttctggcagcgcaccggccgggtttctcggaccgttgactttatttgggggagttttcccgcagttcagttcctgactgtgcaaggccaacagggcaggggaggggaagacctggggaaggaagaatgaggacagtcccgtcgtaagacctgtcacaacaataagcagggaggggagatgtggaggggacacatctggttgccttggaggcagaagctgtgagtttcagaacagctgtctgcagggaacgccaccatgttgaccctctggaggagagcgctgtggagcccctcccgtgttccagctccgtctgccctgtgcctatatatacacatgcgtctatccatactgtgcttttatctgtgattttctcgctgaaaccatgtttctcagacaggccaaggccacctgactcctatcacgacgcacccaagcccctcagtccagcttcccaatgcctggcaccccccttcggcaatagctcaccgtttacaccctccctcatagatacacagaagttatttttttaatggatatttatttttttacattggtcagtacacaggtcaggagctcacgccagggccttgaggacaggctgaccctcctccccggggtggcgtggggctggggcaccctccgacggcagagcctccttcagaaagtgcagctcaagtcttaaagacaccaaaactgagccatgggcacgcgccgtctccgggccatggcgttcactgcagggcgggggcggcaccgctcccctgtgactgcatcccgcctccctggggacctgcctgtggcaggaaggaatggggggccccagccccaggccgggaaggagccagcggccgacaaagcagaaacacccgctgctccacgtagcccctgctcgctgtccttgctctcagaagtcccggtcccatgtagatagaggggggcgcatcttaccaaagcatttcctcctggaggctacgccgctgtgctcccagtcaggcggctggtagggagctttgcctgccccggggataccctctgccagccgctggaagtgggaatgctggcgacagactgtgtcctctttcccaccttcatagcaggaatcacccggacccgactggctgggcttcgtgctagcgagggttctgggggtgggtcttggtgatcttgtcctatggggagtctgcagtggtctcagccacatcctatgtattttggctctggaggagcaaagctgtatcctggagttggtctgtgatttgccgacagccttgcaggctgggctcagggacaaagtcccccccaaaacccgcaggtcctcatgtccagacgctgcccagtcctgtcctgaaaacagcacgccccaggcccacagaaccccccaccctacatttgccttgggtggagctgggggtggtcctaggactgcgggtgcccttagctgaagggggtggggagaagcgtggactgggcagcctgtgggtaattggaggttcattgagaattgagtctttggaaacactaagaaaatcaaatttttaaaagttatttatggcctgggaaacaatttgcatttgtccccaaatacgcttagctgtgtgccgcttagaacgatgcgaaaccatccctctgtgtaagcccgtgccgtgtgactcgaagcctagcgccctccctgcgaagcatcagacgccacccagccctggggggaggcccacgcctgctggaccaacgcgggttctggggtgcacagcgccaggttaacgctgaagcctgccccgctgagcccaggagccgggaggcctgcgggctgacccagaatccgatcatgcacctgtcctcatgccagcggctttggctggggttggtctgaagcctgcacgcggcagttctttgttaaagatctgagggactcctcagtcctggggcgtcgccgcctgcagcctcttccaagccctgcgtccagcgagcgtcacagcacaacctgcaaaaacggagctgggctgcagctggggctggcatggactttcatttcagagattcggtttttaagaagatgcatgcctaatgtgttcttttttttttccaatgatttgtaatatacattttatgactggaaacttttttgtacaacactccaataaacattttgatttt

SEQ ID NO: 8482 - DNA, 3802 bp, Homo sapiens
ctgtgttctcatatgttctctctctctctctctctttctctctctctctctctgtctctgtctctgtctcaggcagggcatcattcagtaattagctcaaacaaaacatctcaagtccccaaaacctttaattccaaaagaaatcccccctctccccgccaaaaaaggcgttcccaccgcccggatggggtagaatggaccttgtaggtggagatgaattttcaggtccgaccccatggccctctcagtttgggccaaaagggatggaggctttacggccacttcccgttcggaataactgaaatcccccagcgatggggtaacaattttttaaaactctcgattgccgtttcaattgtggaccggcgccgagggggaaagggaggtgacttcgcccggtggcaatagttccgggagaattggccattggtaaaaagacttcatagggtcactggaatgctttgtgttgtttttaagtagaggtaaaattgagatggggggcgggaggtgacatcatgaagttttttggaaatatctctttatttaaaaaattgttactccatacggctaaactcggattgtgatggttgaacccgtcgctaaactgcacgatcctgcaatgaatgcacgatggagtgtgggggtctggagggggcttcgtctatgaaaagttgccaagtgtgactcccctgcatgatgttagccatgggtcctttctgcagggtcccctctgtgccagaaatgggttttcgggacttgccccagggaagccgtcaccggcccggcccatcatgtttttggattttttttttttttctttttttgagatggagtttcattcttgttacccaggctggagtgcagctgcatgatttcagctcaccgcaacctctgcctccccggttcaagcgattctcctgcctcagcctcccgagtagctgagactacaggcgtgtgccactacgcccggctaattgttgtatttttagtagagacggggtttcaccgtattggccaggccgctctcaaactcctgacctcgggatccgcccacctcggcctcccaaagtgctgggattacaggcatgagccaccgcgcccagtgtgttttaagcatgaggcatccgcgtggctgggagaggctttgaccatccttggctcttccaggttgtcctaccctctggcatccaccatagacgtttttcaaacagaaaatgcaggctggggagccgcggcagggcgggtggggctaccctgtgctgctgtgtgtacaaaattgttccatgatcttggagtgactctgaaggactctgggaggtgagacgttgtcccggagatcaaaacgtccgctcaaaacgttaccctgtcgctcgaacccgatctttttgcttttccacccccgtgcaacccaggacggctgtctgaggccgggagatgccttagacgcaggatgggccactcctcccagcggcaagtggaaatcgaagatgtcatggggtcggggggaggcttctgaaagatgactgcgtcctcctctgcggcacggacgggagcaggtgcagccacatcttccagggcctgccggcatcacctgcggccacacctgagatggaccccacgcagccctgatcgcaggaggcctggccgccccgaccccctccacggggctggcctagaagcaagtagtagaataaaactagcctagtcctgtccctccggccccagtggagacaggcgtctaagaacccgtgccgagagggttcctggacggccgcccaggtcctccgtgcaggcccgtgaggcggggatccctgcttggctcacttcctgagctggtgactgccagggttcccacctcgccaaggctagagggctccgggtgtgtgtgcaggtgtcgggggagtgacctccactcctcaacctcgggcagctcccacaggccacagccgggctccccacccccggcacccagctctctacggcaggtccgggagggctggggcttcggggagccctacccgccaaacctgctgttggcccgggagagccccagaggctcccggagactgcagcctcctgtggttgggctgggagccggcagggtttggggtgtgggcgtccccaccacgcatagcaggaatggcaggaagggacaaaagcctgttccagagaccctgggaggaccccaggcagggagagcccgcctgcctccaccctttccaacaagccatcttggtaactgggaacaaacacaccccaccccgtttttccttaaaagaggccttaatccccgagcccccgctgccagggcagagggaggagggggcacagctgtgccaagcccggccccactggtgtgtcctcacaatgtgaccccagaaatgccagcagggaacggaggctgctgcagagacgcagccccaggcagccggggctcctaggctggtgcagatggtggggttaaacgggctgagcgttccaggtaaactgaggctcggggaggggaaggacaggctggcctctccttcactgtccacagggccttgggttccctgagctgtccagaccccaccatctcccggaccccagggaggtggccattgccagaagcctgtgggtttctttctagcttgggggattaaaaaaaaaattctccacttttttttttcttgagtagacttcagtgaccacactgtggaaaatacctttgcagacgtggcacccgagtgcacacaccgaccgccacatgtgcttttctgccgggaatccctggggtgaacgcatgttttatgggcgtttccaggagcgcgcgtgcacctccagacggggagctggcgggcgggggtggcagcagcagctctagccttggggggacaagcctctctcagctacgccaggggaaaagagagttaaggacactcacccccacccacgcacacacacaaggcagcgtcgggtgggagagagaaggccgtttctccttctgtagcctgggtctcccacgggccttccccgctgctgagcgagacaccagtagccaggtgaagggccacagcgggccaggccccgaccctgttgtgacccacctgggcaccttcccggaccagctccgcctcccctgccctcctctctccaggaaggagccagaaccctcacccctctcccaccctccccaggggtaaccccaggccaagcacagatagctcagctgcgacctctggcctctggggacataaacggggcggctgggccagggcggaaggtgctcctgtttccctccttctgcgtggtccctttgacgggccggccaccgtgtccgaggcgcaacgctaggcctccaggccacgcatccatctccaagttaacagcccgtcctgcccaagttctggggcaggtaggagagggccgtcacacacctgtccgcccgtgagtgacccgggggggcttccgggtggaggtggagccaccacgcccttcctcaaggggtcacttattaaaaagtccacggcctgaggccaggccctctgcacagaagccatatgccggccagccgcgcctcctcctctgtccacggaaccgctgcccatctaaccttcgtaaagacctgtctcctgtttccagccgccgcctgtggttctagcaggttctatgccatctgcattgggatgtctggttgtttttatttctgacttttttaaaattccaggtgtgccgcacccactttctcgcagtgttttaatattgtgtggagttgtcgataccacgtgaattcatacacaataaaaagcctcactctcccttt

SEQ ID NO: 8483 - DNA, 2643 bp, Homo sapiens
gcccggaacgcccgcctgcccgccgcccacccccactgacccccgctgcctcccccaacaccgacaccctcctcggcctcctcctcttctctcatccttcctccgacacctcggctggggaaaccgaggccaccgcccccccctccgctgcccctgcccaccccgaggcagggctggggcttttcttcctcccctgctctctctccaccctcctgttctgtctgtaccctccaaaaccaagagccggaggtggcccccttgtcctgcagatgggaaaacaggatggggagctggcaagaggagctgcttgttcccaccaggaccagaggaggctgcgtttccccgtttccatctctttccctggggtgtccccagccagacctgcgcgtcctgtccctcacatttgatcactgtgaccttctgggggaggggggagttgaaaatgcacatcggcctcagatatttttttcttttttctcctatttggtgttaacatacacccaagcccacccggcccgtcgtgacctctgatctgtgcccactcctccggttccagacgcacctctctcctctgtcttcacagtggggtgtggggcccgtgggatgggcctcaggccaccaggcaataaccacagggcctgcagcagtgcccctgccagccccgaatcccacccccgggaccagccacatccacagcacaactgccccgctggagaggcaccatgggcgtggaggggcttcccggacaccgcccacccgggacccgcctcttccaccaagacagagacgttagcaacgcatggcgggtggggacctggggtgctcaggagggggtacccggggccccggccagagatacatcaattacacccccgtggggggacagccgatgggagccagcaccagcaggatccgagggcgccccggacagaggtctgccccacccacttcctccccaccacctgtgccccagagagcagggcctgcccgggaaggtggcgtcctggagtcgagtgtacctgcagccatgaggttctgggtgttttttgagagagtctgagtgacaccacactcgtgtgaccccacagggttgtgtccaacatacacggaagtggctatggaatggtgtatttgtgcaacctggggtgcgcggatgggtgacttgtatctaagtgcatctgcgtgtatacctgtgtgtgtctgtctgggatgatatgtttttgtggcagtctgtgtgtgtaatagtggtgtagggtatacagagaggtgggtagttgtagatacctgtgtgtggttgtcagcaagactggatatgtgtgaggtgtctgtgtgaatctttgtgcctgtatgagcatgactatattttggggagtgggtgatatggtttatctgagagcatttatctgtaaatatgtttgtcctgattgagggacacgatctgtgttccactctatagcaacatgactctagcaatgtgactttcggttccaaatctgtatcagtcagctactgctgtgtaacaaatgaccacaaatgtagcaaccagaaacaacacatgcttattatctcatagattctgtgggtcaagagcctgggtgcaggttggctgggtcctctacttgggatctcaggaggctgcaatcaaagcattcgccaggcagaggtctcatctgaaggcctgatcggggaaggatttgcttcttagaagctcatgtggttgttgcagcattcagttccttgctgttgcaagactgaaggcctcagttcctcgctggctgttggctggaagctgccctttgttctgtaccatgtgggtctctccacagcggggctcggagcatggcagctaagttagtgagggaaggtgagatggaggttttggtcttattgggtgtgaggaagcaacgtgtgtgtgtgcgcacgcccttttgtgcagtgagagagagagagagattgcacacatgtgtctctgtagtcatgtggccaggtgggactatgtaggtaacagattgctcgtgtctgatttggtacaagcatgtttgttttcctctgtgttcgtgtgagtgtttactcaacaaatgtttattggacacactcagagagagggagtgtgcacacgtgcgtgtgtgttgctatccagcacgtggaccgggctcccagaagagctggcattgtgtctgagcagagctgggtccccccaaaacttgggctggcccagggcccaccagcagctgatgttgcctcctctcctgtcctggcagtagcttctgggttctgaaggtgccggagagagtgaggctgggcaggggtctgcggccctttctcagggacacaccctgatagcacaatctccttggggccctgcccacctccaggcctctcccacctcaggccctgcccgaccctggggagagagggcatctgcaataggaggggacccgagcctgtcctggctgctggcccatcctgcctgggcatccctggtgctggggactgtgccaggccatgcttgctgtgactccgcccctgccccctctccccccgcatgtgggtgcccccactcccccatcgtggggtctgtgtagccttcgctctagacatagtcttcctgcaataaaaaagtggatcctgcattccccacca

SEQ ID NO: 8484 - DNA, 2413 bp, Homo sapiens
gggtgacggaaagtaggaagtgaatttgctgtgtgattgtgaactggttactttctgtctctgtgctctaccggccaaacaaggggtttggaccagacctgggattcccaacaggtggacttgtcggttgtcacctgataatcagaccagactacccacctaggtagggcacactctgtcctgaagctggaaagcatggcctctcttcggttcctatatcagtcagctactgttgcgtaacaaattatagcaaactgagcaccttaggactacagacgtttatcatctcacagtttctgtgagtcaggggtctgggcactgcttcaggagctcacaaggcagcagtcacagtgtctcctgggctgtggtctcatctcaacgttcaaccggggatgggtcggcctctaagctcatgtggttgtaagccaggttcagttcctcattggttgtcagaccgaaggtgtctgtttgtcagtgtctgttggctggggcagccctcagagcctggccacgtggacctccccagcatgatcagttccttcatcagcaaatggagaagatggccatgactctgtgtaagacagagggcacagtcccatgtcatgcagaggtgacagggtatcccttcccctctgccccagtgtcctgctggttagaagcaagttcaagtccttcccatactcaagtggccaggacctcacagggtatggctgtcaagaggcaggggcttctggggccatcttggagtctgtccaccccaactcctgacagcatcatcctctgctgacctgttccttgagctcccccatatcagcagcccagagtgtgggtcccctgtcaggccacagtgtgaccagccctggccatgcttgctgggtgaccctgggtgagtggcttcctctctctgggccagtgccagatgtgacattgaatttgtgttggttacatacttggtggagatatgaggaccccctgttcttcctcccaacgaaagcatggaagccctaagcttatcccccaacccctggccctgcttttcctcgtgcctagtgtccagaaaggaggagaagggctgttgtctgggattaaatcatctgagcctgttagtgtggcagagtagagttccagggtggctccctgagcttccagcccctgctccgcacgccccatgctcttccctcccctcgagtgtgggtagggctgggactgccgtgcgtgtcactcctgccattatgtcagaatcccagcagaggggatgttgcagctgtgatgaccgccccagatcggttagcgctgagttcatcaaaagggagggggtgggcctggcctaatcaggtgagccactcaccctcctgctggccttggagaagcaaaaagccagggtgtgccaggagaagggcatgaagcgaggacccgagggcagcctctcggtgccaagagccatccccgccaacagccagccaggacacggggcctcagtccacagccaccaggaggtggactcttccgacctccagtgagcttggaagaggaccctgggtgtcagtgagatctcagccctgatgacaccctgcgagacctggagcgtagggcccagctagcccgcacctggatttccaccgttcagagccgagacaccgcattcctgctgttccgcgtggctgagtctgcattcgttcgttacgcggtgtgtgaagactgacatctgcactgcgaggatggagatcttggtcatctctgacatctcctgcatcgcagaggccactgccagccccccttttcccccatggtcatggtgtcacccccgtcaccctctgactgcaggcctgggcgactgcggggagcttgctcttccctccccctcatcacagtggccttctcatggcacccaaacctttcccgccgttctcctgtcctcgggctggtcaggcggatgaggtccctactcccgagcccccagcctcacccactgcagggccaggctctcagtcacccctggaaaatggtgcctggttcacagctcccgtgcatctgcctcatctctcctgatcaacgtctgtctcttgggagtagctagagttcctcatgagcttgtcctcaagcgaggcatgcatgaggcctccagccggtggtcagtgagggagttaagtggcttctccgtggaaacacagccttctgctgcagcagaggctcacccagcgtgaactgcccccagggaacactgggcgatgcctggggacattgtggttgtcacgatggggggtgctcctggcctggagtgggtggaggccagagacactgctcagcagcaccctgcagtgcccaggacggccccgtcccagagaacaatccagccccgaatgtcagcaccttccccctacccgagttgtgaaaataaaaaatgtttccagac

SEQ ID NO: 8485 - DNA, 224 bp, Homo sapiens
gcggcctcgccattgtccctgccgccggagcccgccgggagccccgggccggacacaggccgcgtcccccggccgcgcgtcccccaagagcgagcactgtggccctgggccaccacctgtgcacaaggggcctcccgggaccaggctgtgcccccgatcctacaccctgagcctcagagcactgctactttttaaaatacttctttctcttaaaagtctttacc

SEQ ID NO: 8486 - DNA, 1220 bp, Homo sapiens
ctgctcccggtgtgaccgcgtccttccctggccgacccgaaggaagccttctggttgtctgccacttcctcctgttggactgcctgagagaggggaagagagagacctcggacctgcatgtcaagatggattttccccttttatctctgccctcctccactccctttttgtaactcccttacagcccccagacccttcttgaaacgagagccagcaagctgagcacagaccagcagcgacctcccttccagcccccagaaagctcggtcacttgagtgttttctagaatcctggggtgctcccgggccgctctcagagaagtggcaggtttcacgttcagccgtgtggcggatcgtgtggcttccaaagccttttacagcccccgccccccatcccgtggtctgtctgcaggaactctcccgtctgtgagaagcctctttccgagtcgacctcccggccaccccggccctgtgcctgctcggaagagctcactgccagctgcggcctgggcaccgcgggccatgtgtgtttgcatgaggaactctttagtggcagacacctaagagacggctgcggtcaccccacgcctccgcggctcaggagccgtcctgggtgcataggaccagtttctgtgacttttctccagttgggcatgttgacagacatgtttcccctcctcccaccctcattttctggtcctcgcgactgagagccaggggcgacatcatgaccttctgtcccggccgccttagccccgggcacagggaaggcagctgggccgtttctgtctgtgtcccatcctgctgtccttctgtcctggatgtttcatgggcccggggccccccagggaagcttacccctcctgtgctgggtggaggccacgggacacctcaggtgccacccaccttggccctaaaacagccaccaggaaagcagccggagagccggacagcaggcagcctgtctgggttcctgaggcctgggggtggcagacgagcccacggcgccgtggtcccagcagcagggttgtcagtcggagcatcctggggctccctggctcctggccgtctgtgaggtaggcgcagtaccgtgtatcgtaggtagcagtaggaacgggggccgccgcggccctgcagccgctcatggcggtgaggtgtgtgccaagcccacccggggtgcagggcgtgacgtgtggggaataaataggcgttgtgacctct

SEQ ID NO: 8487 - DNA, 270 bp, Homo sapiens
atctacgaatacagtggacctgggagagtgttcaaccgtaaaaccttgttgtaaatgtgagaaacgttatttatgtagagcatgtaggaaaacctggtatagcacttattttgtacctaaaaattcagagtaggagagaaatctcttaattatgattaatatggtattgcctttacatgcctcagccttaatagtgattccttttgtattaatttctagtgtatgtttgtgatataaacatttaataaatatcctgttttgtacgctttc

SEQ ID NO: 8488 - DNA, 209 bp, Homo sapiens
gacatgaccccccttcctgtacccgaagtccagactcccaggggaatcagcagccaggacagacatcctagcagccgcctcccagccctgcctaggaaccgtacatcccatctgctctctggccaacggcttcacaccttcccctgctgcatgtgggggccgatgggcaggggacctcggtggaaataaaatgtatctatcacatccgc

SEQ ID NO: 8489 - DNA, 909 bp, Homo sapiens
cagggggccgggacagggaggttgggaggggggacagaggggagacagaggcacggagagaaaggaatgtttagcacaagacacagcggagctcgggattggctaaactcccatagtatttatggtggccgccggcgggggccccagcccagcttgcaggccacctctagctttcttcctaccccattcccggcttccctcctcctcccctgcagcctggttaggtggatacctgccctgacatgtgaggcaagctaaggcctggagggtcagatgggagaccaggtcccaagggagcaagacctcgcgaagcgcagcagccccggcccttcccccgttttgaacatgtgtaaccgacagtctgcctgggccacagccctctcaccctggtactgcatgcacgcaatgctagctgcccctttcccgtcctgggcaccccgagtctcccccgaccccgggtcccaggtatgctcccacctccacctgccccactcaccacctctgctagttccagacacctccacgcccacctggtcctctcccatcgcccacaaaagggggggcacgagggacgagcttagctgagctgggaggagcagggtgagggtgggcgacccaggattccccctccccttcccaaataaagatgagggtactaaagttgtcttggtttttattttattattatttttttctttttccagtatactagcttgtcttttaagaaaggggatattaaaaaaaaaaaaagacaaaagtgtttttaaaaaaaagcaacacccacacctgtgtctgtatatagtcagcttatctcgtgttcaatcgtctgatctctacagagagaagtggaaaatgctgtatcaagggtgggcttagctgtgcctttccaataaagatgtgagaagcttc

SEQ ID NO: 8490 - DNA, 668 bp, Homo sapiens
ggccccaccctcacccggagctcccggaggactcttgagggccgctcctcccccgcagagctttggcgtctaaaccgggtgtgtgtaaatcggtgtcatcgcttgtgtcttgctgggcgcatggttgctgtccccctcctccgtctgggaccgaggagctgccgttgtgctgtgactccctgagtcccctgactgctcctcggggcctggcgcagggctgtagcgtggaagtttccaggcttggggtgggactctgcgggaggctctgggatgcccggctcaggacaggggaggattgcgagggaagccaggggaggatcgcgagggaagccaggggaggatcgcgagggaagccaggggaggatcgcgagggaagccaggggaggatcgcgagggaagccaagggaggatcgcgaggggagccaggggaggatcgcgagggaagccaggggcagagctggggctctgggaagaggctgacgttatggtggcttcagcttcactaggaatgggacacagggtctgggggcctctgactcccccaccccgaggcctgggtagggacagggtggtggtccctgagtgggtcaggtagggcacaggggccagggagggacaagcagacctcagagcgctgcccagatggaatattaaattatttttgccaa

SEQ ID NO: 8491 - DNA, 510 bp, Homo sapiens
ctcctgacagcctcctgcacctgtgcaagggaactgtggggacgcacgaggatgccccccagggccttggggaaaagcccccactgcccctcactcttctctggacccccaccctccatcctcacccagctcccgggggtggggtcgggtgagggcagcagggatgcccgccagggacttgcaaggaccccctgggttttgagggtgtcccattctcaactctaatccatcccagccctctggaggatttggggtgcccctctcggcagggaacaggaagtaggaatcccagaagggtctgggggaaccctaaccctgagctcagtccagttcacccctcacctccagcctgggggtctccagacactgccagggccccctcaggacggctggagcctggaggagacagccacggggtggtgggctgggcctggaccccaccgtggtgggcagcagggctgcccggcaggcttggtggactctgctggcagcaaataaagagatgacggc

SEQ ID NO: 8492 - DNA, 1182 bp, Homo sapiens
gaagtggacagagcgcccctcccgcgcctttccgcggagcccttggcccctcggacagcccatctgcctgttctgaggattcaggggctgggggtgctggatggacagtgggcatcagcagcagggttttgggttgaccccaatccaacccggggacccccaactcctccctgatccttttaccaagcactctcccttcctcggcccctttttcccatccagagctcccaccccttctctgcgtccctcccaaccccaggaagggcatgcagacattggaagagggtcttgcattgctatttttttttttagacggagtcttgctctgtcccccaggctggagtgcagtggcgcaatctcagctcactgcaacctccacctcccgggttcaagcgattctcctgcctcagcctcctgagtagctgggactataggcgcgcgccaccacgcccggctaatttttgtatttttagtagagacggggtttcaccgtgttggccaggctggtcttgaactcctgacctcaggtgattcaccagcctcagcctcccaaagtgctgggatcacaggcatgaaccaccacacctggccatttttttttttttttttagacggagtctcactctgtggcccagcctggagtacagtggcacgatctcggctcactgcaacctccgcctcccgggttcaagcgattctcgtgcctcagcctcccgagcagctgggattacaggcgtaagccactgcgcccggccttgcatgctctttgaccctgaatttgacctacttgctggggtacagttgcttccttttgaacctccaacagggaaggctctgtccagaaaggattgaatgtgaacgggggcacccccttttcttgccaaaatatatctctgcctttggttttattttcctttgggtccagaagttttcaatctctggagtttgtgcattgggcctcacccggagcagacgagggcagggctgggaaggatggggagggacatagaggattcggttcctcccccaccttgtttcttgagtgtttcctaatcacttgatgggtggtaccacctagaattcttccagcagcctgtaatgggagggctacaggttagccctggaacctgcaatcaaaccacctttgaatctgtgtgtcattaaaagtagatataaatgggc

SEQ ID NO: 8493 - DNA, 2983 bp, Homo sapiens
tttctatgcagcccccgacccagagccgagctccacttctgctccggctgcccccgaaggcgctgcccaccccgctgaggcccagagctcgggagatgcccgcctcgccgccccaccggacctcgtcctccccctgcacggatgccgacggccgggcccctccccgacaagcctcccagggccccggcaccccggtcggcagcctgcccctgtgagacccaccctcccgagcggccaatcgcatttgagtccttatttggcacagagacggaagcacgtgtgtgccgttttaggaaaagaacaaaaaagacacaaacaaaccaaccagagggagaagagcccctgcccactgcactctttggttctctgctgtgcctgcctgtgtcctgaggaagaagccaggctgttcgcggtggcctctggggacctgagccccgggggccccatcggcctgcagaggggacggctggggtcccgagcaactctgcctccatccacgtgggaagcggaccctcctgccctcagcttgggtttgggggcctcagtgcaggacatctggcctgaacatcgactgtggggacagccctcgccctgccaagcactgcggccactcagcagctatgttcccgccgcagtggggccctgacgcccacctcccaggtgcccctcgagcaaaaacctctggcgcctccaatccagacccaccacagctggagggccaggcctcctcttccccaggctgccacccacgctggcggagctcagggctggggacttgtccttctcttccaacgtaggccactcagcaactggcatggagggcccaggcaacggagacgttttctccatggcaggacagagcgggaggccgggccttgggccacaggagaccagctcagggcggaaggtcaggctccccgccccctccacgtggagacatggcctagggggccaggcccggctccacaggagtctccttcaggactggtgtggatgtccgccgcctctttcttgtttaagtgatgtgatgtctccgaggaggggagagaagactttgtttccgactcatcaccctccaagagggcagcgctcccagtggtgggactcagcccagactgccctggggcagcttcctgggcccgctgcgctcagagggtgctggttggaggccagagctcggcagagtcacccaccctgcccttccccaggacccctgagaggggcttattggtgatggctgtgggaatcccccacttccaagatgtgcccaggatgtgaggagctggagtggaagctgcacctttgggaagaattcctctccagacctggcagagcctggtgtggggtctgagacggccggagaacctcccaggcagggctctgtgttttgtctgttacaacctccgtatgacgccacgccacccgctgttcacgtcccgtcggcctcctgcacagcccacacgctgcgcccggaaggcccctgctgtggagaagccggacccatccccgaggtccccagcgaggacacacactccacgagagcagcccctccactctgcccaggagaggggccgaccctcctcgggaaccggccagccgcgtggctcccagcatccatcaggacaagcccacgtggggtcctccctgcgtgctcagagggtctgtccagccctgggaagcgaccttggcctcagttcacagcctggtgctcatctgctggcaccgggcatccacccatcagcccccgccctgtccctccgaaggacacccagcaggcaccccccggggaggcaggggcagaggtcagaaggggtgtctgggacctggatggccagcagggacaggggcattgtcatctcaaaggcccaacccccagaggccacaccagtcctcccagggagtcctcgagtcgccctgcccagagccctggcaccagagacgccaagagcctgtggggtgactcggagcagcaggtgtggccccgggcgggcggcaccgcgtccagggcagcctccctccgctgagtgacacgggacaccagtgcccggccgacgcgcctttgcaggagaaatgtgcaaacctctgtggataccatttcatttccattcttgtgttgtctccaaggcccttttggagatatacttggtgttggttgtgttttttggttccttttcagagaactgtaaaccgaggctgacgtgctccactgactgtgccgaggggcgggggcaggaggacggcaagacctatttataatatttagcgaactcggtctccctcagatcccccgcgagggaggctgctggacccaccccgctgtcccccatgatagaagtctgtaaataccttggtgaccaatgcccacttcccctcctgggtcacctctgatggctgctgtccactgagaacgtgggcagtgtccaaattcctgtactgtaaagactaaaaggcgtttgctctgagactgacaaggcggaaacttccatgtgtctcctgccaggctctgtccccctacgccatcccgacacgtccccgttcccccgaaacctggctcagtgcaatactcccattgccatggggtccttcaccatggtactgtctccacagccctcagtccccaccccaggagaggcgcctgccacctcctcctcatctccggtggttcaatcgctccgcctgtccccaacccagtcccatttttatggccaaactgattctgaaacaaaatgaaactgcaaacctcgtgtgtcttaactccccccagggatgccactccattcctccgccccgtggtctggtgcgtgacaatccaaagcgccgagacgagggtgctgtgtccctcaaacccagagtggtgggcgcctctgaaaccatacagccactcctggccccaaacactggtttgcatcccaggttcctcgcccacctacccccgccacaccccgtctttttagagatctctctaataaatcgggtaataagc

SEQ ID NO: 8494 - DNA, 253 bp, Homo sapiens
ccacctcatcccttgcctgccactgtgccttcgcctccatggccccggagccccatcctgggcctgccctggctggccaggaccccagcggttcttggtcctgtatgatttcctaatataaaaacagtaaaagcttatgcatttggcaaagtctcggatcagggtctacgggaccgaggaccttgtccttcctggaagccactagaagccggtgctgtgaaaatactctgtttattaaagaccaggcggaggg

SEQ ID NO: 8495 - DNA, 1526 bp, Homo sapiens
gcctgccgccctcccgggccccctcctcggcccaacccgagaaccggggacgtgccctggtgacagccaccacgccttggcctaggccgaggtcatggagcaaccgtggtcaggccaggccaccaccactggggagcgggaccagagagacaggctgctgggttccctgcccccatcccgtctcccaccccatcgccacccgtcctgctggcagcggactggcccccagtgtcaggcaggaggtgacccaagtattctcaggccaggtgcggggacctcctcccctcctggggcctcagtctcctgtctgttaattgggcgtgggggcctccgaggttcgagggctgcgaggctgtgggtggcgggaccgctgactctgtaagatgagtgtaaatctctctgcttctcctaatccccatcagcagagctgcccactctccaggctcccagtcccctggaaataacaaatagcagcagctcccgcgagcctggtctcctctcaccgtgtgctcgccatgtgagcactcccctctccgttgtgccctggacctcgggcacagctgtcagcccattctatagagagggaaaccggggcttaggcaggaagccaggtccccaaagtcgcacggccaggagtggatggagctgcctttcagacccatcaccggtcctaccgtccggggcacagcgacaggttctggagagagggtgggtcccgggccaggtgctggtgggcctccaggtggaggcgggctgatgctgggtgtgtcgtcatcgtcagaccgttcctcacgtccccacagaccccaggccctgtgcatgtccccagtggaggcatggccagcatctgctctgtccaacccagccgcatcgcccaagagctctgagcaaggaggctgtcgcggggccgagaacccgctgggactggcaagcacggctggcccagtgcagcaggagggggccctgaggcatgggatgggacagtctgggccagcgccacctcccgggacagaagtgcggcaccagggcaggagctgcagtagctaccctccccgtctccagcctgggctccccagatcactcccagatcaccaggtcaccccatctctaggcggcacctcacacaccagtcctgtggtccaacgccccgccatcacccaatgtcaccgcacaccaggcagtggggacacggcagtaagcacaagaaagatttttttttttaaagctaaaccaggccaggtgcggtggctcatgcctgtaatcccagtgctttgggaggctgaggtgggaggattgcttgagaccagcctgggtgacacagcaagaccccatctccacaaacgtttttaaaatgtgccgggtgtactggtgcacacctgtcatcccagctacccaagaagctgaggcaagaggatcacttgagcccagaaggtcgaggctgcagggagctgtgatcacactgctgcactccagcctgtgcaacagagccagaccctgactcaatacaaataaaaaacaaatctaaa

SEQ ID NO: 8496 - DNA, 213 bp, Homo sapiens
ccccacccggtggggcccttggccccagaggaccgagagagtggagagtgcggcgtgggggcactgaccaggcccaaggagggtccaggcgggcaagtcatcctcctggtgcccacagcaggggctggcccacgtagggggctctgggcggcccgtggacaccccagacctgcgaaggatgatcgcccgataaagacggattctaaggactct

SEQ ID NO: 8497 - DNA, 497 bp, Homo sapiens
gcggcccttcctgcagcgcctgccgccccggggactcgcagcacccacagcaccacgtcctcgaattctcagacgacacctggagactgtcccgacacagcgacgctcccctgagaggtttctggggcccgctgcgtgccatcactcaaccataacacttgatgccgtttctttcaatatttatttccagagtccggaggcagcagacacgccctcttagtagggacttaatgggccggtcggggagggggaggcgggatgggacacccaacactttttccatttcttcagagggaaactcagatgtccaaactaattttaacaaacgcattaagaggtttatttgggtacatggcccgcagtggcttttgccccagaaaggggaaaggaacacgcgggtagatgatttctagcaggcaggaagtcctgtgcggtgtcaccatgagcacctccagctgtactagtgccattggaataataaatttgataaggtggtg

SEQ ID NO: 8498 - DNA, 647 bp, Homo sapiens
gcgcagtggggtgggccaggccccaggacagccggagctcggcctgcggtgggggcgcttcctgtggacgctgcgcctcccatcgcccgggtgcctgtccttgcccagcgccaccaggctggaggcggagtgggaggagctggagccaggcccgtaagttcgcaggcaggggtgggtgtgggacggggctgcttctctacacagcctccacgctggccttcaccttcacccctgcatcgtcggtgaccctgggaccctccaggcagcgtggcctgtggcaccgtgagggttgggacccaccgaggcgcagaggcggcccgaatgcagccctggttcaggcccggaggagggtttgcgggtagttgcacggacaattcggcggggtgctgcctgttgctgccattagcccaggaggaggtcgtgggacggggagggtgggatggacggcggacaggcagtccccacgctgctgggtggcgccgggcttggtggggtcttccactgtgtgcccttctcgccgaggccggtcccccgggtgtggggtgccctgctgcggactcctccgcgagccccatcgtcgcgcctgtggacgcctaggcaagagcggccctctgcagccaagagaaataaaatactggcttccagat

SEQ ID NO: 8499 - DNA, 2532 bp, Homo sapiens
aaaccaaaaagagaaaacagaaacccgagaaagagagagacagagagagagaaaaaaaatcacccaccacccccccaaaaacacaaaaaaagaaaatctatctatatacagatatctatatctatatatatatatacagatatatatatatgacgcgtcacagaatctagggtagcgctttctcagatttccctcctttctgacgtttttctccctccgcaggggccccggccctccctggctccccttccccccaccaccccatcgctgggtttcggggcttggtttggggttttttgtaggacacaaggaatccgagaccccgcacagccccctgggcacccggcatggggcctggggcccgatccgaggccctgggctggggggagggtagacgtgggggcgctggggggggactggggtgggcttttaatttcctcccctcgctggtttctatgagtctttcagacaagaccttaaatgatttctgtctgctctgagcggacgttaaaatgggcccccgtcccccgacccgcaccctccttcctcagggcacttactaagggaggggtctccctctccatctccccagtggcctccccgcctccaaccctgcctgcggcctccccccgtcgcccaccccacgtctcctggccactgagacacaaacctatttatttctaggcctggagaaaggagatcggactggggttcccggtggggcgccaggatggctcctgggggtgctcctgccgccttccttcacggcacttacaaccggcgggacccccagggaccacccctcagggcgcccccccacccccgcccggtccacctagacccccacgtttggagattcaaaacttctgtcttcgtcctctcccccgagccccctctcccaaatttttaaagcactttttagatttttttttctctttcctccttaaaaacaaaatttatatatagatatatatatatatataaataatatacttttcctcagaggagcaggcaacagtgtgggataaacagagtcacgatcagaggaaccccagggtctggtgatggcagggatggggggagagagagaaaatccacaaattccaatgtcacaaaagcaataaaacaaactagaaaaaaaaaaggttttacaaaatgaaaggaaggaaaaaaaaaaaggcaaccaaccacattagaagtcttggcactttgtaacggaacgggtactacactttatcttaattcttaatttaaaaacatgtttacaagttacaaccaacttctatgaaaagttgaaaagacaaaaaaaaaaaaaaaaagcgagcgagagagagagcgagagagagagcgagagcagaagaaattcctaaaagtcgatttatttttgtacaaaataataaaaaaaaaaacccaccacaaacgtagaatccacttctgttccccaaaaagcgagaaggggggttcaggaggaagccatcgcaggggacctgggagacgccccgaggtgtttgtgcttcacccccagacgtcagcctcgaaggcaggactgtggggtgttcgtgctgtgttccccccgctccccctttctgtccccttttttggttctgacgtgaagaggtcttagcgcccgcttctgtccacggggtctctccttcctcctccctagctcagggatgggccttccagccggagcaccccgatccccatccggcaccccccaatcccccaacacgcctgtccctcccgcatggccaccaaggagctggaccttggatgcgcctaccctgctgaggtgggtgacaggggccccccacctccagggccttagaaccaccgcccctctccccaccccaggcacccctctttttactcaaaggcactgactgtaatccagggggactgggacctgcctccccccaacctctggctcccacaaggcccggtgttgaccgagccacaggccacggacaggggccggggttggggagactatgtcgccagatgccaggacgccctcaccccgtttgcatatgcaatgctagcatgggaccccgaaaatagacgctctgctgcactgagacttcttgtcaatgcccaaccggcgggggggtgtctccctgcccccgacccccccatacccccttctctgtgacacacacatcttctcgtctctttttctttcattgttaaagggaagctttttaagaaggcaattttcatattgtttctacaggatggttttggttcccttcccttcccacccccccttaagcctgtcagccccctccaaatgtctcaggatcccccctctcccctggggctgggtgacagcaccccggctgcgttcacaccccagtgtcacagggcgagctgttctggagagaaaaccatctgtcgtggctgagcggggagcttgaacacccaggccagggacacccctccccagctcccagagaggccccctgaggggtgagccctctttccaccttcccctatccatgcaccccctcgcaataaaaccaactctaaaat

SEQ ID NO: 8500 - DNA, 267 bp, Homo sapiens
cagtggccgggctccctgcgtcccgctggtgacctgcccaccgtccctgtccatgccccgcccttccagctgaggacaggctggcgcctccacccaccctcctgcctcacccctgcggagagcaccgtggcggggcgacagcgcatgcaggaacgggggtctcctctcctgcccgtcctggccggggtgcctctggggacgggcgacgctgctgtgtgtggtctcagaggctctgcttccttaggttacaaaacaaaacagggagag

SEQ ID NO: 8501 - DNA, 507 bp, Homo sapiens
ccagggtgcttggggagggtggggctttttgtagaaactgtggattctttttctctcgtggtctcactttgttacttgtttctgtccccgggagcctcagggctctgagagctgtgctccaggccaggggttacacctgccctccgtggtccctccctgggctccaggggcctctggtgcggttccgggaagaagccacaccccagaggtgacaggtgagcccctgccacaccccagcctctgacttgctgtgttgtccagaggtgaggctgggccctccctggtctccagcttaaacaggagtgaactccctctgtccccagggcctcccttctgggccccctacagcccaccctacccctcctccatgggccctgcaggaggggagacccaccttgaagtgggggatcagtagaggcttgcactgcctttggggctggagggagacgtgggtccaccaggcttctggaaaagtcctcaatgcaataaaaacaatttctttcttgc

SEQ ID NO: 8502 - DNA, 367 bp, Homo sapiens
gagatcccaggagacctcaacaggaccccacccataggtacacacaaaaaaggggggatcgaggccagacacggtggctcacgcctgtaatcccagcagtttgggaagccgaggcgggtggaacacttgaggtcaggggtttgagaccagcctggcttgaacctgggaggcggaggttgcagtgagccgagattgcgccactgcactccagcctgggcgacagagtgagactccgtctcaaaaaaaacaaaaagcaggaggattgggagcctgtcagccccatcctgagaccccgtcctcatttctgtaatgatggatctcgctcccactttcccccaagaacctaataaaggcttgtgaagaaaaa

SEQ ID NO: 8503 - DNA, 89 bp, Homo sapiens
ttcggacacaccagggaccagcgggctagtcccagggcatggcccagcggccagattctttttcccaggattaaaactctgaccccagg

SEQ ID NO: 8504 - DNA, 1229 bp, Homo sapiens
ctcacccgtgtccccgccccgcccctccgtccacactggccggcaccccctgctgggtctcctgcattccacggagcccctgctgccagggcggtgtctgagcctgccggcgccacctgggccccggcccttgaggtactccctgagcaggaccccacacttgggtgggggggcttatctgggtgggtggggatgcctgtttacactagcgctgactcccaacggtgacggctcccttccccactccatggcgccagcctcctcccccgctccccaacttctcgcccagctggccgaggcggggcaacactaaggtgctcttagaaacactaatgttcctctggggcagcccccacctccgtcctgacccgacgggggcccggcccactgcctaccctcgagtcccgcagccttaacaggatgggatcgagggtccccatggggtggctcagagataggaccctggttttaaatccctcccagcctggtgctggtgatgggccctggccctactccagggccaatgcacccccgcctcacacacgcactccttctcctcaaggccagggcagagggcctcaccgcctcccgggcctgctgtcagcttgcagcccggggacagaggccagctgggatctgcctgaggacagagaacatggtctcctgcagggccctgcctcccaagccccgccctcagaaagccaagtaccttttcagctttttaactgcccccatcccaacccagggaggcctgtgtcactctggcacaagctgccaccaccagccacccacacccaccccagcacacctcacacgggaccacagccgcgctgccgagggccaagcacaaaggttccagtgagcgcatgtcccagcccctggtggccaggctccccttgctgagccgctgccacttcaccctgtgggaagtggccccagccatctcctctagaccaaggcaggcagccccgacatctgcttcctctatcgcccaatgcaaaatcgatgaaatggggagttctctgggccaggccacattcacattcccctccccctgtggtccagtgaagcctccggaccccaggctctgctctgccctgccctgcacccccctcgtcagaagtacatgaggggcgcagagatgagcacacagctttgggcacggtccagggcaaactgaaatgtacgcctgaattttgtaaacagaagtattaaatgtctctttctac

SEQ ID NO: 8505 - DNA, 234 bp, Homo sapiens
aataaaagcagggttggcctcagccctgtgggtctgtctcatgctctccctgttcctctccccgccaccccagggcctccaagccacctctggaaatacttggctctgccccatgggcacgggaggggcgccagccgtggagctgtggaattgggccccgtggcagagcccccatcccttgggggctgtggggatgcgcccaagcccccgagggagaggcctggggacaccaac

SEQ ID NO: 8506 - DNA, 994 bp, Homo sapiens
cccatgggccagtggaggcggggaggaaaggccacctgcacaccccgatccctgctgccccctggtggccacacgtaagctcgaggccttggccttgacccttctttggaatcaggcccaactccggatctctgaccacctttttggtattggactctcccattttttccttgaacacatggacaaagaggcccgggggagcagggcctcgaaccctattcaggccaacttgagccacaagctgggttcttcacctatgtcctgctccctggctccatgaagcgaatccaaatctttccaagaggctgggcacagtggctcacgcctgtaatcccagcactttgggagtctgaggcaggtggatcatctgaagtcaggagttcgggatcatcctggccaacatgatgaaaccctgtctctacttagaaagaaagaaaaaaaaaaaaaaagccaggtgtggtggtgtgcacctgtagtcccagctagttgtgaggctgacgcagaagaattgcttaaacccgagaggcgcggagcttgcagtgagcagagatcgcgccactgcacaccagcctgggtgacagagcgagactccatctaacaaaaaataatagtaacagcctcccgaagaaatacacattttgcccaatgccttctgtttggggctttgaaaagtgagccctgactgggtgtggtggttgacacctgttatcacagcactttgggaggccaaggtgggaggactgcttgagcccaggagttggaggctgcagtgagccatgatcttgcccctgcgctctcgcctgggtgacagagcaagactctatctcaaaaatgtttttaaaaaatacttcctagggaaacacacattttgccctatttggaactttgaaaagtgagccctcctctgcccatgggccgtgctgctcagcctgccatactcgcttgctttgctgtttgggatttgcctccagaataaaggtcctttttgttgttg

SEQ ID NO: 8507 - DNA, 724 bp, Homo sapiens
gaccaggggcttgggttgagggtggggggtctggtagaacactgcaacccgcttaacaaataatcctgcctttggccgggtgcgggggctcacgcctgtaatcccagcactttgggaggcccaggtgggcggatcacgaggtcaggagatcgagaccatcttggctaacatggtgaaaccctgtctctactaaaaatataaaaaattagccaggcgtggtggtgggcacctgtagtcccagcaactcgggaggctgaggcaggagaatggcgtgaacttgggaggcggagcttgcggtgagccaagatcgtgccactgcactctagcctgggcgacagagcaagactgtctcaaaaaaattaaaattaaaattaaaaacaaataatcctgccttttacaggtgaaactcggggctgtccatagcggctgggaccccgtttcatccatccatgcttcctagaacacacgatgggctttccttacccatgcccaaggtgtgccctccgtctggaatgccgttccctgtttcccagatctcttgaactctgggttctcccagccccttgtccttccttccagctgagccctggccacactggggctgcctttctctgactctgtcttccccaagtcagggggctctctgagtgcagggtctgatgctgagtcccacttagcttggggtcagaaccaaggggtttaataaataacccttgaaaactgg

SEQ ID NO: 8508 - DNA, 1013 bp, Homo sapiens
gccgggggccccccgatgccttggcagtgccagccacgggaaccaggagcgagagacggtgccagaacgccggggcccggggcaactccgagtgggtgctcaagtcccccccgcgacccacccgcggagtggggggccccctccgccacaaggaagcacaaccagctcgccctccccctacccggggccgcaggacgctgagacggtttgggggtgggtgggcgggaggactttgctatggatttgaggttgaccttatgcgcgtaggttttggttttttttgcagttttggtttcttttgcggttttctaaccaattgcacaactccgttctcggggtggcggcaggcaggggaggcttggacgccggtggggaatggggggccacagctgcagacctaagccctcccccacccctggaaaggtccctccccaacccaggcccctggcgtgtgtgggtgtgcgtgcgtgtgcgtgccgtgttcgtgtgcaaggggccggggaggtgggcgtgtgtgtgcgtgccagcgaaggctgctgtgggcgtgtgtgtcaagtgggccacgcgtgcagggtgtgtgtccacgagcgacgatcgtggtggccccagcggcctgggcgttggctgagccgacgctggggcttccagaaggcccgggggtctccgaggtgccggttaggagtttgaaccccccccactctgcagagggaagcggggacaatgccggggtttcaggcaggagacacgaggagggcctgcccggaagtcacatcggcagcagctgtctaaagggcttgggggcctggggggcggcgaaggtgggtggggcccctctgtaaatacggccccagggtggtgagagagtcccatgccacccgtccccttgtgacctcccccctctgacctccagctgaccatgcatgccacgtggctggctgggtcctctgccctctctggagtttgcctcccccagccccctccccatcaataaaactctgtttacaaccaccggc

SEQ ID NO: 8509 - DNA, 451 bp, Homo sapiens
ccagcagccctgttgcgggtggcaccttctcatctccggtgaagctgaaggggcctgtgtccctgaaagggccagcacatcactggttttctaggagggactcttaagttttctacctgggctgacgttgccttgtccggaggggcttgcagggtggctgaagccctggggcagagaacagagggtccagggccctcctggctcccaacagcttctcagttcccacttcctgctgagctcttctggactcaggatcgcagatccggggcacaaagagggtggggaacatgggggctatgctggggaaagcagccatgctccccccgacctccagccgagcatccttcatgagcctgcagaactgctttcctatgtttacccaggggacctcctttcagatgaactgggaagagatgaaatgttttttcatatttaaataaataagaacatt

SEQ ID NO: 8510 - DNA, 1339 bp, Homo sapiens
gcctgcccaccgggagccgccacatcacagcacaagtggctgcagcctccgcggggaaccaggcgggagggactgagtggcccgcgggccccagtgaggcactttgtcccgcccagcgctggccagccccgaggagccgctgccttcaccgccccgacgccttttatccttttttaaacgctcttgggttttatgtccgctgcttcttggttgccgagacagagagatggtggtctcgggccagcccctcctctccccgccttctgggaggaggaggtcacacgctgatgggcactggagaggccagaagagactcagaggagcgggctgccttccgcctggggctccctgtgacctctcagtcccctggcccggccagccaccgtccccagcacccaagcatgcaattgcctgtcccccccggccagcctccccaacttgatgtttgtgttttgtttggggggatatttttcataattatttaaaagacaggccgggcgcggtggctcacgtctgtaatcccagcactttgggaggctgaggcgggcggatcacctgaggttgggagttcaagaccagcctggccaacatggggaaaccccgtctctactaaaaatacaaaaaattagccgggtgtggtggcgcgtgcctataatcccagctactcgggaggctgaggcaggagaatcgcttgaacccgggaggtggaggttgcggtgagccaagatcgcaccattgcactccagcctgggcaacaagagcgaaactctgtctcaaaataaataaaaaataaaagacagaaagcaaggggtgcctaaatctagacttggggtccacaccgggcagcggggttgcaacccagcacctggtaggctccatttcttcccaagcccgagcagagggtcatgcgggccccacaggagaagcggccagggcccgcggggggcaccacctgtggacagccctcctgtccccaagctttcaggcaggcactgaaacgcaccgaacttccacgctctgctggtcagtggcggctgtcccctccccagcccagccgcccagccacatgtgtctgcctgacccgtacacaccaggggttccggggttgggagctgaaccatccccacctcagggttatatttccctctccccttccctccccgccaagagctctgccaggggcgggcaaaaaaaaaagtaaaaagaaaagaaaaaaaaaaaaaagaaacaaaccacctctacatattatggaaagaaaatatttttgtcgattcttattcttttataattatgcgtggaagaagtagacacattaaacgattccagttggaaacatgtc

SEQ ID NO: 8511 - DNA, 259 bp, Homo sapiens
ccgcgtgtccttgcctgaccacctggggaacacccctggacccaggcatcggccaggaccccatagagcaccccggtctgccctgtgccctgtggacagtggaagatgaggtcatctgccactttcaggacattgtccgggagcccttcatttaggacaaaacgggcgcgatgatgccctggctttcagggtggtcagaactggatacggtgtttacaattccaatctctctatttctgggtgaagggtcttggtggtg

SEQ ID NO: 8512 - DNA, 858 bp, Homo sapiens
ggggagaggagaggactcagcgggccccgtctctataatgcagctgtgctctggagtcctcaacccggggctcatttcaaacttattttctagccactcctcccagctcttctgtgctgtccacttgggaagctaaggctctcaaaacgggcatcacccagttgacccatctctcagcctctctgagcttggaagaagcctgttctgagcctcaccctatcagtcagtagagagagatgtccagaaaaaatatctttcaggaaagttctcccctgcagaattttttttccttgttaaatatcaggaatataggccgggtgcggtggctcacacctgtaatcccagcactttgggaggctgaggcgggcggaacacctgaggtcaggtgttcgagaccagccaggccaacatggtgaaaccccgtctctactaaaaatacaaaaaaaaatgagccgggcatggtagcaggtgtctgttatcccagttaggaggctgaggcaagagaatctcttgaacctgagaggcggaggttgcagtgagccaagatcgcgccattgcactccagcctgggggacaagagtgagacttagtctcaaaaaaaaaaaaaaagaaaaaaaaatcagggatatagttcatatcccacttctttgtttacaccgatgtccctgaatatcagcctgtagctaatggacttgggatttctggtctaagtgggcctcctggggatggggtggtacactgagcttctgagcctcattgtagagtagaaaggtactggggcctgtgtggtaagccttgttgaaatgctctggtattcagtattgccttaataaacttcacccacaactgcatacaggc

SEQ ID NO: 8513 - DNA, 1265 bp, Homo sapiens
agccatggttccccccaggcccgacaccactggccccggatgcctctgcccctcccgggcggacctcctgaggcctggacccccagtgggcagggcaggaggtggcagcggcagcagctgtgtttctgcaccatttccgaggacgacgcagcccctcgagcccccccaccggccccggccgccccagcgacctccctggcaccggccgccgccttcaaatacttggcacattcctcctttccttccaattccaaaaccagattccggggtggggggtggggggatggtgagcaaataggagtgctccccagaaccagaggagggtggggcacagaccatagacggacccctcgtcctcccccagcggtggtagggggacccggggggctcctccccgctctgcagcctggggacactgggctgggaccagaatccagctttcttttaaaactctcagtgtaactgtatcccgtgacatttcattttttttaaatagtgtatttttttttccatttttttttttaagagaaacaaacaaaagactcgccagtcaatgactttcaaagagaactaactttggcttattcatattctgttcaaagacagtctattttttcactgtagaaagcgtccttgtgtgatagttacgttcgcaaacgcgcacgccaggcccatggctgtaccttggcttttttttttttttttttttttttaatttttcctaccatcagaaagtgtgctttgctcacagaagaatgggatgtccttttttctttcttggctttttttttccccctttttgtttcatttttataaattaaattttcagacatatcaaatacagttctgagggtaaggtcatgggggagctcggacccagtggcgttgggtgcggttgagggggacgctgctgtaagaggagagagatgacagtggtcctcctctgagagcctgagctgtctccccgtctcccgcccccaaggagacagagaggatcctacttcttcggggacagtggctgtatggctgtgctgccccacatcagggaccctttccccctgggactgtggggcagtttgggagcaaaaccagaaggacaggcccccctctacccgcctaccctgagcaagcgagttgttcctctttgtacaagggcaggtctgcggttactttcaacactgtttattccagcggaagcagccgggtggttttcccacccccgtgtatgtagatatatcgactttgtattaaaggaagatcgtctg

SEQ ID NO: 8514 - DNA, 243 bp, Homo sapiens
gtcccactcgctgcgagttttcgggtgggcagacgcactgttgaatctggtagccagggttccctcgaacttgggggatctttttaaaagcaaagtaaatcctgccaccatgttgtagctcaatacaatgtgaactcactttttttttttttttaaataaatgtgttcttgttctgccatttttaaatcaaggtttctgttaacgaggcattccattttccattaataaagtttaccattcgc

SEQ ID NO: 8515 - DNA, 129 bp, Homo sapiens
cgagtcagcaggggccgcctgccccggccagaacgggcagggctgccactgacctgaagactccggactgggaccccactccgagggcagctcccggccttgccggcccaataaaggacttcagaagtg

SEQ ID NO: 8516 - DNA, 197 bp, Homo sapiens
cggccaccccgggactgcaggcggcggatgtcaggccctgtctgggccagaactgagcgctgtggggagcgcgcccggacctggcagtggagccaccgagcgagcagctcggtccagtgacccagatcccagggacctcagtcggcttaatcagagtgtggcatagaagctatttaatgattaaagtcatttgcagt

SEQ ID NO: 8517 - DNA, 18 bp, Homo sapiens
agcacatttgacctttca

SEQ ID NO: 8518 - DNA, 59 bp, Homo sapiens
cctcaggctttcccaggggcaccctggggcgaggagagtacaataaattttattctttt

SEQ ID NO: 8519 - DNA, 862 bp, Homo sapiens
gaggctggtgtggggcctgggctgccaggaacctcattttcctggggcctcacctgagtgggggcctcatctacctaaggactcgtttgcctgaagcttcacctgcctgaggactcacctgcctgggacggtcacctgttgcagcttcacctgcctggggattcacctacctgggtcctcactttcctggggcctcacctgctggagtcttcggtggccaggtatgtcccttacctgggatttcacatgctggcttccaggagcgtcccctgcggaagcctggcctgctggggatgtctcctggggactttgcctactggggacctcggctgttggggactttacctgctgggacctgctcccagagaccttccacactgaatctcacctgctaggagcctcacctgctggggacctcaccctggagggcactgggccctgggaactggcacccatggggccccacccatgagtgatggttctggctgatttgtttgtgatgttgttagccgcctgtgaggggtgcagagagataatcaccgcaccgtttccagatgtaatactgcaaagaaaaccgatgatgaggccgggtgcggtggctcacacctgtaatcccagcactttgggaggccgaggcaggcggatcacaaggtcaggagatcgagaccatcctggccaatatggtgaaacccgtctctactaaaaatacaaaaatttgccgggcgtggtggtgcatgcctgtaatcccagctacttgggaagctgaggcaggagaatcgcttgaaccagagagtcggaggttgcagtaagccgagatcgcgccactgcactccagcctggcgacagagcgagactctgtctc

SEQ ID NO: 8520 - DNA, 866 bp, Homo sapiens
gaggccggcatggtgcctgggctgccgggaacctcatctgcctggggcctcacctgctggagtcctttgtggccaaccctctctcttacctgggacctcacacgctgggcttcacggctgccaggagcctctcccctccagaagacttgcctgctagggacctcgcctgctggggacctcgcctgttggggacctcacctgctggggacctcacctgctggggaccttggctgctggaggctgcacctactgaggatgtcggcggtcggggactttacctgctgggacctgctcccagagaccttgccacactgaatctcacctgctggggacctcaccctggagggccctgggccctggggaactggcttacttggggccccacccgggagtgatggttctggctgatttgtttgtgatgttgttagccgcctgtgaggggtgcagagagatcatcacggcacggtttccagatgtaatactgcaaggaaaaatgatgacgtgtctcctcactctagaggggttggtcccatgggttaagagctcaccccaggttctcacctcaggggttaagagctcagagttcagacaggtccaagttcaagcccaggaccaccacttatagggtacaggtgggatcgactgtaaatgaggacttctggaacattccaaatattctggggttgagggaaattgctgctgtctacaaaatgccaagggtggacaggcgctgtggctcacgcctgtaatcccagcactttgggaggctgaggtaggaggattgattgaggccaagagttaaagaccagcctggtcaatatagcaagaccacgtctctaaataaaaaataataggccggccaggca

SEQ ID NO: 8521 - DNA, 774 bp, Homo sapiens
gaggccggcatggggcctgggctgccgggacctcactttcccagggcctcacctacctagggtctcactagtcgggggatttacctacctggggcctcggctgcctggggcctcggctgcctggggtctcacctgcctggggcctcacctgctggagtctttggtggccaggcatgtgacttacctgggatttcacttgccgggcttcactgccaggagcctcccctgctggggaccttgccagctggggctggggatggtgcctactggggaccttgctttctggaggctgcacctactgaggatctcggctgttggggactttacctgctgggacctgctcccagagaccttgccacactgaatgtcacctgctaggagcctcacccgctgggaggcacagggcccaagggagctggatgtgttgcccaaggtgtgcagggcaggtcagggaagggcagggtcccctaaggaggagggcgaagggtatgtgtgtgaccatcagcagtggtgtgcacatggctgggggacactcggtttgaccgccagcggatgggtgtcacaaatgcatcactatgggtgtgacctcggcgtgactctgatagtgcctgtggatgtgttgcgatgcctcaccctggagggcactgggccctgagaacgggtgcccttgaggccctgcccccgggcgatggtgcaggctggtttgcttgtggttttattgctgttgttaaccacccatgaggggtgcaaacagataatgctgttaacattttc

SEQ ID NO: 8522 - DNA, 67 bp, Homo sapiens
gccctgtgcctgccgggacctccagcctgcagaatgcgtccagaaataaattctgtgtctgtgtgtg

SEQ ID NO: 8523 - DNA, 1467 bp, Homo sapiens
cggccgggagcccggctgcacaccaggctgctgctttgtccgtctatccacccgcccacccgcccccaccccaccggcagcgtccaggtgcggggccgggaaccacacaccccactgggccggccacagtctggacccgcacgtcctgttcaaaagcagactcgggaactgcctgaatgtggtttgggacacgagacctcatcatattgatgagcgaacaaacaagaacatttcctccctcccctcctttgaattgaaatggcacattaagacttgtcacggcttctcactgggactggagacctcgttccttcaccccgcgtgtcgccagcctctgggtccagccagagcccctggcttctccgccacccacacccttcccaccctgctgtggggccctgcctttgtggggagcagccagccctctgcccctgcccagggctccccaactataggcctgggacccccgcccagcttggggggctgctcgtacgagtgtagacactgggcccattggacgtgctgttaactactatcttcatttcccacttcccctctctgattgggggtgtatattttacatctttttttctttttattttcgaaggctttgttttggtttcttaggttaagatgctctcgagcgttgagcaggcacagctctgtcgaggtccctgtcccccacctgtggttctggcctctgaggttgggggactacttgtttcccaccccaggttcctccaggccaagtcatggggtgatgaggagttggggccctgtctgtcctaggcctggagagtgcctgtctgggaaaaggtcactggacctggaagggtccccagggtcccctgactcccgtctccatctgtcacgtggttcaccatcatcaggcaccaggcgcaaactgcttcccgctgttggccatcccttccccagccacaggtgtccctgcccccaggacagtccagggccaggggcttctgtgagaggcagagggggaccctcaccaaatcttggtggaagagcccaggggctggtcccagaacaggcagtctcacaagcacgcagcacactggagtggacgcctgtgcccacccgagcctggagcatggccaagagccagcttgcaccacccacctgggaggccgaggaggaggtcccctgggcacagggcctctttgggacttcagaggaaatctcccagtcccactctcggagggttaagagaaggcctcctgcagctgtgccgtccacacctctaggtcgccagagccctggcccccagcccccagcaagcctgagcccgggaagaaccagaggccctcccgagagacccagtcacacgtctctgctttaagccttagccagctagtgacgagtacaacgagataacgcccatgtgttttggaacatttatgtaagattgtcatatgaaatgtatttgggaactacattaaacttttaact

SEQ ID NO: 8524 - DNA, 1670 bp, Homo sapiens
cagccccggccggcgcctcctcgaggttccaaaagatgccgcctggtcactctgggaacctggatttcaccggctccaccaaattagtgcctcttagatgatgtgatgtttactttgactcaagcgggggctcccggggtcagtgttcaagaaggaaagcagttgttgaagctacagaagcccaggccagggctcccactggctgtagctgtgctctgggtccccaggtccctgcgcagccaccagggccccaccagaccatgggttccttattctggacaaaccctcctctgctggaaccctggactttggccccagtccctttaagagctgaaagggctgtgctgagagcactggcctctgcactcaactggaaccaattttcaccatgattttaaaaattaaaaaaacctggcagagcccgactagaaagggacggcctctcccctcctacctgccaccgctggggaggcacagagctcgccagcgtccctggagtcccctcaggaatggaaagtggagtgcccttgtctggtagcaccatgtgggagggacccagctgggcgcagcgccctgtggccttttagatccagacctccctgccggatgccccgaggcgggaggccggctgtgctgcaggaacccatctccagatgccaaaggacttgaggggcagctgacaatcgctgtgtcccggcagatccgcagctcgaaaaagaacaagccacagaaacgggctcgctcgtgccaggacacagcagtgtctttcaaaaaatcaaaaccagaagttttatcagcagcaggaaggatgtgggactctgtccaagttcaccgtcaccatcaagccactggctgtggaaggagtttgtccaacagggtcagtgtcacagccacaacttcagaaagcagccatcccgcgtgtcgtccaaacagcagtgcctgcgtcccgctccacggagtcttccagaacacctccctctgaactaatcccggagcaccccacccccagcgagtcccacctggacctcttcaaagtcaaaactcttctctcgggacaaacaaatattcgggactttcgaagccctgaacttgagacaccaagtttgtctccatggaaacacgtagccgctgcagttggacagctgcgtgctggagttctgtccccaaaccaactgcagagaagaaagacgagcctcggcccaggacgcgatttctaacgaaatgcaatagttttctctttttggaaaaatgtttataccaatagttttgtgcgctaattgttattagaacgtttcttatgaatgtgtacattgcagtatattcagtcccaaatgttttgttctcattcacacagaaggtactaatgtcagctcacgtggcctttaaaaacctacttccccgcccgcaggagctcagagcatcgctgggcctgcgccagagtgaggggtgcaggaagacaaagacgcgtgctcactttagaaacgaaaagctgggaataatcacactgtttgtctggtcgtatagcccaaaccttagttgaaatcagacagaaagaatgtctttaaaatatacatctcctctccttggagacactgaagctcacagttaacggattgtaatgcccggcttttcctcactcctggtaaccaatacaagctggtttctgcctt

SEQ ID NO: 8525 - DNA, 2660 bp, Homo sapiens
ccctgggccgcgtgccgggcccccaccgccggggtcctgggaggctgcagccaggcctcgcctgccctcctctcccgtctcgcctgcccgcagcactgccttagcgacagccctgtcctcgcccgcacagcccgctgcactttcctcggcggctccctgcccactctccccgctccatcgccaggagccctggggccgggctgggccacacgggagccgccccccgggctctctgggctcccctcagagagcggctggtgttgaaggcagctctgggcagagacagggccgggggcccctcgcccagccttgggaccagcccccactgctcggcgggctgtgcggcgtcgctgccccagcctttctgagcagcggatcgacggctggggggcatctccagcctcccgaatggttcagaacacaccctccgcccaccctggacctcagaaggccctgcctgtgtgtctgcgtcgtcctccgtgtagacctagcgccggctcctccccggctcgcgctgcgctggggtctgtgctgtatagttctctctattatatatgtgtgtgcactgtctggtcaagagcagtgtccatgtgcgtttctgtggcagcagtgcacgtggggtgggtggggggtgcgtacggtggggcttgtaggttaagatgtctctgcggtggtgtggggctggaggccgagccaggcacggcagctggccctctccaggcgcatggaggaattctccctttgccgttccaaggatgccgccgcctcctaccggggctcccgggggggtcagccaacactacaaagggcagcgagtcctcagggcgcccgggagccaccagtctgctctcgggctctactcagactagcgccaacagtctccgcggacagactcgcatcagccgccctggggctcggcctcctcccataggctcctcttcctctctttcattcaagtcttcaaactttgaaaaaaatatgagcttttgccaaataagacgggatagtttatggagttttctgaggcgcattgaactctggtcagcccctcgagcgtgggctcggccatcagcaggcccggtgggttggccgggctggccctcccaggctgcctttctctctggtcgcggcctggcccgccccggcctccaccgccgcaattcatgctggtgccgcgcccgcagccccactcctggtatgcctgagattctccaggggccaagccggtcctccttcccggcccactcttccagggccaggacgctcccgcggagccagcccatcgtggctgggggtcccaggggctggaggcctgcctggttagcctctgtttcccagacattgactcgaggcgcctccagtcctctcaaccccctgactttcaagtcctttcaagtccttgtgccctgaccaagttatgaggaaaagagggctgagggcctggaggtgggctcgcaccccctcgaacccacctagatgtctcctcctccccagcctatgagttcagacttggggggctccatctgtccctccctgaggtccctcatcttgtccctgctctgattctgtcagcagatcctgaacactccttggtggggacccatgcctccaaggctgcccccaatgccagctgtcctggggaaactccccagaactctcggggaaaggcccgagaaccttcggaggaagcctccgggactcctcgccacctgctctgtttctctcccggccccactgccttcaggtatcaggaagagggcaggcccctgtgccccctctccccttcccagggcggccaacaatactccaccatggggcgcttcctttcttctctggaaactaagacattggactgaaggaactggcctgaggggggctgaccgggggcccgtgctgctgggagctctacgcacaagaggccgccggggtcacggacaggaacctcagcccagggtgctggcctttctccttcgcaggagtcccccaaaatccacacagcgactcgagcagccttccactcagccagaggagggtcgggctcccccgcctgctctcggtggtggcgtctggcccttcctgccgtttccaaggcctccggaagcaccaacccagttctcagttacctcctctggccggaaggcctcacgttgtcctccagagctgctctgggcccagggctggctccgtgaccacctgatggacgtgctgggcagcatgggctcccaaggcagcatccccagctgctctcccaccccaccccagctgcccggcggctgggcccacgagggctctggggacacttccataggaaaggggcctggcactttgtgattgccacgtgtttcctgttaagccgcctgcccccagtgcaaatctctgtgttttgctctctcctgaacaaaaatgtaaaccgacgccggaaagcaaatggtatcgaatacctttcttgcccataagggtttttacaaagaacgtgtctcactaggaactaggacactcatcggcccgagaccaactcctggataaaaggaataaggagaatcgtgtttgtaacgagttacaggattgtttctttcctggattttaaacttttgttaaattgtgaaattatggaggagttttatagaaaaaaaaagtgaaataaagtcagatgggaaagc

SEQ ID NO: 8526 - DNA, 845 bp, Homo sapiens
gctgctcccatcgcttcccacctgtcccctcgaggcttctgacctttgatccgctaggccccccatctctgaaccctagagccccgctttccctccaaggctgactccccgctgaccctaacaatacctttggagctcgctttacctctggctacttcatctccgaccctggctcccctttgagccctaatttatctttaacccccttgagctcttccaaccttgacattcccaggaggagccccgcttcaccccttctgactctggaaaccgcacctttaactttgcagaccttccttcacccctgacttctgcttcacctttgacctctgccccccatgaatcccattttacctctagacctataagttctggtttatgtttgacccctccctctgagctgcacttcaccgctgaccttgcctcacctttaaccccccacctgagccccagctcctacctctgaccccaacttctctttgatctctgaatcccctctgactccaacttctctttcaccctctatgagtcccattttacttctacacctgcaagtcctggtttatattggacccctccctccgagctgcagttcacctttgaccttgcctcacctttcaccccccaccccccacagcgtcagctcctacctctgaccccagcttctctctgattcccacaggccccatgcatcctccctgcctcactcccctcagcccctgccgaccttagcttatctgggagagaaacaaggcctggtgcctgtgaggaagagaggtcacccctaccctccctccccgcttccctgcctcaccctcaataaataaattaattgttgtcatgga

SEQ ID NO: 8527 - DNA, 712 bp, Homo sapiens
ggcttggtccaatacatggctctgccccccagaacttaaggctctcactgccccttcgccatcctagagtgaggctctgtccaatacatggctctgccctccagaacttcaggctctcagtgacccttcgacatcctgcttgctccctgactcccagggccccgtagttagcaattctggaaaagttaagccatctcctcctctggcccttccttctggaatcttcagatgcctgttaggccttcttattgtcctcctcctcctggctcggcctccctcacactgaccaagggcctgtgctgcccactgggtaacttctacagttctcccttccacttccctaagtctctcttcagctgtgacttatccaccacatagcccagtaagtcttcagttttggctgggcatgatggtgagcgcctgcagtcccagctacttgggaggctaagcccagttcaaggctgcagtgaactatgatggtgccactgcattccagcctgggtgacagaatgaaatcctggcacaaaaaaaaaaaaaaagtagccaggcatggtggcgggagcctgttgtcccagctgttccgtaggctgaggcacgagattcacttgaacctgggaggtggaggttgctgtgagctgacaccacgccactgcactccagcctgggtgacagtgagactctgtctcaataaataaaaaataataataaattg

SEQ ID NO: 8528 - DNA, 1004 bp, Homo sapiens
atcgaatgaatgtgaacttcttcatctgtgaaaaatcttttttttttccattttgttctgtttgggggcttctgttttgtttggcgagagagcgatggctgccgtggggagtactggggagccctcgcggcaagcagggtgggggggacttgggggcatgccgggccctcactctctcgcctgttctgtgtctcacatgctttttctttcaaaattgggatccttccatgttgagccagccagagaagatagcgagatctaaatctctgccaaaaaaaaaaaaaaacttaaaaattaaaaacacaaagagcaaagcagaacttataaaattatatatatatatattaaaaagtctctattcttcaccccccagccttcctgaacctgcctctctgaggataaagcaattcattttctcccaccctcggccctcttgtttttaaaataaacttttaaaaaggaaaaaaaaaagtcactcttgctatttcttttttttagttagaggtggaacattccttggaccaggtgttgtattgcaggaccccttcccccagcagccaagccccctcttctctccctcccgccctggctcagctcccgcggccccgcccgtcccccctcccaggactggtctgttgtcttttcatctgttcaagaggagattgaaactgaaaacaaaatgagaacaacaaaaaaaattgtatggcagtttttactttttatcgctcgtttttaacttcacaaataaatgataacaaaacctccccgtctgcgggtgctgtctgtctccccccctttccttccctccctgtagttttgaagcggatgtttgttctttatagatgttgtttaaaaagcctgataatggtgattgaaatttacaaactttgtgtttttttttttttaagaaaaatataaaatagttttcttcaggctcaatgtgctttcctaaccgtgccccccccccttttttttttttgttaaataaagtgctttttgtttaa

SEQ ID NO: 8529 - DNA, 352 bp, Homo sapiens
gctgtgagctggacgacacagcctaggcagaaatgggacaggaggacctgatgacccctggccccaaagagccctcgaggcctcaaggttcaggccctggggcagtttttggtggcaaaagcaggctgggggtgggggtggggctctgggtcagaagattcctgaagctggggttggtggtgggtggaggggggcagtgctgggtcagaaaactcctgggactccctccccagggtgcagcctgagacaagaaacgtggactccagtctggccccttgtgggtcgtcctggctccagggcgaaatggtgaacatgtcacacaacaaggaataaagagatggtttttgctgaa

SEQ ID NO: 8530 - DNA, 1911 bp, Homo sapiens
gggacccggagcccgtccccccaatccctcaccccccacacctcagccactggagactgatgatccaaccacaggatccctactctttggccacgagatcccagtacccagatcctggatcctagactcctatgccccaaccattgggtcatgggatcccagcatccagatcctggatcctagactcctatgccccaaccactgggtcatgcgatccccacccttcagccactagatcccagatccccctgtaaccataactgtggatcccttacttcagcaactcaagtctgctaccctaaccacaagattcaagattatccacaccccagcccttaatccccatcccccaaatcactggatcctgcagccccacatcctaaggtggatcccacgcttccctgtgccccctactggatcctggacctctacgtcttaaccactggatcccacacaaatcagtgaatggatcccaacaccccaaccacaggagcacggattccctgtacctcaacacccagaccctgcctccctcaggcaccagatccagtgtcctagtgaaacgctggatcctagatccccaaccccagatccccatgcctcgagccctggatctccaagctcagctgctggattctggatgtcaacaaacctcaccactggatcctgacaaccacaatgcctggatcctggggcccccatcactggatcccagatcccctcactccacccactggattcctgcattggtttttggttttttgtttttttttaacctcgacactgggtctcagatccttctgctgactgccagatccctgcatttcaagcactacgccttccacccccaggcactggatcccagattcccaagccttcacccaccagattctggctcctaaaacaagtgcgggggccccagtggcacagcaagtggatcctggcaactgcagctgctggattccagattctgggtccccaatccctctgcccagtccctcaatgttgaaacctcatctcttgaaggcagatcctgatattccaaggcactgaatcccaagccctgaatccccggtttctgatctgaatcttccaggcgccgggtcccaaatgttcaggccccaagtctagatcctggcagcccagtcacagagtatcccacacacactggtgcccagagccggcttctcatgacatgaaattgcatggtcgagggagtctgtggggaaggaagcccaggtcctggctgcaacctgcacggatgctggattccccctcaccccacctctgcatggccaccccctcccagccctgtggggaaactgttccctggaaccactccactccctgcatccccacacttcacagcatcttccatccccctcccaccttctaggcgaatagtccccagagctgtgttcctccaaggggtccgaggaatcactcactcctggaggctggcaaggagacagtctgaggccagggacacatgaagggatgtccccaccccagcactatcagggcctccccaggcttccagagttgaaagccaggagaaaatcggcaaagaccacccttccctaaacccaagcacccaatgatgcaaaaaacaaaaacaaaaaaaaaccaccaaatccccaaattcattccagatctatttttctaccagagagaggagcaaagtcctcctcccctgcgcccttacattctgcacttcatagttggattctgagcttaggatcatctggagaccccatggagggacttggaaaggggaactgggatttggggaggggctggaggacttccgcacgcttccacctccttcgacctccactgcgccccacctccctgcctgtgtgtgttatttcaaaggaaaagaacaaaaggaataaattttctaagctcttt

SEQ ID NO: 8531 - DNA, 296 bp, Homo sapiens
gaatcaggggtccaagagagaccccagtccctcaataaagccacaagagcccaaaaaagctggtttttttcctggtgaatttctctggtgccctcactctgctcggaaatccatcccacccacctctgtccctccaagggcagcctctctaactggctcctagcagggaattccaggaagcctcctggtcttctagaatcctggcaaccttacaattcctctcggcatttgtcacttccatctcagctaatgcacccaccagctcaaacacaccaataaagcttttgttacatctc

SEQ ID NO: 8532 - DNA, 180 bp, Homo sapiens
ccactgctgctgattagggttttttaaattttattttattttatttaagttcaagagaaaaagtgtacacacaggggccacccggggttggggtgggagtgtggtggggcgtagtggtggcaggacaagagaaggcattgagctttttctttcattttcctattaaaaaatacaaaaatc

SEQ ID NO: 8533 - DNA, 371 bp, Homo sapiens
aggaaggagcgtggtgcattggacatgggtctgacacgtggagaactcagagggtgcctcaggggaaagaaaactcacgaagcagaggctgggcgtggtggctctcgcctgtaatcccagcactttgggaggccaaggcaggcggatcacctgaggtcaggagttcgagaccagcctggctaacatggcaaaaccccatctctactaaaaatacaaaaattagccggacgtggtggtgcctgcctgtaatccagctactcaggaggctgaggcaggataattttgcttaaacccgggaggcggaggttgcagtgagccgagatcacaccactgcactccaacctgggaaacgcagtgagactgtgcctcaa

SEQ ID NO: 8534 - DNA, 46 bp, Homo sapiens
ccacacccccattcccccactccagataaagcttcagttatatctc

SEQ ID NO: 8535 - DNA, 429 bp, Homo sapiens
gagcgcagacacccttcttcacacccgggacccccaggtttttgcgaaccccagaagagaccaaaggagtcgtcccaggctcctcgcgcctcaggtggaatcctgccctgtgcctcacagaagaggtggggaccgcagtcagggtcacctggaccatggtgaacatgtgacctgcagatctggcatcagaggccagagttcaaatgtgactccacctcttaaaagccgtgatttctagcagttgacttcacctctgtgtcggcctttaacaaaatcatagccatacagcagctcaggcctgtaatctcagcactttgggaggccgaggcggaaggaaggcttgaggccaggagttcaagaccagccagggcaacatggtgagacctcatctctacaaaaactgaaaaataaaaaacttttaaaaaatgt

SEQ ID NO: 8536 - DNA, 4801 bp, Homo sapiens
cagtgcctaccgtggcgggggcgggcaggggttcccattttcgctttcctctggtttgaaagcctctggaaaactcaggattctcacgactctaccatgtccaatggagttcagagatcgttcctatacatttctgttcatcttaaggtggactcgtttggttaccaatttaactagtcctgcagaggatttaactgtgaacctggagggcaaggggtttccacagttgctgctcctttggggcaacgacggtttcaaaccaggattttgtgttttttcgttccccccacccgcccccagcagatggaaagaaagcacctgtttttacaaattctttttttttttttttttttttgctggtgtctgagcttcagtataaaagacaaaacttcctgtttgtggaacaaaagttcgaaagaaaaaacaaaacaaaaacacccagccctgttccaggagaatttcaagttttacaggttgagcttcaagatggtttttttggttttttttttttctctcatccaggctgaaggattttttttttctttacaaaatgagttcctcaaattgaccaatagctgctgctttcatattttggataagggtctgtggtcccggcgtgtgctcacgtgtgtatgcacgtgtgtgtgtccattagacacggctgatgtgtgtgcaaagtatccatgcggagttgatgctttgggaattggctcatgaaggttcttctcaagggtgcgagctcatccccctctctccttccttcttattgactgggagactgtgctctcgacagattcttcttgtgtcagaagtctagcctcaggtttctaccctcccttcacattggtggccaagggaggagcatttcatttggagtgattatgaatcttttcaagaccaaaccaagctaggacattaaaaaaaaaaaaagaaaaagaaagaaaaaacaaaatggaaaaaggaaaaaaaaaaagaactgagatgacagagttttgagaatatatttgtaccatatttaatttttaaagtctctggtattagcctcataagttattgactattccccggggttggcggggagtggggacatgagttggtctgcctgttgtggggccgggaaggggagggagtcaggcacaagtggcctctttgtttggtcttaaaggcatccatttctgggaatgaagccatgttcgctgctaacacttttggatgttgtgaggccacgtggagtgtgtgagagactaggttttatggatggtctggttcaggtaccaggtctgctggaaggttcctgttcggataagctggtagctacctagctctgagcctgccttcaagaacacctgtgttcatcctctgattctctgtgtgtacctcttgtggcgtttcctctcccgggtgtgaacatcctaaccgttattgtgcaaacccaagaacgtcagatcccaaagcacaacaacctggatggactttgggaacatctaagcaatgtaagagagaggtgcactgagagtacgtcttggtcccctccaccctgagagcatctgacggtcctcagtactgaactcccggaagctgctctgagcccggtgacctcatctgggccaggtgtggtgcctgagctgaatgctcaggtgcttacagtgttgcaatccctaagagagtagagtctggaggagaaaccgtgaaaaagaccttacacaccaccaagaacttccgaatgggcgtgaatccaccgtttcttctctttgcaaaaagaaccaccacagctgctcaaagaacacagtgaactcatcactttggttcatcaaaaaatcatcgcccatgcgttattcctgagtgcattttcttacaactttttgactgcttccttttcttcttctcttaagagttgtgggcttaagaatgggatagagtcataatggcaacctccaagccctctcaattcttgattaagaacacaggtagacatgaatcccaattgtctattgctatcttatttatatgattcgggaaaatacagcatgtaaaaatattgctgaggagcctcagtgattgggtacaagaagcaagagtacagaaattatttttgccaaatttattttgtaaatatgagggtctgtacctaaatttaaaaaaaaaacacgtagaactaggtattttgttctcttcttagtaaatttgtagtggttgtatactacactagctgcaattttcacatttttctaattcagaaaggtttttcttatattaggggaaaaagtatttattttaatatataaaatcactctgaaaatcactctcataaaaaatggagcgcatgtaaatttttatcaaagaaaaataaacaggtgaatgggggatagtgattttcttttttcagcacagtctacctcagtgtattgttaagatgtgattcaatcatggacatctttgagatttcagaattctacctggaaccggtctgaatcagggaacgtgtgtatcagctgattcgaatgccagggaccagtaagaattttgagggagggagttgggatggagaaggtatggcctttatgcgagcatagatccttttcttcctggctggtaatattcttctctgaatttaatcttcctttaaaaaaaaatcctccatctattgtcactatgttccccaaacataaactaagttccaggctgtcatgatgtatctgatatatggggtaacccagcaaggtgtaccttcctttggtgagagatggctgccggggcaaagacgggctttgattcagagcaagcattcccacctgttccatggaatccccctgaagtgagcacaaaggtgccctgggctccctgatggtttatgcccactcctttcaggctggtgatgcaccttacacacaaacacctaatgcaatgtctttttaaattctccaagtgggatgggagcatgtgagggaaattccaatccaaaacccattaatgtgctgaacgctttttttttttttttttttttttttgcaacaacaccttggacctctgtgttggggtttgactgacctcaagctgatattattggaccttgtgcagctttgataacccatgtgagagtctaggcaggaccagtggggcccaaatcttgctgctcttgtacttttaggcactgcccttgcagactcacctttctccacctgccctggagaaaggtagggtgtgctgggcctgccccttgcaaatgggattcaccagtttcatttatttgactctactgccacagtgaaaagagcaaacagctattgggttgcaaacctcctttgacattaggaaatgttgactttgtaacaataaaactttggtcctagaaagacacggttgtcctgggagtttgtagtgttaagttgcaacaacaacaacaaaaagcaacaaaaccagcttaggataacactttttgttgcttgttcttaaagatgtctcactatgattaaaacccttttcattaatgtagtgaaagccacacaggagttccttcttccaggaggagaataccaagcacatcactttctctctgcatcagtgatgtcaaatacgcatcagaaaatgttcaggttttaggagctgtcctaggtgctgtttcatcattggaagcagtgagaaagagaagcactgctgcttgtctggatataggctgaggatgattgagagaagctgtgggaactgacacaagggtctgcataggtcatcctgtgaccctggggactatgttaccaactgacagacagatctttcactgtatcctagcagggcaggtagtccaccaagaaatgtgcttattggattgggaggtgtttatttgtagtctgctgtaacacgtgtgaaagagcaggagcgtcatcagcatatgacttgcgctggtcatccggtaaatggatgtgctgtagtcccagtgctaatcatttctctccttcacagtgggtggaagtttagggttaaatgtcctttgaatgtcacctggtgagtccttgacaccttaggctcttcagaaacaatggttttgttgaggatggggaacagggaatgccgattttatatacatggtacacagagaggggtgtcacttcagaaaatcttccagcatgttcttcagaatattaatttatatgcgaggtgaggttgggaatgaaaagaacaggtcagcacttttttttttcctagaacatacaaaagaacatggtggactttcagggagtgcaatggaaggtgaatatttccttaagggtccccgagaaatgggagtgaggggaggggacacaatggctttttgagcttacttttaccttctgatactagtcaaggtccagaaccagccaccagccaaatttctatctgggtgcgggccactgaaaatccttgttaaaaaccagatcacaaatctggggctcttggtcccattggagaaggaaggaagagcctcaaaataagtgtgcacccatgcacatattcaggaacagcttgtttagtctttacactttgcctgaaagttgcttctcctcgtccctttgtgtgcctgggtggcctcggccctgtgcgttggcaacgcaggatcaaatgtgctgcagcttttgcagaaaacaactcagaaacacaaaaccccccaacagctcaattattattttttcaatgttttcctacaagagccaagtagcaccatgtacagaagacgcctttttttttggaatattgaaatcgttctgcatgtaaaatatgggataatgacctgtttatattaaaattctgattaaattatctgagaata

SEQ ID NO: 8537 - DNA, 327 bp, Homo sapiens
cactgccggaagagcacagggacacagccagagcccacggagggcccttcccgcaaagcagaagccgccagggcaggggccggggctctcatggagctgcctgtggtgaaacccatgggcagggtgggtggagggactgatgcgaggtcccccaggcctcagcctggagctcctgagccgtgacagttttcaggggccgtgcagggcttcagcagcacctcctgcctgccagctggcgtcttgtatccaaatcaagatgaggaagagggggcctgtcgtgccttgagaaagctggaacgggaatcaattaaacattgtggtgctggc

SEQ ID NO: 8538 - DNA, 60 bp, Homo sapiens
cccgtccctcccccatcccccctccccaccccctccccaatacagctacgtttgtacatc

SEQ ID NO: 8539 - DNA, 67 bp, Homo sapiens
gggcctgaggcatcctgggtctcactcggcccccaaaaactgataaaagaataaaacacttaaatga

SEQ ID NO: 8540 - DNA, 416 bp, Homo sapiens
gcatggatacagccaggcccagagcaagaccctgaagacccccaaccacggcctaaaagcctctttgtggctgaaaggtccctgtgacattttctgccacccaaacggaggcagctgacacatctcccgctcctctatggcccctgccttcccaggagtacaccccaacagcaccctctccagatgggagtgcccccaacagcaccctctccagatgagagtacaccccaacagcaccctctccagatgagagtacaccccaacagcaccctctccagatgagagtacaccccaacagcaccctctccagatgcagccccatctcctcagcaccccaggacctgagtatccccagctcaggtggtgagtcctcctgtccagcctgcatcaataaaatggggcagtgatggcctccc

SEQ ID NO: 8541 - DNA, 402 bp, Homo sapiens
ccccgcccagtgccctggagccgcgcccattgcagcatgtcgtatcctgggggctgctcacctccctggctcctggagctgattgccaaagagttttttcttcctcatccaccgctgctgagtctcagaaacacttggcccaacatagccctgtccagcccagtgcctgggctctgggacctccatgccgacctcatcctaactccactcacgcagacccaacctaacctccactagctccaaaatccctgctcctgcgtccccgtgatatgcctccacttctctccctaaccaaggttaggtgactgaggactggagctgtttggttttctcgcattttccaccaaactggaagctgtttttgcagcctgaggaagcatcaataaatatttgagaaatgaa

SEQ ID NO: 8542 - DNA, 3042 bp, Homo sapiens
cagaacttcacccccttttaagctacagttccttctctccatccttcgaccttcacaaaatctctgggactgttctttgtcagattcttcctcctttagaaggctgggtcccattctgtccttcttgtcatgcctccaatttcccctggtgtagagcttgtttttctggcccatccttggagctttatgagtgagctggtgtgggatgcctttgggggtggacttgtgttccaagaatccactctctcttccttttggagattaggatatttgggttgccatgtgtagctgctatgtcccctggggcgttatcttatacatgcaaacctaccatctgttcaacttccacctaccacctcctgcacccctttgatcggggacttactggttgcaagagctcattttgcaggctggaagcaccagggaattaattcccccagtcaaccaatggcacccagagagggcatggaggctccacgcaaccccttccacccccacatcttcctttgtcttatacatggcttccatttggctgtttctaagttgtattctttattttattattattattactatttttcgagatggagtttcactcttgtcgctcaggctggagtgccatggcgcgatcttggctcactgcaacctctgcctcccgggttcaagtgattctcctgcctcagcctcacgagtagctggaattacaggcaggcgccaccagacccggctaattttttgtatttttagtacagatggggtttctccgtgttggtcaggctggtcttgaactcccgacctcagatgatctgcccgcctcggcctcccaaaattgctgggattacaggtgtgagccaccgcgcctggcctattattttttgtaagaataaaacaggtttattgggatttgggactctgaacagttctgtctctactacctgatctcctcctaccacgactttgggatctagaggagctttggctccggctgtgacggctccggccgttctcactgcggctgcaccggcccccgctgcggtcactatttcttcctctgctaggtgaattgtgcctctcctggctctttgacatgtgctagtgagatttcttccttttcctttcggattccccatttcttttgtaggaatggtctggactagggttctccttccccgcagcctgtagtattcatcgtggtggcccaccctctctctccccttggagctcttgccaaaggaggagacaagcagaggtctctattggatttctcaacacctgaagaaagttgcagtgttttcctcttggacattgttgtatttcaaataaaccacaaatcatcattttccaccgagccactgggcagaattcacactgaagctgtcgtcctgcgtacataccatcgtccgttaaacagagaaagagctgcttggcattcttcttccgactggtactgaacatatatacttgcccctcaggtgaggttccaagttgcaactgaccttgaactgaatcactctccccacgttattttttaattactatttttttttaaagatggggtcttgctctgtcgccaggctggagtgcagtggcgcgatctaggctcactgcaacttccgcctcccgggttcaagcgattctcctgcctcagcctcccgagtagctgggactccactaaaagtacaaaaattagctgggcgtgcaccactgcgcccagctaattcttgtatttttggtagagacggggtttcaacatgttgaccaggatggtctcgatctcttgacctcgtgattcgcccgccgcgtcctcccaaagtgctgggattacaggcctgagccaccgcgcccagtctctccccacgttcttgaactcgggcagcacatcctcacagaaatctaggaactgttggtaggtttcttcctcgctgtactccaggcttgcttcggagtcatagtcatccctcctgcactgctcctttccaaacactgtaaacatgcttttaataagaagggtaggactggatgttgggaaatcatgtgaacatctatctccaaatctgcaagctcctgttttactgtagaagggacaattaactccatccttctccatgactctgaaatccaagggggggttccgggttttgccatgtggcgccattttccaactcattttcagcctgatccagcatcttctggacagcttccggtttttgtttcttctgtcgtttctgttcctcctcctctctctctttcctctgctgttcttcccattgttcctttaactttcgctcttgttcttgccgttttctagccacctcttccttttccttctttattctgaattcttcttgtgccttctgctctctcagcaaccactcctcatgtaatctttgcctctctcttccccatagcttttctagttgttgtttttcaataaaagtgtcctcctctttctgtgagagtcctgagtccctcagtggagcaagttcctgctggcgtttctttcgtttctccttcttcagggcggccctgtactttttgtggcttggtttctctggaaatgtcaccttttcgggcgcagccatcttgccggcaccgccccgcccctctagttgtatcctttataataaactggtaaacattgtaaccgcagattcagcccaatctggttcaactttgtgtaataaaatggcgagttgtttttcagttgtcgtggacccccaggttgcaagttacataccctgggcatgtccagatgaacgaagcgtgcaaatccacgtggaacctaagtgctcagaccgaggaacagggactgagttaagaagtggacaccacgtggcatgatccttgatccaatcagattgagccctggcgtgatccagtcagatcaagcctcctgaatcccctcattacaagatccaatcatatcatgcctcactaccctctgtatataaaatctgccccagcctccaacttggagagacagatttgggccagactcctgtgtccttgcttggctgccttgcaataaatttttctctctac

SEQ ID NO: 8543 - DNA, 791 bp, Homo sapiens
ggggcgcggcgccccctagccggccctgcgccggggtctcagagggccggcccggcggggggcgccgcggggccaggactgcgctcaggatcccgccccggagcccccagcccgggggagagggggagggagttgggagaagcccagcccctccccctcgagacccctcccatgtcccttcctggcctggccggagccccacctcgtgcctttatccgccctgtcccttcctctctgcgcatctcacccgcccggctggcccccacccccgactctgaatcccgggcgggaggaggacccccgcaccgccccctccccagcgtgtaagtggctctgctattgtgcgtccctggaagtggggacccccttgtccctcctccctcccctgttgtctggccgtcgtcaaccccaccttgactgagtgttgagcccgtccttgggctctggtccctgcggggcaggctctcccgggcccacggggcggacgctgcataccaatttgccctgcaccgcctgtcccggagacggagcccgaaggcctgccatggcggctgtgtcgaggatgcgtggcgcctgccgtggcgggacagcgtgggcaggctcatttctgcccccaacccgggccccaggacaggtcagcgcgccctgccccggtgcccaccgctgccccccatccgccctcctgccacttgcccctgacccccctgccgtgcctcccgcagccctcccatgccgttccactcctccctgcctctgagccgaacatgataataaaagctattattgagcgc

SEQ ID NO: 8544 - DNA, 468 bp, Homo sapiens
gtgtggtgccggagccaggtagccccggcctgggtcatcaggcacagaggcaccgcaacaccacctgcggcaactccagacctctgggaacaagactgcgggctctgcccccagctctgccaggacggctgcaagaccagctggcccgggaggggacaacgggctgttgcgggtgcgcggcagctggagacactcccccgcagggccaacccctgccctgttgctctgccctgcaggggtcccggcgcctggtcacctggggtgcacacaggtcacacagtgccaagaggccccagggcccagggactccccccacagcagggtgggacccgggacccgcggctcagtggcccgctagccacgtcagccaagccactttaggtccattttttaattttaacagtgctcttccatcttgtgcataagcctgagatttggaaagaataaaacaccgaattgcagaagagc

SEQ ID NO: 8545 - DNA, 4909 bp, Homo sapiens
ctcgctcatgcttttttttgtacggaatagataattaagagtgaaggagttgaaacttttcttgttagtgtacaactcattttgcgccaattttcacaagtgtttgtctttgtctgaatgagaagtgagaaggtttttatactctgggatgcaaccgacatgttcaaatgtttgaaatcccacaatgttagaccaatcttaagtttcgtaagttatttcctttaagatatatattaaacagaaatctaagtagaactgcattgactaaccagtccctctggatggtggtgaacctgaagcatgctttaacctctaagactgtctaacacgcgtttcattcaatgtctccacagactgggtagcaaaaaaatcaccttttagttttagtttttaatctaaagatgttagacagatgctgagtgtgcgttttctcaaccgcttcaacattgtaagcgatgtatgctttggttgacaggaagttccttttccaggcaggtcccgttgccacctcctgctcactcagtcccgggctctgccgagtggtcctgggaatggcggcgggcccgtccagcgtgggccaccactggggccgggggccacgggctgcatgctgggcgggccctccagagaaggacacaaacgtgtttcgtaagcccaggcaccaatgggaatggaccaaagagtttcagggaaactccagtatattccagagtcagatctaagctccaggcacgcctgaagatgtgttgctactctgacatcccgagtttctgtccacacattgcatgcacagcgccccacacattggatactgttgttcacgataatttctcccgttttccagagcatttaacatagcttggaggcgtaaaatggctctgtattttaataacacagaaacatttgagcattgtatttctcgcatcccttctcgtgagcgcttagacctttttctattttagtcggattttgttttggaattttgcttttgtatgaacactcagcagaaaagtacttacttcttgccagttatctattaaccaaaacctttgatttgtagttttaaagattaaccctcaaagttctcttcataactgccttgacattttgggttgttctgttctgttaattttcttttgcttttttgtgttttttgtttgtttttacttttgcatttaagaccattaaatttgattttgttttgctcgaattttgttttgttttttattttaccttttctttctttttggctagggaaggtgcaggtggcccagcattcagggaggagtcgtaagatcttaagaaaccaatccttgcctcaagcaaaagcatttctgaatctgtgacgcaagaatgtgcagttacaggctggtggcttttaaaccaggagcccggaggaagggtgaaagagaaagcctgtgaaataggcagggccagatcacccaaaactcctcaggactgggatctggcgtttataaataactagtttacagagagaatcacaaacaggataacttagtaccagcagtttttaaccttgacgtgagactaaaacgtgaccgtaggctgttttttagttattgctctcatgagatgatggctgtatttatctgtttatttatacctatttatgtatttatttattgaagtgtgaaattgagcaataggcaggcaccaccgtccccagagcaggtcagcgtctcgagaggcccctggacaattgaggatgcccatcccctcccctttccctgatcttttactgaggggctgtgtgcgcgatccttgcaaattgatgatgttgccatccgtacccaggctgtgtctcataaaagtcggcctggtgccagagaggacctcctttctcccacagaatcccagatcctcaggaaaagccaaaaccgaggcccattgcccggattcgacacaaaagagggtccctgctctgttgcccgagagcagtctgcatcctgggaccagaatgctttcctggaaaaagaagcctttcaggtttccctgggccagcatcttctgatggaaggtgggagccaacacccttctgatggaaggtgggagccaacacccttctgatggaaggtgggagccaacacccttctgatggaaggtgggagccaacacccttctgatggaaggtgggagccaacacccttctgatggaaggcgggattcccgcttctgaaactccccctggagtctcactcccacacatgcccatagctagcattcaacagagaactctgtcttaagcttcaactgtgaaaatgatgacgggcttgtagcacctcagcttctttcctcgcccccttttatctgaatcctatcaattattctgatgctgggacaggtgagaagaaactgtgaagtatatgagcctttgaaagttccctgaagtttctcagttcaggaacattctcattgtatgtggtctccgctgtttgaacagccttctagctaaaaaattccaaagcctttatttgggagtcttagcttgcaagcttgtggaaggatttagcttaacaactgtcactcctgaaaagcaatctctgttccatcaaggttctagttgctggccctgtgtcctcaaagttcattacatcttatcaaggcctgtttgcaaaggggagatcccttttcttaaaaaaggctcaacccaaaagaaaccatttcttaaaaaattttacatagatcagttgtatttctatttagcaaaaatgagtgctctgcttttatttgggaatttcgatgaaaaagcgttcagagtagataatgttcatttatcaaaaatctggtttgggaaataccaaagaggctttgattgaattcccttttgacccgtgtgtaacttcctctggtagttagaccccaggcagctccgaatttgtgaacctgcttcctgatgaattctcccttgttcccccttggctctgccattatttcgttttcagtgtaatttgccaagccgcagttttctgtgctggctgtgcctctagtcgcagctctgtgactgattccctcccgggtgctgagtcccctccccggccaccatcctgcgtgaatatcctgaaattcatgggcttcctcgggggcccgcccgcaggtggtgctgggtgggttccgccaccttctcctggaaggtgagccttttcctggccaagggcagctgccttaacctctgagagtctgcgcttggccttagtcctggagacccagcctccagggactgaaccgtgctgctgttgggagccaagaccggccctttggagccggcagcccaggggtccctgctggatcagagaaatagaagcacccgaagacggttagtggcaattccttgacccggtttgcttccaaatgaaggccatttgtccaccaggcattgaaaagacatgacttacccagtccggcatcggacttgaaaaatcgaaattgacatcactcagctgttacatttcacatccgattcagcccccttttatttccatgtgcttttcgcagccttcctgtgttggatgaaagagaataagaattcagctgacaggaggcctctatcctgtccctccaccccaccctccacctcaatcccctcccatcttccccagacctacctcacctactaggacctgaggcagctccttagcagagacccctggggtttagctgactctgggggtcaggggttcctgtccccaaacttcgcaagacagccctgaagtcacaagtgctttcttttaagtggcattggcaattggcgtgtaatgatggcagtagaatctgaatctcggatcccaggcagggttcacatttccaaacctttttgatttcccctgacctctaatggctggatcctatttttctacaacctttcagtgacatcgttcaggtttctttcttggccatttaaaaaaacaaattttttttttctcacttgtaagtcaccgccagtacctaagttaggctaacggagactttgacaggactggatttttcttccaccagaagagaagccttttccgttggtttggggccacctctttgaccatgaccatgtgatgttccgtttacagtgacttgctttgggggaggggaggctctcttaaccgattcccatgttgtacagtagatggttagaccttttgtatattagtgtgttttaagttattgatttgttttatataaaataatttatttttcaggtgccatttttcattttaactttgtttttacatgggtttgttttcaataaagtctgacactggtgtccaaaagtcaacaataaaatgaatcccattgtgttcttttgaagatgcctatgtaacttttaagctttttaaattattttcagaaaaaaaaaaagaaaagcccttatcagttttccatcagcccattgcctttttattttttttttttaatccttgtgaataaatgttctttagtgttttaggaggaaaaagcaaacctagattttgataacccagaagacttcagattaataaagaagctttgaaagaagaccatttttcaaaattttagtgaagtgtgaatattttttgtcaatggctttctcaaagagaatgaaacttttgcaccattttcagagtttttatagagatgccaaattgatatatttacatgtaatggaaacatgaaaaagttttattaaacaattgttcatagctgtgtagacattttaattcagtttccaaagctctcaaaaaatcgtatttttgaagtacggagtgatgcggtttggggcgtggcttacagttccaacgactcaattgtcccgatactcagttctttctacaggtatcaggttcgtgttaaacgctgtatgttaactatgactggaattctgtgatattttggtaataaatgaagtgggatcattgcg

SEQ ID NO: 8546 - DNA, 254 bp, Homo sapiens
gctgcctcgtctggctcactacacctagctgtggggagatctcctcgtcagtcacctcagcctttggcgcacagaagggtccagggtcccctgctcagaggctaacactggccgaagagaaaggcaatttcagttggggtgactgtggcaggaaggggctcactctggccccaccaaggtgaggtggggaccaagtgatagagccctgatccacccactctctgaaacttctttgctaataaaacattcctact

SEQ ID NO: 8547 - DNA, 515 bp, Homo sapiens
ttgggaggagcctcagtgggccccagctgtccagagaagggggattctggaactgggaaggactgatccccagaagcgatggctgaccagattgaaccccgaaactcaggaagagtgaaatgctacacgacaacctcaggcaagcccggcctctgcctgggcctctgtgccagccccgggggccccccagttactcagtctttcctggagacagcaagaagctgcaatgtgcaatccccctgcccccacagccaaggtcaggaagaggccctgtggtcaccgtgtctggccaatctcaggctttcacttctgtactgcactgtggcttgccctggcggggggcagggggttggcaggacatggcaatgggcaactggggtgggcacagggcttattcctcggagtagaagggtgtacagggggcccagactccacagtgacttgccacatttgccccccatttggagaatgcttttatatcaaaagtggagacgataataaagttattttgggtt

SEQ ID NO: 8548 - DNA, 336 bp, Homo sapiens
ggacaagcacttgccaccaccgtcactcagccctgggcgtagccggacaggaggagagcagtgatgcggatgggtacccgggcacaccagccctcagagacctgagctcttctggccacgtggaacctcgaacccgagctcctgcagaagtggccctggagattgagggtccctggacactccctatggagatccggggagctaggatggggaacctgccacagccagaactgaggggctggccccaggcagctcccagggggtagaacggccctgtgcttaagacactcctgctgccccgtctgagggtggcaattaaagttgcttcacatcctc

SEQ ID NO: 8549 - DNA, 155 bp, Homo sapiens
cactgcaccctcacggccacccgactactttgcctccttggatttcctccagggagaatgtgacctaatttatgacaaatacgtagagctcaggtatcacttctagttttactttaaaaaataaaaaaatagagacagagtctcaccatgtttcc

SEQ ID NO: 8550 - DNA, 132 bp, Homo sapiens
gaccggtaggcgtggggccaggacagccagccagcccagcgcccgctcacccaggagccctggatcccggcgcgggaaagtcacagagctgcctgggcttgtacctggccacataaagccccagtttaaagc

SEQ ID NO: 8551 - DNA, 134 bp, Homo sapiens
ccaccagggaggggtggaggggctttctttcctgcgccctgcggggtctggtggataccaggaggcagcagtgctcatccccttcccagggggcacaaatgccaccgtcccgaaatacaggatttttgccttaa

SEQ ID NO: 8552 - DNA, 413 bp, Homo sapiens
gctgggccctgggatactgccttctctttcgcccgcctatctgcctgccggcctggtggggagccaggccctgccaatgagagcctcgtttacctgggctgcaatagcctaaaagtccagtcctttggcctccagtcctgcccaggccctgggtcaccaggtcactgctgcagcccccgcccctgggccctggtcttcctccaacatcacacctgctgcccattctccatttctgtgtgtgtcaaaggggactaacagcagaatctacctcccaactgccatgtgattaagaaatgggtcttgagtcctgtgctgttggcaaagtgccaggcacagttggggaggggggggtccttaacaagcgtgactttgctcattctgtcatcactaaggcaataaacctttgccaggtg

SEQ ID NO: 8553 - DNA, 651 bp, Homo sapiens
ggggcgcgcggcacccggagccacagctggcggggtctccgccgccagccctgcagcgggccggccagagggggccccgggggggcgggaactgggagggaagggtgagacggagccggaagttatttattgggaacccctgcagggccctggctggggggatggagaggggctggctatccccccagagcccctcttcagcatccgccccttccagttcacatagtgagaccccccctccagggtgggtctggggaggggacagctgttcaccccagcaccctttgaacccacccttagggagtccccaacactccccccctcctttgatcggaatatgtactgtgaagagtaggggtggggaggtggtctgccggtgccctgccccccagcactgccctacccctccactccgagctgggggggaatctgtgtctgctatgggaggggggggggtagcaccacctccctgacaccctcccctgacctgactagggggaggatccaccccaacctctgccctgcccgccccaggggcaccccgacatccaggccaccccctcatggtgctacagaccctgccctggggcccacacactcctgccaggaagccctacatcaataaagttctgtcttgtgtagatttctacg

SEQ ID NO: 8554 - DNA, 47 bp, Homo sapiens
ccagggcagagctggggagggcgtgggggcagtaaagcctctgctac

SEQ ID NO: 8555 - DNA, 1575 bp, Homo sapiens
attactgcaggaacttctggaggaaagcactcattgatctttcatccctaagatagtttgagagagctcacactggatatataagttatttgttgcagcataacaaatgatccccgcaaattttgtggcttcaaacacgaaatgtttattctctaacaatttctacagatcaggaattcaagaacagcttatctctgtagttacactgcaggatctctcatgcctttacttacaatcaagatgtcagccaaagctatagtcatctaacatctttactgatgaacagtccacttccaagatgacttattcacatgcctggaaagttgatgttggttgttgtcaggggaccttcagtcattaccatgtaggcctctttacaaggcccagctccttgacaatttggcaataagttctcgccaaggttagtgatccaagagaggaccaatacagaggccaaaatggcttttatgacctatcctcaggaggactgctaagctttcacttatttcctattgtgttggtctcacaacacaccaatcctgatacaatgtgagagactgcagaaggtatgaataccaggaaacagataactcagaagcatctgggaaatttgccatggaattaatgaagaaaagccctcagcacatcatccttctactctaatcaatatgaaatagcattcagtaactcctattaattcactctgaagagaaaccttttgaggacaatctgtatggtaaagctctcagctcgaattctcaccttcatgggcccagaagattatgtactgagagaatcctgaagaatggaacagctgtagaaagccttcagtgctatcagcagggattcatgtgacagctcacactaagggagaaaacctgtgaaggtctcagaaggcttcagtgacagtcatcccttaagacgcactggaaatcacacaatggaacaacactcagaaatgcggaataccctacagcaaaagtgttcacattactgagcaaactatagtgtggtattctgcagtgactatgggaaagccttgaatgttctatcggtttttaagggacttgagaattaattctggagagaatgccccattgaacatcatcaatattggagagctttctgtttttctacatttgttaggaaacttgtgagcattcacactacagagaaacttgaaatataaagaagaagagaaagccttcagtgatgcctctgtgttagggaaaatatggaacttctccctggatgcaaaacctatgagtatattaatattggaaaatttttcagtgattcttctctttcttgtatatgagagaacttatatggagaaacccctaggaatgtaatcagtgttaggatgcctcagcctgaactcttcactgagtggccacaattttcactgggaacaaaaagtataatcactgttttgagtgtgggatatcctttatcagtgtctcatctgtagattggactgctggctcattaatttttttagtctttttttcttttaatataaacatttgtgtatagctgttccctaaaataaacattaacatatttcataatttt

SEQ ID NO: 8556 - DNA, 87 bp, Homo sapiens
ctggaacttgccggtgcctggggtgcctttcccccagccagggtccaaagaagcttggctggggcagaaataaaccatattggtcgg

SEQ ID NO: 8557 - DNA, 679 bp, Homo sapiens
ggaatgtgggaaaacctaaaggtgtccctgttctctctgaagacatgaaaactcactggggagaaaccctatgaatgtaaaaatgtggaagcaactttgtatctcaggtcttaatgaacacatatgaattcacagtggagaagaccctgcatcagggaatgtggaaatgactttgctgaattctcaagccttaccaaacacatcagaaatctcactggagagaaactgtatgaatgtagagaatctgggaatacctttctgaatcccacaaaccttaatgtgtgtatgtgaactcacattggagagaaaccctgcaatttaaatggtatggtctggatgatgccccactccatatttgtaagccctaagtcctagttccttacactataactgtatttggacatagggttttcaaacaggtgagtaacttcaaatgaggttgttgggttcgatccctaatctgacatcactggtgtccctataagggaaactgaaggaaggatacacatggagaagactgtgtggatccaccagaagatggccatctacaagccaaggacagagacctggaacagatgctttcattatggcctccagaggaaaccaaccctgtctccaccttgatattgcacttccaggctccagaactgtgaggcaataaatttctcttggttaaatc

SEQ ID NO: 8558 - DNA, 219 bp, Homo sapiens
agagaagccctgtggatgtgaagaatgtggaaaaacctttgctgtttcctcaagcctaactgaacatgtaaaaattcacaggagaaagtaacactatcaatgtaaggaatgtgagaaagcctgaacagttgaatctttctagatatgtacaaactcacactgtagagaaaccctgtaaatgtaagggatgtaggaaaacactagttcttctctctctct

SEQ ID NO: 8559 - DNA, 373 bp, Homo sapiens
tgagaaactgtccatgtaataaatgtgggaaagctctcatttgttccagttcactttaaagacatgaatgaactcactctggagagaagaagctgcatgaaaattacttaattcctgtaatcccagcattttgagaggctgaggtgggtggatcacttgaggtcaggagtttgagaccaccctggccaacatggtgaaaccttgtctctactgaaaatacaaaaaatttagccaggtgtggtgggcacctgtaatcccagctacttgggaggctgaggcaagtgaatcacttgaacccaggaagcagaggttgcagtgagcagagatcatgccactgcactccagcctgggcgatggagtgagactccatctc

SEQ ID NO: 8560 - DNA, 324 bp, Homo sapiens
agaaaaactctgaatgtaaggaatgtggaaatcttttaggaatttctcataccataattaccacatttgaattcacactgaagagaaattttattggtacaaagaatgtgaggaggccttcagttatccccattcacttcgaagacatgaaagaactcatactctatgtgtcccctataaattttaggaatgttagggagccaatggaatctttttttattattttattttattttattttattttattttattttattttattttatttgagacagagttttgctgttgtcatcacacaggctggagtgcaatggcatgatcc

SEQ ID NO: 8561 - DNA, 1736 bp, Homo sapiens
cccatcggttgccatctttaattattggcaatgacaccaaagattatcagatttgtcctaaatgccttttggaggttgtaatgactcatggattggccttagataccatcctgagggtctgaaattaaacctacaggttctgaatacaacatcatggttgcctgagtctgggcatctgtgaagaagggtcatggatggtgaggtcagtactgcaggctgcctcaccttggtgattagattcctaagatcatagcattaacaagttgtgtatgagataaatcatgcagattgaccccagcccctgttggttagtggctgccagtgtggcacatttatgtcaaaatttaccagaagccaagatgatgtaggaccccaaaggtgggttgttaagagatgctcctccaagggtctcttctgatcccacggatcctgcagagcgtgtcaggaatgaaaccatccataactgccagtgccctttcacagctgattatttctgtgtccccttgtaaaatctaagaagtgtgacagccttgcctgttctgccttgtatgtctattttagatggcacaatgtaagtggcaatgtctcttctagtataatccagtctctcttctcacttctgtcaaggtggctgatatagtccatgaatcccactcatgatctctttatcagatgatcgttcagccacactttgaggattctcttcagtacaagttttctaatttttgcattatggataggctgagaattttccaaatctccaagttctggttcctttttccttaacaattttttctgcaattcaggtctccttttgcatttttgctgagaccagctgggtcatggagaccctgacccagcagctctagaggaattaagacaaagacacagaaatagagtgcagagtgggaatcggggctcacagccttcagagctgagagccttgaacagagtttgacccacatatttattgacagtaagcctgtgataaacattatttctatagattatagattagctaaaagtattccttacaagaaagaaagggacaggctctggcttgttatctgcaacaggaacatgtccttaaggcacaaatcactcatggtattgtttgtggtttaggaatgcctgagcagttttccagttttccaccgtgggtgggccaggtgttccttgccctcattcgggtaaaccagcaacctccagcatgggtgtcatagccatcacgagcatgtcacagtgccgcagagattttgtttatgggcagtttctcatggcctgtttatgtccaaatttggggggcctgttctgagcacattttcctgtaagcactcaggaagaatgaagcttcctgtgtcctttaacactttaagtacagatcttagtgatacataaccagttttatctctctcaagctctaccttccgcaaagtgctagaatacagttctgccaagttcttcactacttcgtatcaagggttgtattttctttatttcccaatagcatgttcctcattccccaatgacacctcaccaggatcacccttaccaaccttacttccagcttgcacatcagaatttttccagcctcatttgtcagtttcaaatctgcttcacatttttagtttttttgtttgtttgtttttaatctgccttaatgagctcaggccactatcacaaaataccacagaccaaatggcttacaaatttgttaattttaaataaatgaggtt

SEQ ID NO: 8562 - DNA, 4272 bp, Homo sapiens
atgcaagatatgtgggaaagaatttctgtattcctcaccccacctgtgaactcctaccagagagaaaccttttgtatgtaaagaatttgggaaagcatttgctctttcctcatgcctaagtatgcatgaaagaattcacactggggagaaatactatgaatgtaaggatatgagtgttgttaccatttagcccattggttgccatctttaattattggcagtgcaaagatcatcagattagtcctaaatgccttttggaggttgtaatggctcacagattggccttagatgcatcccgagggtctgaaattaaacctacaggttctgaatacaacatcatggttacctgagtctgggcatctgtgaagaagggtcatggatggtgaggtcagtactgcaggctgcctcaccttggtgattagattcctaagatcatagcattaacaagttctgtacgagataaatcatgcagattgatcccagcccctgttggttagtggctgccagtgtggcacattcatgtcaaaatttaccagaagccaagatgatgtaggccccagaggtggattgttaaaaagatgctcctccaaggttctcttctgttcccatggatcctgcagagcatgtcaggagtgaaaccatccataactgccagtgccctttcacagctgattatttctatgtccccttcttgtaaaataagaagtgtgacaaccttgactgttctgttctgtcttctctgtccattttaggtggcacaatgtaagtggcagtgtctcttatagtataatccagtctctcttctcacttctgttaagatggctgatatagtccatgaatcccactcatgatctctttatcaaatgattgttcagccacactttgaggattctcttcagtacaagttttctaatttttgcagtatggataggctgagaattttccaaatctccaagttctggttcctttttccttaacaatttcttctgcaattcaggtctccttttgcatttttgccgagaccagctgggtcgtggagaccctaacccagtggctctagaggaattaagacaaagacacagaaatatagtgcagagtgggaatcggggctcacagccttcagagctgagcttgaacagagtttgacccacatatttattgacagtaagcctgtgataaacattattcctatagattgtagatcagctataagtattccttatgagaaagaaagggacaggctctggcttgttatctgcaacaggaatatgtccttaaggcacaaatcactcatgctattgtttgtggtttaggaatgccttgagcagttttccagttttctgccctgggtgggccaggtgttgcttgccctcattctggtaaaccagcagcctccagcatgggcgtcatagccatcacgagcatgtcacagtgctgcagagattttgtttatggccagtttctcattgcctgtttatggccagatttggggggcctgttcccagcacattttcctgtaagcactcaggaataatgaagcttcctgtgtcctttaacactttaattacagatcttagtgatacataccattttatctgtctcaagctctaccttccgtaaaatgctagaatacagttctgccaagttcttcaccactttatatcaagggttgtcttttcttcatttcccaatagcatgttcctcattccccaatgacacctcaccagaataacccttaccaaccttatttccagcttgcacatcagaatttttccagcctctactcatttgtcagtttcaaagctgcttcacatttttagtttttttgtttgtttttaattgcagtacctcacttctcagtaccaatatctgccttagtcagctcagacaaccataagagaataccgcagaccaaatggcttagaaattaatttaattttaaatcaatgaggttaaaaacacaggattttttttttttttttttttttttttttgagatggagttttgctcttgttgcccaggctggagtgcaatggtatgatcttggctcaccgcaacctccacctcctgagttccagtgattctcctgcctcaccctcagtagctgggattattggcatgcaccacaaaccttagctaagtttgtatttttagtagagacagggtttctccatgttggttaggctgatctccatgttggtcagatctgacctttggtgatccacctgccttggcctcccaaagtgctgggattacaggcctgagccaccgtatctggcccaaaacacaaatttatattctcacatatctggaggctggaagtctgagatcagagtgccagcatggtcaacctctagtgagagctctcttcctggcatgtaagtgcccacttcctcatgttttcacacgatggagaccaacaaataggtcggtcggtctcccccctccccgcccccttctcttttcacatacagtcacattgaggtttggaacttcatatgaaatttggggggtcactgtgtgtgtgtgtgtgtgtgtgtgtatgtgtatatatatatacatatatatacacatatgtatgtatacctaactcctaaagtggaacagtaagagtcattatttatagattatctgattctctatgtggaaagagaaaagaatcatattaagtactttggactgaacaatgacccccaaaattcgtatgatgatgaagctctctctaaatattttcttgctttactggactgattttaacccgctgcacaacaccaactaaaagtagtaataccagcatacttgtctttgcagttctggtgagatatgcactctattttgttggtttggctgtaggcttttatttcttttttattttttgaagaggttatgtcctgtcagggaaccagccccgatattcacataggttcttttctattttccctaagtgtcagccaacttgagaaataaagggacagagtacaaaagagagaaattttaaagctgggtgtccggggcagacatcacatgtcggtaggttccgtgatgccccacaagccgcaaaaaccagcaagtttttattagggattttcaaaaggggagggagtgtgcaaataggtgtgggtcacagacatcaagtactttacaaggtaatagaatatcacaaggcaagtggaggcagggcgagatcacaggaccaaggtgaaattaaaattgctaatgaagttttgggcaccattgtcattgataacatcttatcaggagacggttttgagatcaactggtctgactaaaatttattaggtgggaatttcctcttcctaataagcctgggagtgctatgggagactggggtctatttcacccctgcagtctcgaccataagagatggctacacccaggggggccagttcagagacccactcccaggtgtgcattctctttctcaaggatgttccttgctgagaaaaagaattcagtgatatttctcccatttgcttgtgaaagaagagaaatgtggctttgttccacctggctcaccggcggtcagaatttaaggttatctctcttgtttcctaaacattgctgttatcctgttcttttttcaaggtgcccagatttcatattgctcaaacacacatgctgtataatttgtgcagttaatgcaattattacagggtcctgaggtaatatacatcctcctcagctgacaggattgagagattaaagtaaagacaggcataggaaatcacaagggtattgactggggaagtgataagtgtccatgaaatctttacaatttatgtttagagattgcagtaaagacaggcataagaaattataaaagtattaatttggggaactaataaatgtccatgaaaccttcacaatccatgtttttctgccatggcttcagccagtccccccgtttggggtccctgacttcctgcaacaatgtcctgcaggaaaagttttttctttatatccagtttttacatgatgaattatttcccaatatttcatagtttatgaggctgaattcctcttgaatttattaaatgcttccttcacatcctctgtgatgatcatgtttatttactgataaaactcaatacctagaactgcacctagctcatgatggtacctaataaatacttcaatgaaatgatgtggtgatgcatgcctatagttttagctacttgggagggtggcctgagcccaggggttctagaccagcttaggcaacatagcaagaccccatctcaaaaaaaaaa

SEQ ID NO: 8563 - DNA, 627 bp, Homo sapiens
ctactccacctgcccttgggacccatcccagttttcatcattgagccccagaccctctgagcagcaccttgaagagggcagataatcagacttgaggaaactgaaagccccaggttgagagaacagaggcctagggacctccagaccattggaatcactgtttgccagctgtgtggccttggtcatatcatcagcctctgggaagcctagttcccacatctggaaataaggatgatcatagctacctcacggttacattgcaaagccttactctaaaagctcccagcctccagaggctctcaatgaagagtcaccttcatggtcgtcttcaggaacaggacggatgaagaaggggtggggttaagactcaggggcacctgagggtctgagcccccttatgagtacccaagaaggactgtctatgcatgcacacccacaagcctatacaccatttatatacctacacgcacgcaagagacgcggagagataggcgatgcagactcgcgattcaatgatcgatatgctcataaaagtgctcaattatattttctgtattttgtatgctgtattttccaagacgtatattattttactattaaagaaaaaaatcatttttttttcccgag

SEQ ID NO: 8564 - DNA, 468 bp, Homo sapiens
gccaatgctgtggctcgggctgctgcctggggggcctctgggggctgggggcccttttcattctgcctgtgtccctcaagggtgatctctctgtctctgtcacgccctttctccccgcctttttgctgggcttttgttctctgcctatgtatttctgtctattttttcaatttcccctcttctcctttattgatctctgcttttaatacaccacttctttctttctgcctttttatggatgtctttttctttttatggctctggttctccagttctttccgtctctgcctctctctgtctctctctctctgtccttccacccctccctccttgcttcccacccattcctcatccctcactcccacccccacccccacccccaggagttgagtgcatggatctgtttctttttttatttacactttttctttccggtttgccggaataaacaggacctttgacatttga

SEQ ID NO: 8565 - DNA, 850 bp, Homo sapiens
gagtgtccggggtgggagggaccatgagggagccccagaatggggtgcatttggtgctgaggctttgaagccaccgtatttttcgttacctgtgactatggagccaatgggatgtgacttcgctcatcacggacagtcattccttctcctttccagggtgctgggggctggggttccctggcccaagggtccagcctcctctcaccccattccaggtggcatactgcagtctggctctttctcccctccctccccacccaagcctcacctccccaccccttgaacccccatgcaatgagcttctaactcagagctgatgaacaaaagcccccccacccccaatgcctgcctcctcactcctccgtcgctgcccttcacaccttttggtgctacccctccccagagttaagcactggatgtctcctgatcccaggctgggacccctacccccaccccctttgatcctttctacttccacggtgaaaggactgaggtcggactacagagggaagagggacttcccttgactgggttgtgtttcttttcctgcctcagcccagctctgcaaatcccctccccctgccccccacctccccaggctcaccttgccatgccaggtggtttggggaccaagatgttgggggggtgaatcaggatcctaatggtgctgccctatttatacctgggtctgtattaaaagggaaagtcccccctgttgtagatttcatctgcttcctccttagggaaggctgggatatgatgagagattccagcccaagcctggccccccaccgccaggccatagggcataatttgcatctcaaatctgagaataaactgatgaactgtg

SEQ ID NO: 8566 - DNA, 252 bp, Homo sapiens
ctctgtgttcctctgtcccctaggccctagaggacattggtcagcaggagcccaagttgttctggccacaccttctttgtggctcagtgccaatgtgtcccacagaacttcccactgtggatctgtgaccctgggcgctgaaaatgggacccaggaatcccccccgtcaatatcttggcctcagatggctccccaaggtcattcatatctcggtttgagctcatatcttataataacacaaagtagccacag

SEQ ID NO: 8567 - DNA, 99 bp, Homo sapiens
gccagctgccactgtgtactcggtccgggacccttggcgacagaagacagcctccgagagcgcgggctccaagggcaataaagcagctccactctctct

SEQ ID NO: 8568 - DNA, 320 bp, Homo sapiens
ttctgccctcccgtcacccctgtttctggcaccaggaatccccaacatgcactgatgttgtgtttttaacatgtcaatctgtccgttcacatgtgtggtacatggtgtttgtggccttggctgacatgaagctgttgtgtgaggttcgcttatcaactaatgatttagtgatcaaattgtgcagtactttgtgcattctggattttaaaagttttttattatgcattatatcaaatctaccactgtatgagtggaaattaagactttatgtagtttttatatgttgtaatatttcttcaaataaatctctcctataaacc

SEQ ID NO: 8569 - DNA, 2411 bp, Homo sapiens
gggtgggggtggaccaacaaccaggccagggcagaggggttcatggagaggccactgggtgaccccagatagagacttggggctactgagccagatgcccccgccccacagacctgggtgatgttgcaaatatttcacacctggaaaggccagataaggcactgactagtcacatagcagtgttgcagtgcggtcctgagggccagtccagtggctagtgtgacccctttagaactggatcctggggaggccagggcaggggacctgtgaagagccagggtgagggcaggcagcatttaaggggagctcagggcaggagcactttaccacctggtacaaaggatttttttttttttttgagacggaatcttgcactgctgcccaggctggagtgcagtggcgtgatctcggctcaccgcaagctccgcctcctgggttcatgtcgttctcctgcctcagcctcccaagtagctgggactataggcgcctgccaccacacctggctaattttttgtacctttagtagagatggggtttcaccgtgttagccaggatggtcttgatctcctgacctcgtgatccgcccgcctcggcctcccaaagtgctgggattacaggcgtgagccaccgtgcccggctttttttttttttttttttttttttttttttttttttgagatgaagtctcgctctgttgcccaggctggagagtgcagtggtacggtctcagctcactgcaacctccacctcccaggttcaagcgattctccagcctgagcctcctgagtagctgggattacaggtgcctaccaccacgcccaggtaattttttttttttttgtatttttagtagagacggggtttcaccatgttggccaggctggtctcgaactcctgacctcatgatccgcccgtgttggcctcccaaagtgtgggattacaggcgtaagccacctcacctggcggtacaaagaatttctgcattttcttccctggcccctagtcctgcaccgatttctccttttcgaatgtattcctcctgccaccttctctgggcaacttcgtgcgactacagaaccactgtcctgaggagctagaggcctcctctctgaccatccagagcccaaatccacagcttccccaaatttcatcagctgccacttgacgacttctccccgtctctctgaggcccggaaaccacggctggaggtggggaggggatggcggctgaggtccattcctcattctcagacctcattgctcagttgcactatttggggcacagaataatcaccaaaagtgagaaaaacgagtttgggtggctggggaggactttgggactcttgatgcaaggcgcaacttgagaaaattctgggtgtgatatttgcacagacaccctcctttcaaaaacagccaccccccaagctattctcagctccacacctgcagccccagctaaggtaccaggtctcctgagcaaggcagagagaagccttgagccttctctgtgtcttctttcaagaaccccgctgtgtcttctttcaagattttttttttgagacagtttcaagatttttgttttgtttttgagatggagtctcactgtgtcacccaggctgaggtggcagtggttcaatctccgttcactgccacctccacctcccgggttcaagcgattctcctgcttcagcctctcgagtagctgggactacaggcacctgccaccatgtctggctaatttttgtatttttagtagagacagggtttcactacgttggccaggctggtctcaaactcctgacctcaagtgatccgcccgcctcggcctccccaattgctgggattacaggcgtgagccactgtgcccggccttcttctttcaagttatatagaatggagcatgggggtggcagtggctagggacatttcctggggacactctcccctaaccccccagaaggacttcacaaaaacctgtggataatggaagggatgttacggtacaaacgtatatttatgtgtgtgtgtgtgtatgtgtgtgcgcgcgcgcgtgtgcacataggcgtgatgtctgtgaccctcctctcctcgtcacatttcccccagaatgaatgctgtcctgtctgctcatgtttgtgttgaagctgccaaagtcggggagctctggtcctgcccagacccctttggaattgctggcccatcctcccactggagagctggggtgcagctcaccttggggaaggaaacctcatgcctcagagtaatttcttgtgaatgcaaagcctgggggagcgggtctttggggggcaaggagccagtcaggggcttgtttcccctcatagagctccccagacgtgcctccgcaatgcctgaaacccagacctaggctaataaacggttcaatttctgtt

SEQ ID NO: 8570 - DNA, 271 bp, Homo sapiens
catgaacacctggaccattccacattgccatggccccagggcccagattgagggaatagccaggtgccagccctgcccagagtgcggacaggcccgggagagacgtggaagcccctgtgaaggacaacacccctgcttgggagagagtcccatgtccaggctctggtggggacagggcccctagtggggtggccttccccaggcccctgagaatcagggtttgagtaggagtggactcatattggagctgcaataaatcgataacacaggc

SEQ ID NO: 8571 - DNA, 1241 bp, Homo sapiens
gtggctggcaccagagataactcaagggcctgcaccaaatcgcttttgggttttctgatgttttgttttgtgttttttttaaaccattttctctctttcggtaatagaaaaatctctgaaagactttactgaccaatcagccggagccccaggagcccaaggggtgtgggggagtctggaggcctcattatgtctctggcttgctccccacgctgaaaccctgcagccttaagagagaggggccccggcctgctctccctccctccccccatctcctcctccgctgtgcccgtctctccggagccctcctgcctcattgctcctgtaattttggcctttcgagtgccttggaggtttccctgacctcccgtgaagatacagagactgtctcctttttttttaactttgacaactgacttctgtttccttttctaagttttatttttcaaaccaccccggacagcccccagctctgattccttcaaggcccggcctgtccgggccaccattccacaccttgcggtttgaaacagctgtttttcccacatttgctgcaggcatggctgtctcctgcccctgcctgcccatctggcctataccccagccgtggggcccggggtccctgccgcagccccctccccttctgatgccttaaaagctgggccccaggccctgctggccagagccacagatgccaagctctgggagcttgactatggaccaaacagctctggcctagggattgggccaccctacccaggatctccaccctggggacagtagaaggggaaagccttcatcttggcgaaccggccccaccaccccctcctacccgggcctccgtgcagagatgggctttctctgccagtcccctgctgtctgtctgtgggagtcggacattgtgcccatctcccggagcctctgctgtcactcgcttgttgaagatgaattcttgaattctgcctgcccacccccggccagatccctggagctggcctccttccagcccagtgccagaaaccagcactccatgaagataaactctgggcccgcccaccagcaggacctgtcgacctgaggtgaccctgggccttgcccccagccaactgggccaccagcttccctcccttgactctgggggtccacatccactccaaggggactattcccccgaccccaccccagtctccccacacggacctttgctgaattaaagtttgtaagtaaatggttttaaagaa

SEQ ID NO: 8572 - DNA, 79 bp, Homo sapiens
cgctgggatccgggatcaaagttggcgggggcttggctgtgccctcagattccgcaccaataaagccttcaaactccct

SEQ ID NO: 8573 - DNA, 301 bp, Homo sapiens
ggcacaatggcagccctgcctgggaggactggaccaggcagtggctgcagagggagcctcctgctccctgctccaggatgaaaccaagagggggatgtcagcctcacccacaccgtgtgccttactcctgtctagagaccccacctctgtgaacttatttttctttcttggccgtgagcctaaccatgatcttgagggacccaacatttgtaggggcactaatccagcccttaaatcccccagcttccaaacttgaggcccaccatctccaccatctggtaataaactcatgttttctctg

SEQ ID NO: 8574 - DNA, 418 bp, Homo sapiens
cctgccccagctaccaccgccacctgcttccaggcccctatgtgccccttttcagaaaacagatagatgccatctcgcccgctcctgacttcctctacttgcgctgctcggcccagcctggggggcccgcccagccctccctggcctctccactgtctccactctccagcgcccattcaagtctctgctttgagtcaaggggcttcactgcctgcagccccccatcagcattatgccaaaggcccgggggtccggggaagggcagaggtcaccaggctggtctaccaggtagttggggagggtccccagccaaggggccggctctcgtcactgggctctgttttcactgttcgtctgctgtctgtgtcttctatttggcaaacagcaatgatcttccaataaaagatttcagatgctc

SEQ ID NO: 8575 - DNA, 866 bp, Homo sapiens
gcaccagggagcaggcaggggcctcaggctcctctcctcaaatcaagccctggacaggtctcgcacccacaagtactatctgctgcagagatcctctcatctgtggccaggcacgcctgtaatcccagcactttgggaggccgaggtgaaaggatcacttgagcccaggaattggagaccagcgtgggcaacttagcgagactccatctctacaaaatgtggtgacacatgcctgtagtcccagctactcaggaggctggggaaggaagatcacttaaggccatgagtttgaggctacagagagctatgattgcaccactgcactccagcctgggcaacaaagcaagaccctgtctcttgaaaaaaaaaaaaaaattaaaaaacacgtgtagctgtgggtaaggaagtcgtcccattttatggatgtggaaactgaggctgacttaaacttcccgtgacttggagctctcacctcgagacacctcccagaccccacatcccctcagaacgctgcgcccagccacacccacgatcaagttacacagctttattggcccccagcagccacagttcccccaagggggctttgggacagggagggcccgggcgtccagtgcaaactacagtacgtgagtcaggccctgaggggggtgcccggggtcctccttccctaccctgccaggagggccccgctggtgggagacaggtgtatgggctctgtgggctctgtccctggctgaatggccccagactggttgcagctgggcttgaggggctgacaacaggaagtaccatcatcactgccagagctcaagatcccacacccgacatgacataaataaaaaaataaatagtgttgtatcttt

SEQ ID NO: 8576 - DNA, 532 bp, Homo sapiens
ggcacttttgtttcttgggcaaaaatacagtccaatggggagtatcattgtttttgtacaaaaaccgggactaaaagaaaagacagcactgcaaataacccatcttccgggaagggaggccaggatgcctcagtgttaaaatgacatctcaaaagaagtccaaagcgggaatcatgtgcccctcagcggagccccgggagtgtccaagacagcctggctgggaaagggggtgtggaaagagcaggcttccaggagagaggcccccaaaccctctggccgggtaataggcctgggtcccactcacccatgccggcagctgtcaccatgtgatttattcttggatacctgggagggggccaatgggggcctcagggggaggccccctctggaaatgtggttcccagggatgggcctgtacatagaagccaccggatggcacttccccaccggatggacagttattttgttgataagtaaccctgtaattttccaaggaaaataaagaacagactaactagtgtctttcaccctg

SEQ ID NO: 8577 - DNA, 868 bp, Homo sapiens
caccctcggcccacgactgtcttcccaagttttacagacttgttctttttacataaaggaatttgtaggaaatgcagccaaaggtgcagtcggaaaagatgcaggggaaatgtatttatgcagcgacaccccacaatgtgaacaaacagacaaaaaatctgtgccctcgtggaattgacgttctgcttgggaacacagaaaagaactcggtgatgaaataatggagatgattccagtgacaaacgacagagatggtgatggtggtcagggaagacctctctgcagaggtagtgacttgtgatgtgagctgagacctctgtcctgggaagaccaaaagaaaagcatttcaggatgagggaatggcatgcgcaaaggccctgaggctgaaatgtgcccatgtgttctaagaaatgcagcgatgctggtgtgcctggagcagggacggagggggagaatgggaggagacaaggagctgaaggagtagttcccgaaggaccttgtgggtgatatagaggacttcgcttttgctctgagtgaggtgggagccatagaagcttctaagcagaagagggacttgccctaattcaggtgatcacaggtgtcttgtggcctccatgggaggttgaaaaccagagaaggtgaaggggggctgcactgagccacaggaacaatgatggagattccagctaagcccagaccccgtggattctagatagattttagaggcagcagacagaattactgaggaattgagtgtaagagtggaataaagttatcaaggacaatgccaagggtggggcacccccaaatttgactctgggagactcagccaaatcctatctggtaataaaatttcttttttattttt

SEQ ID NO: 8578 - DNA, 595 bp, Homo sapiens
tctggggtcaccctctccagcaagagaaccccgtggggttatgtatcagaagagaggggaagaaacactttctcttcttgtttctcctgcccactgctgcagtaggggaggagcacagtttgtggcttataggtgttggttttgggggtgtgagtgtttgggggacgtttctcatttgtttttctcactccttttggtgtgttggacagagaagggctcctgcaggccacagccacctaaacggttcagtttcttctgcgcctcaggctgctggggcctcagacgagacccaagggcagagcatttaagagtgaagtcatgacctccagggagcctagaagctggtggccttggccggctgtgctcagagacctgaagtgtgcacgttgcttcaggcatggggggtggggggagcgtcccaaatcaataagaaggtagaatgagttatgagttattcatattctgttggaagcttgttttccagtctcttgtacagcgttttaaaagaaatggattctatttattatgctttattggaaaaaatgttgtaataatttaatgtttttacccattaaattaagacttgtgcatgatc

SEQ ID NO: 8579 - DNA, 394 bp, Homo sapiens
aagggagaagagatgggggcttgaacacggggcttccttacagccccggatgcagattttagagggagggcaggtgcgggctgtgtgtgtctgtgtgagggcaggtcctggacttggcagtttcttgctcccagcacccgccccttcctcacctcttccttattccataggctgggagagaaactctctctgcttccctcgcccttggagctttccccatccccctgattttatatgaagaaatagaagaggggcttgaagtcctcctcgcgagtgccttcttgcaattacctgccttagcgggtgttgcgggtccctccttcacagccgctgagcccagaggtcccgctggcccctcctctgaattttaggatgtcattaaaaagatgaatct

SEQ ID NO: 8580 - DNA, 555 bp, Homo sapiens
cccctgccatggaaggaagaacgggacaaaggaggggcagcagggtgtgtgcatatgagacttgggggtccctccccaattttagtttcctgccaaaacgggagtgtgcagtcagggcctgcggtctggccccatgagtctccttccgtcctcagcgggcagggaacacctctggcttgtagaagggacggctcagtggctgcaccgacggtcctggaaatctcacatggtgggcactgcagcgttggaacgtgagcctcggatttcctggcccctctactgtaaatgtgccttagcctaagcctcccatcctgtgttagcgttgcctggtgcggggcagggcctaacaaggaaacctgggccctccaagccaggttgaggtctggtaacagaatgccaggaagggggcctggaagaccacctgccccggcccctctcctgcaggggccccacacaggcatgagggatggcccggccaaagtctaggcagaagcctcctataacaaagggtggtgtggcctgggcattggagtcaataaattatggtcagaaaat

SEQ ID NO: 8581 - DNA, 522 bp, Homo sapiens
gaaggcccgggtcccacaggtaaggactattcccagctgggctaagggggctgccctcccactcccagtcaaggcgagaggttctggggccactcccagacaattctttctttcaggcaacacctaagtggaccaacccctctgcctgtcctgccccccagacgatgactgaaggctcctttgacaccttgagatgattctgctactttccagacttttcttacaaagcaaacacttttattttctatgcaaaggtgattcagagaatttatataaaggcgggcgaggggcagccgagcagggagctttgggacagggctggggcccccatatcccccccgggccacctgctttccctcctatggctcccctggaacaggagggagagccaagggggcggcccagcctggacagcgcccgctcctgcctgggtgcacacacggcgggcctgagctccagcatctgagtttgggggtatgagaaacaggggagcagaaggagaagaaaactgcctgtgctgca

SEQ ID NO: 8582 - DNA, 28 bp, Homo sapiens
ccaggagcctcgtggctgcgtcttgcac

SEQ ID NO: 8583 - DNA, 2287 bp, Homo sapiens
ccgtgagggaggcggggaccagccagaccgggagcaaaccgtcccttgtccccgtctcctccctgttcccgttcctccctggcccaccccactcacactccccaaggcccacggctcaaaggcaagcgagctctccctctgcttccctgggggagccccgacggccacaggactccagctccaagtgggttttcttggctcccctgttcaaagtggccacagcgcagaccgaagcaaaattcttgtatacattggcgccagggctgatgctggggtgtgggttttatgaagaacattgagaacaatcagctggtaattatggatggaggaagagggagaggaaaaaaatattgtatttttgaatcattgttgcaggagggggtgggaatcttaggatttgttgccagatttgaaagtcactggaacttgcatattttcattttaatcctaagtgttattacgcaccagttggggttcacccttcatcccccacatttaattgtctgatatagaatagtgttgtgtccactgccccgctagacggctttcttaggggaattttcttctggttgtttcacaagacagattctgtccttgtcacccgggacagaaaactcagtcttttcaccctcattcagatgaagggactcaggacaggctctgtgacttacagggacccaatcaattcacaatgagaaattaccggccaggcgtggtgactcacgtctgtaatcccagcactttgggagggcaaggcaagagcttgagcttgagcctagacgttaaagaccagcctgggcaacacagcaagacccatctctacaagaaatttaaaaactagccaggcgtggtggtgcgcgcctgtagtcccagctacttgggaggctgagccctggaggtcgaggctacagtgagctatgatcacaccattgcacttcagcctgggcgacacagcgagaccctgtctcaagaaagaaaagaaaaagagacaaattacccagaaacccctcccttccccacatggaggccttggcaaatgttaattttcctagaaaatccttcagacctgaagacgcaggaaaagaatctggctctcagggtggcttctgcgtccccgccgccaggccccagactatggtcacagggccgtcctgttcctccccgggactccagaatttctctcctcaaaggaaagaaaacagggcatgcgcttgttggcaaaacgcagggccggctcccaaaaaccccatgtgtgtacgattaaaagttggccgtccccaggcctcccagcgcaaacttcaagagacagggctttgctgaaaaccaaacatgggccagctgggctttttaacaacctagagactttccggagctgcctggaacagagcctgcgggaaacggggcttgccagagacactcacagtttccttcatggcctgttttggtcccctaagaatctccacatcattgtctttcttgtgccttttccttggtgagcaacagaaagggaagggttccaagcctctaaaaatgtgctttgtgatcaggagtgcgctccaaaccaaatacgcgcgctgccctttcgaggccagtgagctcagcctccaaggctttaaagccacatttcagcaagagaaagcgctgagagctcgcaggttcattaaagaaggcaaagcactggtttctctccttagaaaagtaggtttcttggcttgatgtagactggcttgctttgatttttagtgaagggaatgtacgtaaaacaaaatagggcttggctggtcaaaggagacaagcaggatggatggatggatggatggatggatggatggatggatggatggatgaatagatagatggtgtttgcatgtaaattgcagagaaaacaaaaccaaagctgattggaaacaattaattgtgggtgtctgagggggaaggtcgcagctttgggcagctttgagaagcggtacaagagttctgtgcctgtgtgtccagccctggagccagccagtgcatttattttaagctcttagaagcaactccttggcccaggaatgcgtgacccctgagatgggtccacgcatctctctacacttccttctctccgtgggatactggactcgtgcctctgcgcccattctcttctcacgcatatccatgagctttaatttcactttctgatcacggtacgtccataaagccagtattacacttaaatgaagtattcttttttgtaatcgttttttttagaaggtaaacaaatttaataaagctaccaataatgttg

SEQ ID NO: 8584 - DNA, 200 bp, Homo sapiens
gcccacaaggaccaaagctgtacctagaggaaccagcacccgggcctcagctgtctgtgctgcgaggggagtctgccctggtgcccactgggctgtggggtgaccacactgtacttggggctgggccctctgcccctgtgtccccatctgtgtgcactgatgcttcctcccttttttaatttaaaatggtttttataagc

SEQ ID NO: 8585 - DNA, 980 bp, Homo sapiens
agatggcccccaaccccccacccacccctctcctgcctcggcagggactgtgatcgaggcgtgagccacagtggttatctccaagctcagggcaatcccttccctcctgtcaactgctccccgactcctgcatggctcattccttcacaatgtcgccgtggctgccaggttcctcaggcagccccggtgggaggctgcggaccatggggactcagctctgcatggcaggcagaggcccagggacactgacgtgcatgagcttgctgctttccagggtgtgttgagggtggccatgggtgacacgtcccactctttctgatggaggggcatccgtggtgccttctagcttagaaccattttccaggtctcttctgggttgggcaggactgatattcccaagctggtggaagatggttcatcttcctcgcacagtgtgggttcttggagttcatccagggaaggcggcgcctctttctcaggtcctgcaggctggtctctgagcctgcccccacgaactttctggattccaaggtgggatggtgatccctttgacccctgcagaccctctacttgcgaaaagcagcattgaagcagccttttcccattgtagaagggacagggagtcagatcccctcaaccccccggcttcagggaccccagaagtgccttccaagcttcccccaagatccacatcacccacgaccctgccactgtttttgctgtgttcaccacatctctgatcctgaagtgaattctggaactatggaccacattagactgggcagagattcgcccaacccctagcactccggctctgggctttcggccagaagttaattaacctcagagccaggagcctggggctggggcctccctcccaggccctgtttagctgtttagctggttgtgttttaagcaagttcttgcccaatcatgcatcctgctagaaaaggaaatgaagcaacgttcccagccaccgc

SEQ ID NO: 8586 - DNA, 33 bp, Homo sapiens
catgggccctgcatgctaataaatgcttcttca

SEQ ID NO: 8587 - DNA, 185 bp, Homo sapiens
gacaccaggctgcagatgatcagggatccaatatgactcagagaaccagtgcagactcaagacttatggaacagggatggcgaggcctctctcaggagcaggggcattgctgattttgtctgcccaatccatcctgctcaggaaaccacaaccttgcagtatttttaaatatgtatagttttttt

SEQ ID NO: 8588 - DNA, 77 bp, Homo sapiens
ggcagccctgtcctctccacaagacacaagtcccacaggcaagcttgcgactcttctcctggaaagctgccatcccc

SEQ ID NO: 8589 - DNA, 231 bp, Homo sapiens
actcgtcctgacacccaccaggcggcccccttcggagcccccgatccctccgggtctagcgcaggccccacggggccccttcaggggctgaacgcggcccggaccgggaacggaggcggccagcggcgcccggaggggaggaaggggccgggccagacgttcccacagtaaatctccccagctgggtccgccccggcctcagagttgcgcaataaatgttaccgaccatga

SEQ ID NO: 8590 - DNA, 3198 bp, Homo sapiens
gcccaccccgcctgccctcccaccccctccccgggcagcagagagagagagagagaaagagagagagagagagagaaggggcccaagagagacagcacaggcagccccacggacgacgcgagggccccacgtccctgcggaagccacagggtgagcactctggggtgggagggtctgcagggaattgggggggtgcccggggatcccccgccccatcctcctgcccccaccccaggctgggctgttcactctctcgtcttggtttggttcatggtgaaggtttttgtttcttttttcggctaaaaagaatgcagagatgtgcccccacccccaccctcgaccacccccgatgggatggcttggggggctccagggggtgccctcccagacccccttgcccaggcctccccagcacctaggtggggcctggggtaggaggaacaggtttaaaaatccccaaaaaagcgaaccgtgaggaggggtgtgggcacccccggcccagtgccccctggtggaatgcgggggagcaggcagtggggctggaagcagaaacaaaatgaaaaaaaaaggggggtgggaggggaagaaaaactctatttttgtaaaaagggaaaaagacctcgtggagaatttttactggggattcttgaacttgaaaaaaaaaaacacaaaaaaagacaaaaaaaaaaaaagaaaatattttggcaggttatgtttaccaactggggcgggggtggggggggcccagggagcagggcttaggggctagcagcccacggggccacacagagaaacaaccacgcagacagtcacaccacggggacacacggacagacgcagacggacacagcgacatgccccagacacgttaagggactggttggccaaactcagacacgtggacagggatagacagaaagagacagaagctggggctacgtccatgtggacacagaccacagatgtgggcacacgaatccatccacctgtccacgtgcacacgtgaatgtagcgatagatatttggacatcaaatttggacaccaggtcacggagaaacacaaacaccacccaggaacacgcagacatatgcccatagcatcccacaggcccaggcaggaggtcccaccccagaccctgccccagacgctccctcaccctctcggccccctcgccctggcccccaggttctctgcagagatctctcctggacccccagcggtctccttggcgcccacgaacacaggcgtgcacacgcagcgcacatgcattgagacacacgatacctcgttccaccttggcgtcacggtgggctggaggcagcccccccccccacaacacttgaggccaaaggacacccctgtccccggggctcagcctccccctgggccgaggccttggcccacacagctgagggagaggcccagccctgagcctcccccaccaggactgggcctccccggcagcaagaccccggcactccccgccaggcccagggtggggtggatgggcccaaaggcccagccccacactcctttcccgtccacttgtcacctacctatcccctttcggtttgttgggtttttcgtctttccagattgcagtggacacagcccccgatctcgagccccggcccccggcttctgtctggacattgcatcgccctagttttctttctttaaaaaaaaaaaattccaacagaagccacaggccggagcccctgggagccctcgcaccgctccccaccccactcagcggccccatcggaactgagaattgcaaaacccccgactttagctatagttaagttgccttcccccggtgtccccacgtttggtgtctggctatggcgcccccatctgactgtccagctctctctcccccacccctcccggtgttgttattaaacgtctgtggagcttctgctgcaaggaacaaaaaagaaaaaaatcaaaaaagcgacaaaaaaacacaaacagaagaggaaaaaaaagcaacaaaaaaagaaaacacacagaagagatttaaaaaaaaaaaaggaaaaaaaaaaaagacataaactggcaccagttaactttcttgtacttttttgctgaatttagcttcttgtagttttaacttattgctatgttaactatttattctcctcgttgccctgtaaggacatccgtgtatatttctgttacttcatccggtttgcaagttaaaggaacgacaatgttctctttgtttctttaagttttgccgagacatggttatgcctaatttatttataaaaggggaagtggaatcattaaagtaataataattattaataacagtaatggtagccgagtggcacgcgggggcgtgtgctctgcgggacagtccccacggccagcgacgtccaggtcaccaatgggattctttttgctcttgtcttgagaattttttcagtcctatttagctggtgaaatccctagcttgttcttgatacacgaacctatttattctcgtggttttaagtcctccctgccctctctcctctcccctgcagcagggcagggacccctctcccctgctgtctcttggggctctctcccctccgccctctgcattcgggaacacgcacgtccgcgtgggaagcttgcagcagggcgtccgagcaataagggctgggtttgtcccccaccctggggggggccaggctccagagagggggcacctccccacacaccccccccccaccgaggcctaggcccctgccacccccaagactgggaggggacttctttttctaaaacacaaaactcagcccagccaggccccctccctggaggccagcccctccccgcagggggccaggccggggctcccaggcgagggggacttggggcttccacgtccctggggggcaggggccaggccaggggggagggggctcagcccctccacccctcccttcatcctgttatttattcggaaggtttcaaatcacgacagagtccatgttggaggtgataaaaaactgtaaaaaaaaaaaaaaaaaaaaagacaaaacaaaagacaaaaaaaaaaaaaaaacccaacaagaacacttcgcgttgcgtttagactatttattaccgggatcacaggcctggccgcggtaacagacttttacatggaattgtttaattatttgtacttttcatgccagaaaataaaagttcagaatctt

SEQ ID NO: 8591 - DNA, 251 bp, Homo sapiens
cccacctgaccactgaccgcccctatttattcgtccgctcggacaccacgcccgggcttgccggggcctggacagctgcgagggccgcccggaccgcgggccggaaggaggcgcccccgccccgccccagagctgggccccctgggcaggttccccaccccgccccaccgcatccttctcggagctggtgcctggggctgcattgctggaactgtgtcaagagagcagagtgagattaaagagcgagaaag

SEQ ID NO: 8592 - DNA, 254 bp, Homo sapiens
tctgagccggcgcgagggcacgggctgtggcccgaggaggcggtggactgaaggcatgagatgccctttgagtgtacagcaaatcaatgttttcctgcttggggctctcttccctcatctctagcagtatggcatcccctccccaggatctcgggctgccagcgatgggcaggcgagacccctccagaatctgcaggcgcctctggttctccgaattcaaataaaaaggggcgggagcgctgttggttgtgcgc

SEQ ID NO: 8593 - DNA, 703 bp, Homo sapiens
cgacacagaggacccgccccctgagcagccccgcgtactgtggatccagctgttcggttctggtccagagacattccaggggtccagggtgtgggtcctgggctgtcacagccgtgtgtgtgtgtgtgtgtgtgtgtgtgtgtgtgtgtgtgtgtgtgtgtgtagtgggtgtgcgtgtgggtgtgggtgtgagtgagtgtgggtgtgtgtggctgcacgtgtcactggggtggccgtgagtgtgtgctcacaggtacgcggtggtgtcgggttcctgggcctgaggggcctgaactgatctcacttggctccgaaagcctttgctgtgttccctgcagcccctggccccccagccttggggctctggctccccccggcggaattgggggactgtttcctgacatcctggacaagggaagcccactagaggctggaacaggacctctccagcctcctcaccagcaccgtgcccatctcaactggacttcccgctctccttctccaccttctagtgcccgtggccggggattcaaagccgccgttccccaggtccctgggctgggccctgacagggagccgcccccctccccatggtaaccaggaagcccgtttcatgttcagttgcttttgtagaggaagcaagggctgggatggggacagctgtcaatcacaagcccttaaataaagcagccagcgcacatcc

SEQ ID NO: 8594 - DNA, 348 bp, Homo sapiens
actcccatgactgcccagctctgaggcccgatctccactgttgggtgggtgggccctgccgggaccctgctcacaggcaggcttttcctccaacctgtggcgctgcagcagggcaggaaggggaaacacagctgatgaactgtggtgccacatgacccttgtggcacagatgcccacgtatgtgaaacacacatggacatgtgtcccagccacagtgttatgctctgtggctggctcacctttgctgagttccggggtgcaatgggggagggagggagggaaagcttcctcctaaatcaagcatctttctgttactgatgttcaataaaagaatagttgccaaggctg

SEQ ID NO: 8595 - DNA, 599 bp, Homo sapiens
gaaatccttttagtggaagcaacgggagaagctttctgttgtcccacttcctttgaaacacaagaaaagagagtggtgaaagaacctctggataactgctttttgaattgagaagagagacttgcgataggacaataaaatctagaagaacttggatggtttcgtaatacaattcacctatagccaatcttgcatgagatttcaaaggcacagaaaaggaaggcatcagtcacatattagaggccccacacagggagagaggtgtgtggctacccgcttccagcccattttcctgattctttggcttgttaatcgagaatatcccccaaatcacttgtctctgttcctcagagttgtaggtctccagatatgtccccagtgctccacattaaagatacatgcccactttgctgtttcttcagaaatgttaaaatgtttaccagagaactaataaatgttgttatggctggaaatactcactgatgcccaactcttctatagattgagttggtttaagaggtctactttgtattgcaagcattgttgtttctacggattagcgagcctgttcttgattaaaccaactagatgggagcttg

SEQ ID NO: 8596 - DNA, 401 bp, Homo sapiens
ttcacataagattcctagaagccaccgaatccaatcatggtaaaaatgtgtttccctcaaatcatgggaaccatcgcaaaattattctgaagcttctgcagtcactgtcatttgacagcattcagaaataaatgccagtagcccaggagcaaaaatttttgggagtagtttagctggggcctcactcagatacctaggacacagagttggaaataactcttaagagagacacacctccagtaagaccttaagacagttctgtcataaaaaaaatacgaggtttggccgggtgcagtggctcatgcctataatcccagcactttgggaggccgaggcaggcggaccacgaggtcagtagttcgagaccagcctggtcaatatggtgaaaccccatctctact

SEQ ID NO: 8597 - DNA, 67 bp, Homo sapiens
ccctatgtatataagcaatatggcaaagttttcagttgtcctatttccttttttttttttttttttt

SEQ ID NO: 8598 - DNA, 720 bp, Homo sapiens
tggaggacaggtctacaagtatctacatatctaaagaatatggaaagtcttcagtttgctttctgggtttcagacttgtttgggagctcacccctttctcctgtttctcacttttggaataggaatctctatcctgtgcctgtctcatattttggaaatacatgactagtttggttttcaccggttcggagctgaagaagaattttgcctcagcatgaattgagtctcatccatatctgagtgatgtgatattgagatgacactttggagtttgagtttaaacattaggcttcatgctggaattaactgagacttttgaggcctttgggatgagatgaatatattttacatgtgatgacatggattttgggggccagaggtgtaatgttttggctgagtgtatgccacctcagattcatatgttgaaaccttacccccgtgccccccctctcccccacaatgtgatggtatttggaggccctgtctctggtggtttttaggattggaggacatcatgaagatggaggccttgtaattgggattagtttcctgataggaatccctagagagctagctttgcccttcaccatgagagggtgcagtgagaagatagctatctttgaaccgggaagcaggcccttaccagacatggactatgccagtgccttgatattggacttcccagcctcccaaaccatgagaaataaatgtttgttgatt

SEQ ID NO: 8599 - DNA, 4653 bp, Homo sapiens
gaaagtaaagtgtggtaatgctgtcagttgtattagttccttttggatgtatgagagtacttacgctggagagaaattcaaggaatgtaaacggtgtgattaagccttcagttgtcctaattccctttgaagacgtgactcatgcggcaatgaaatatttaacaaatgggggaggaacttgcactctcctgcgggattgcagatatgtgaatggactccatggacagaaaagctacgaatgtatggagtgtaggaaagccttcacttcacgtaatcttttaaagacacctgagaatatatactggagagaaactataaagaaaattctatatccatcccatcttttgtggggtttgttttttgtttttgtttttgttgagatgtaattttgctcttgttgcccaggctggagtgcagtggtgcgatcgcggctcaccgcaacctccgcctcccggattcaagcaattctcctgccgcagcctcccaagaagctgggattacaggcatgcgccaccacgcctggctaattttgtaattttagtagagatggggtttctccatgttggtcaggctggtctcaaactcctgacctcaggtgatctgcctgcctcggcctcccaaagtgctgggattacaggtgtgagccacagcacccaacctttttttccccgccgcaccccaagatggtgtctcactctgttgccccaggctggagtgcagtggtgtgatcctggctcactgtaacctctgggttcaagcaattcttctgcctcagccttccaagtagctgggattacaagtgcccaccaccatgcccagctaatttttatatttttagtagagacagtgtttcaccatgttgaccaggctgatcttaaactcttgacctcaaatgatccacccaccttggcctcccaaattgttcgttttacttttttttttttttttttttgagctggagtcttactctgttgcctaggctggagtgaaagtggcgcaacctctgcctcccaggtcaaagcaatcctgcctcaggccccctagtagctggcattacaggcacatgccaccacgcccaactaatttttatatttttagtagagacggggtttcaccatgttggccaggctggtcttgaactcctgacctcaggtaatccacctgccttggcctcccaaagtgctgggattacaggcgtgagccaccacacccggcccccagttctttttttttttttttgagacggagtccttgcccaggctggagtgcagtggcgcgatctcagctcactgcaagctccgcctcctgggttcacgccattctcctgcctcagcctcccgagtagctgggactacaggcgcccgccaccacgcccggctcattttttgtatttttagtggagacggggtttcaccgtgttagccaggatagtcttgatctcctgacctcgtgatccgccctcctcggcctcccaaagtgctgggattataggcgtgagccaccgcgcccggcctccagttcattttaaaaccatgaaaccacccacactggagagccaccttcttaaatgtaagcaatatgggaacatcttcaatgacatctgcaaccattgtcgagattcttcgtaggaagaattaaaggaatggggaagaaggacttgggccccagcaggccttttgtggcatccagtcagaagttaggaaacaccctctagggcagtgcctgccctcagctctcacacatgactggagagaagtgagaagactcccagaatctgccttttaagtttccatcagtgtcctcgggtcagactgtgggaatgctgtacttctaagacaaaggttcgcatcttacagtttttccccaagtgggatctgcctatgcacatcctaattcacagacattgtcagcattgcattattccagggctgttttgaggtcatctccagctccatttcccatctcaaacctacactttggacacttgtttaaacattcacatctgaatttctctgtggcaaccgcaggtggctctgaggtgagagactgaagaagcagagcctgtatcatgggacacacaccccttgaccacacagcatccactctcctgcggttaccagccctgcaccaaccaccacagtcagaataatctcaaaactgctagtggagtcacagacacactctgccatgtcttagctgtaggacactcagaattcttacctcccctaacttgctttccctgttttctggcacattctaccctgagatattcagcggcatatgcactgatgatgctccggccttctcacgtcagtgcatgtcacatgcatcctgctccaggactggtttcctagcctcccgctaagactagcacttagctcttcttggaaaaggacccaccctgcagcgctccagctctgttgtgtatgggaggtgctggtgtcagggttcacaagccatggaactaccttgcttcacatcacaaggcaaggtgaactcaactcccaataaactgcttgctggagcctccgaattctccgttttctgaattgcataggcacgataggggtcgggtctgtcctttgttggagtcagtccccccttttcttagcaagtcagtgtgttttagaagggaggtggcagcattgagggaaaccaggtcaccatccaccctcgtaacaacagtctccctgggtgggtcccagaagtgatctttgtgtcgctcgggtcggaactctttaggcctctggcctccaccctcccccaacagcagggatgggtcaggtggcagcatccaaaaccacggtgaagatactagggtccagaggccgactggagcaaggtttgctggcagatgaggcctcagtggaagtgacggctactgtggagatgcagtggaggacctggtggctgagccaggagatgcacaccttcgcttctctcaccaggaacattcgcttctctcaccaggaacatttatggtagtatgaggggttggaacattattactcaacccatttcaggtcctttcacattcttgagctgccatgttgtgcttttgtagagagatgattattgtactgtgggaggtcaggaagttcgagattccttcactgtcagaatgggctcaaggagccatcttttgtgataggtattggggaactaaggggtatctctgctacaggaatgggagtgagaacattcactttttgaaggacaagtatatgtgggtctatgatgatgtttttgtaaaacccttttgtgtatgtgtctgtgtgagtcctaatattcagtaagtattttcctctgtgtaactccctctaataggtgtagtcaacaaagctgtgctaatatctctgtccccttgatcctggcattctggaagacacgaaagcaagcaaggatatataaggcactgtggtggttattcccgaggagccagagaaacctggagaagagatcagaacacctggggtccttctatttgggagaatcttttagtatctgggctgttacacctgtgggtttgtgaatttgtgtctgtccacctgtatgtacagtgataacgtgtgtgatttttgtatatttgtctagagggctgtgtgtatatatatttatatatatttttaaatatggaatgcttttaggtttttttttttttttttttttttgagatggattctcactgttgccaggctggagtgcagtggcacaatcttggctcactgcaacctccacttctcaggttcaagcaattctcctgcctcagcctcctgagtagctgggactataggcgcgtgccaccacaaccagctaaatttttttgtatttttagtagagatggggtttcaccatgttgaccaggatggtctcaatctcctgaccttgtgatccacccacctcggtctccccaaagtgctgggattacaggcgtgagccactctgcctggctggttattttgtttgtttgttgtttttttgagacacagtctcgctctgtcaccaagctggactgcagtggcatgatctcggctcactgcaatctctgcctcccaggttcaagcaattctcctgtttcagcctcctgagtagctgggattacaggcgcgtgccaccataccgagctagtttttttatttttagtagagacggggtttcaccatgttggccaggatggtctcgccctcctgaccttgtgatctgcctgcctcggcctctcaaagtgctgggattagaggcttgagccaccaggcccggctggaatgcttgcattttcttgcctgatttccctgggagcaccccccttaacactgaatggagctggtgagagcaaatatccttgtttctgatattagatattaaaaatatggtttttcaccatcaaagattttattgagtttttcatatatgccttgtagcaatttgagtaaattatattccttgtttgttgcagatttttaatcataaatgggtgttgaattatgtcatgcttttttgcatcaattgagactgtcatttttccgtcatttcctaatgtggtgtattccactgatcaatttccatatggtgaaccatccttacattccagggacaaatctcacttggttatattgcataatgctttgaatatattgctttatatgctttgctggc

SEQ ID NO: 8600 - DNA, 597 bp, Homo sapiens
gtgtatggaatgtgggaaagcattcattggttttatcacattcagatacttgaaagaaataaatcctgtgaatgtaaacgtggtaaagccttaagaagtttccaggctgggcgcagcggctcacacctgtaatcccagcactttgagaggccgaggagggcagatcacgaggccaggagatcgagaccagcctggctaacatgggaaaccctgtctctactaaaaatacggaaaaaaaaaaaaatagccaggcatagttgctcacacctgtagtcctagctactcaggaggctgaggcaggagaatcccttgaacccgggaggtggaggttgcagtgagccgagattgcactactgcactccagcttgggtgctagagcgagactccatctcaaaaaaaaaaaaaaaagtttccatttctttcaaatagagttgctgcctgctatatgcaagaagattggttccagtacaccctgagtatacctaaatccacagatgccagctcttttataaaatggaatattcgcatgtacctacccacattctcctgtatactctataaatgtctagattaattaaaatatctcatgcattgtaa

SEQ ID NO: 8601 - DNA, 1102 bp, Homo sapiens
atgtaaactattataaagccttctatatttccagttccctttgatatcatgaataaacttacactggacagaaaccctataaatgtaaatgtgggaaagcctttcataatttttattcctttcaaaatcatgaaatatctcacactggagagatgctgtatgatataaggaatgtgggaaagtgatcgatttttttttaacaccattgtcaacataaaacaactcacagagcagaaaaactctgtgagtgtaaaatatgtagggaagccttcagtcattttggtaacttaaaagtacatgaggctgggcacagtggctcacgcctgtaatcccagcacttagggtgggcaaattgcttgacctcaggaatttgaggcctgcctgggcaaaatggtgaaaccatgtctctacaaaaaatagaaaaagtagcaggtgtggtggtatgcccctgtagtcccagctacttgggaggctgaggtgggaagatctcttgagcccaaggggtgggggttgcagtgagccaagatgcactgcaccccagcctgggcgacagagccagaccctgtctcaaaaaaaaaaaaaaagtacatgaaaggattcactctggagagaagtcatatgaatgtaagaaatgtagaaaagcattgagttctctcaggtccttgcatagacataaaaggactcactggagagatactctataaatgtgtgaaatgtagggaagtattctttaatgttatttcatttcagatagaaataattctcattggagataaaccctatgaatgtaaacacatagtaaagccttaattttaagcctcagtttctttcaaatacagttatcccctaatatttgcaggagcgtggttctaccaccccctgggcatacataaatcgacacatgccaagtccttttttaaaaatgacatatttggtacaaaattacccggatgtgatggcacatgcctgtaatcccagctactcaggaggctgaggcaggataatcacttgaatccgggaggcggaggttgcggtgagccaagatcgcgccactgcactccagcctgggcagcaagagcaaaacaacctctgtcacacacac

SEQ ID NO: 8602 - DNA, 330 bp, Homo sapiens
atgtggaaaagcattcattaattttatttcatttcagaaacgtgaaagaaatcacataggagataagcctcatgaatgcaaacacatggtaaagccttaagatgtttcttttgaatatggttatcccctaaccatatgcaggggattggttccagaccccctaagcatacctaaatccacagatgctgtgttccttttataaaaggacatttgcatgtaacctatccacatcctcctgcatcccataaatcatgcctagattacttaatttttcaccaacccaaagcttttgtaaaagtaaaaataaaaagtaggttactaaaatacctc

SEQ ID NO: 8603 - DNA, 450 bp, Homo sapiens
cattctctctaaatgtatggaatgtgggaaagcatttattaattttatttcatttcagatacttgtacgaaacacattggagatagaccctgtgaatgtaagcacttggtaaagccttaagtagtttcagtttctttccagtacagtcatcccttgatacctgctgggtattggttccagcactccgtgagccatgtccagtcccttttataaaatgacatgtttgtatgtaacttacccacatcctcttgtatagtctcaattatgtctagattacttaaaatacctcatgcattataaaagctatgcaaatagttgttctattgtattgtttagggaatcatgataaggaaaagagtctatgtattttcagtatagatgcagtaattgtgagcctatcaacatagtgtagtcagccagaacattaaagtttctttgtttcaactctca

SEQ ID NO: 8604 - DNA, 112 bp, Homo sapiens
gtctgctgggatgggccctccaagcccaagcctcctgctccgggggcagaccagactctgactctcctcttggggctgctgccattaaaacgctactactaagactcaggtc

SEQ ID NO: 8605 - DNA, 286 bp, Homo sapiens
taccagcctagaagggtcacattttggaccctgtctatccactaggcctgggctttggctgctaaacctgctgccttcagctgccatcctggacttccctgaatgaggccgtctcggtgcccccagctggatagagggaacctggccctttcctagggaacaccctaggcttacccctcctgcctcccttcccctgcctgctgctgggggagatgctgtccatgtttctaggggtattcatttgctttctcgttgaaacctgttgttaataaagtttttcactctg

SEQ ID NO: 8606 - DNA, 118 bp, Homo sapiens
gcggctgcggtcccaggaaggtcttaccccctcttctatttattaatttgcagacccagcccctcccctactttttggtcagctacgtctctagaataagatggtatctgaagtcctt

SEQ ID NO: 8607 - DNA, 300 bp, Homo sapiens
gcaggtgggcgtggatgtggatactgcctgccggaggctgggcttcctcctctgttcttgggggaccatccccaatgttggtgctgcctccgccccgtgggcctagggcacaaggagtcccagccacattcgggtgagcgtcctggcctgggccctatgcccgggggaagggtgaaattggggttcaggcccacccagggggccgcttcccactcttgggccctggttttgttatgatttggatgccccgctctcagttgagagcgaaggagaaataaacctgacatgttggtgcttggg

SEQ ID NO: 8608 - DNA, 2143 bp, Homo sapiens
gtgatcatggagactgccaggtaaggagactgcagctggcaagtcagcactgtcttgggggccgaaaggtcccaggccatgaccttcctcctccccctgcaggtttctgtctgcgtcgtcgtcggagggattactggggagtgcgctgcatccggaagtcgctgtgccctggttgaggggggttagggaggagtgagtgggactcaaatccagatgccttccccgtccgtccgtccgtccgtccatccgtccacttgccctcctggcaggtgggtggggccaccatgctcatcctacaaacggggaggtgggggggacttctggtgggcaagggcccctgggctctaatagggtcatctctggcagcccacttgggccagctacgtgggagggaggaattacacagctgaccgaatccggcttcggatgaggtgagggaggagcaggtcaggaggggggccctcgtagggacgcgtacactcacacggacacacatggccacacgcatgtgcgggtgccataaccggcgaggctgggccagccgctccaccatttccccgactgcatggagacagtagaattagtgaacccctgagttaacccgtaaggccttccgtgtaacctgcatctagagtttaagaagcttctgctgttttgccggaattggcggtgactggggagggctgggtgggtggggggcctcaggcgggatctcggggcggggggaggaggatggtgaccttgggagtcgccctgtcagcacgcacatgcttgggacccactccacacactccctgccagctttgttgcagcctcagctggtggtgtctccgtccttatcctagcctagctcgcagggtgagaaccactggagtggctggggctggccagaggtcaccgtttctccttcctgtgtgctccagtggcttttgaagacactgggttgggacctttttcctgaagagagctgggtgtagccagagctactggcacctaccccgagcatctctctctgtaagcagcttcaggggcagtccgtttctctgtgcttctgaaacccccttctcacgtttcaggccccagttttaactcaaggcctggggcaggggcgtttaattgatgatgacagaggacacaggtttttgccagcaaaaaggaaaaccaaggcttggtggaagggaaaggtggtgtgtcccctgttccctattccatctccctgggacttcctgctcatcatagtacccagtgagcccagagatcctactagactgggtcagcaattctagagaaccttccggaatagtctgggaacatggtcaaggtggaaggggctcccctagagagggtgggggtgtagttacttcccagttggccagaaaactgggccttgcagacccccttagcattttttccctttttttccttccctgctttctacttctttggggagccccttgtgttttggagtctgactggagtctcgcatcctggggcctgctccatccatccctcctgggcgccagaccctccatccaagccctgtgtctttccatagtcagggtcaggccctgcatctattccaaggggcactcagtacacattccataaattagctgggtgtccctgcacgcccaccccatgaaactcgagcaggtctctggaagccatttgttaaaaaaaaaaaaaaaagttttaaaaataccttttaattttctggtaattccagttctttgaagcatcctctgctgggtcttggggtgtgtggatggattggctgtctgatgggattggtaacccctcgctactcaagatggggggatacaaacaccttcagggaaggggagcctggttcttctcgttttcctttttttttttttttttaaaaaaaaactatttaattttttaatttatttttggttgttttttgcacaatgaagtttcagcttctcaaccttctcccctacccagggctgtggacccagactggccttgagccacagtccctctttccctcctcaccctcttccccctgcgggctcccgggtctgtccatttgttactgtgctgtgctggggattggcgccgaggtggcgtgagattccacttgtgtagaactttgttgagtaaagatcagtttcttgtg

SEQ ID NO: 8609 - DNA, 320 bp, Homo sapiens
cgcccctcccccacctgcccatggcctgggactctctgcgatgtacataactatttaatgcagcggcagcggcgacagccttccctgagaggacttaaaagcagaaggaaaccgagatgcttcccgcagccgtggacgattctccaggactctttttttaccttgagcacttgcctcgtgagacttcatagaacagtggtttactgtcccccccttctcacctcctcattctctctggctctttctgtcttcctcttctcaccctcctccctccccttagccatcacttctgggaagtaaagaacttgacttagtgccgg

SEQ ID NO: 8610 - DNA, 279 bp, Homo sapiens
cagacctcacaatcaagccagcctgggctccacccaccctggcttcctccagctcacatggcgcccagcactgggcttcagccaggtgctcgagagctttgaggccatgatctctgctcttccctctcccagattggtggggagggagggcgggaggtagatataggcctgttctttttagcaatgtgattcttgttgttgattctctctctggagttcatgtgctgcctcaggagactctgattttatatttgagaaaaataaaggcgttcaatctgc

SEQ ID NO: 8611 - DNA, 260 bp, Homo sapiens
gctggctaacggatagtgagcttgtgcccctgcctaggtgcctgtgctgggtgtccacctgtgcccccacctgggtgccctatgctgacccaggaaaggccagacctgcccctccaaactccacagtatgggaccctggagggctaggccaaggccttctcatgcctccacctagaagctgaatagtgacgccctcccccaagcccacccagccgcacacaggcctagaggtaaccaataaagtattagggaaaggtgtg

SEQ ID NO: 8612 - DNA, 131 bp, Homo sapiens
caactagttgcctggtatatagagttgcagatgcaactcagatgcaactctatctactctatgtacttagttcccaggagggaggctgtgctgccctatttcatgaagatggaaactccagttcaccgaag

SEQ ID NO: 8613 - DNA, 33 bp, Homo sapiens
accaataaagagatgtcacgtcaccttctcccg

SEQ ID NO: 8614 - DNA, 223 bp, Homo sapiens
cggacgcgtggccctgagttgggggagcgacccttcccccagccccgcccctcaggacacccagaaccccacccctcgtcctctcggccttctgtaatagttttgagatgtctgtccctcctccctggagctccagagacccacccctctccaggttatcccagaaatgacccaactctctcacttttccctctcccctttgaataaagtcgccagctagagc

SEQ ID NO: 8615 - DNA, 779 bp, Homo sapiens
cccttatggccaggtgcagtggctcacgtatgtaatcccagcactttgggaagccaaggagggaggatcacttgaactcaggaattcgagaccagcctgggctacatagtgagaccacatctctactagaacttaaaaaaagttagccaggcacggtgataaatgcctgtagtcccagccactgaagccagaggatcgattgaaccagggagatcatggtcacagtgaactatgattacgccaacctgggtcacatagcaagactctgtttcaaaaaaaaagggggggcgggggacgggtgggtgcagtggctcacatctgtaaccccagcactttgggaggctgagatgggcagatcacttgaggtcaggagttcgagaccagcctggccaacatggtgaaaccccatatccattaaaaatatttaaaaattagccagacatggtggcacgcgtctgtggtcctagctcctcgggaggctgaggcaggagaatcgcttgaactcgggaggcagaggttgtcatgagctgagctaacaccacggcacttcagcctgggtgacagaatgagactctgtgtcaaaaaaataaaaaataaaaaatctaagggctcaggaaccagtttggacttgattttgaatcccagttcatccccttcctagctgtatgaccttgattgtgtgccttaaccgctctgtgacacagtctacctgtctgcaaaatgggaaacataatacctgccatcaggattgttgaggagtaaataaatggaaattggtg

SEQ ID NO: 8616 - DNA, 462 bp, Homo sapiens
gccctgccctggcacttggactctcctagtgactggggatgggacaagaagcctgtttggtggtctcttcacacggacgcgcgtgacacaatgctgggtggttttcccacgaatggaccctctcctggactcgcgttcccaaagatccacccaaatatcaaacacggacccatagacagccctgggggagcctcttacggaaaatccgacaagccttcagccacagggagccacacagagatgtccaaactgtcgtgcaaacccagtgagacagaccgccaaataaacggactcagtggacactcagaccagctcccagatggccctggacagcaggagagggtgtgggatgaggcttcccagagaccctgggtctagaaagcggctcctgaaggtcccttattgtggctgatattaactgtcaatggttatgggtcctataaaaatgcccctcccagataa

SEQ ID NO: 8617 - DNA, 278 bp, Homo sapiens
catgggccactctaggacaggtcatcctccccgagtccctgctgctgcgctcctttgcatccctggccagtgaccttgtatttatgaggcctctgtgaggccagcccccaccttcctctttcccacctgtcccaggaccagaatcccagggacagaggactgggtagcaggttccttctgttgtcctgtgtggtgtgtctactgtgagggtgggccctgaggagacctgtgggccacctattgtctaataaagtgggcagttgcccccatctggtggc

SEQ ID NO: 8618 - DNA, 49 bp, Homo sapiens
ggctttgtcccttcccaataaagcctgctacctggcagtacccctgaag

SEQ ID NO: 8619 - DNA, 285 bp, Homo sapiens
ccgcacgcggcagcacctctgagccggagggcaccagggactcggcccagggccgtcaaggaaagggcagtggacgtgctgcgcatgttcgggagcgaactcccccgaagaaggaccagtgaagacgtcaggggcaaggtctcgggggtccggaagggtgatcatcgacccccaagggacccgcagacccttaaaaaaatcacccacaaccctctggaagtggccttgcccggtccccttcccaggggcgaggtcggcaaagcaacatggcagagcagtcatagg

SEQ ID NO: 8620 - DNA, 1603 bp, Homo sapiens
ttccgtaagtggaagcccagccccctcaacatctggtaccagcactccgcggcggggccgccgccagctcccccagaccccctccaccccccggccacacgtgtcctattcccctgtgatccgtaaggccggcggctcggggcccccgcagcagcagcagcagcagcagcagcagcagcagcagcaggcggtggccaggccgggccgggcggccaccagcggccctcggaggtacccaggccccacggccgagcctctggccggagatcggccgcccacggggggccacagcagcggccgctcgcccaggatggagaggcgggtcccaggcccggcccggagcgagtcccccagggcctgtcgacacggcggggcccggtggccggcatctggcccgcacgtgtccgaggggcccccgggtccccggcaccatggctactaccggggctccgactacgacgaggccgatggcccgggcagcgggggcggcgaggaggccatggccggggcctacgacgcgccaccccccgtacgacacgcgtcctcgggcgccaccgggcgctcgcccaggactccccgggcctcgggcccggcctgcgcctcgccttctcggcacggccggcgactccccaacggctactacccggcgcacggactggccaggccccgcgggccgggctccaggaagggcctgcacgaaccctacagcgagagtgacgatgattggtgctaagcccgggcgaggtggcgcccgcccggccccccacgcaccccacgcacacaccccacccgaggagccgcgcagaggccgcgggggcccagcacagagggcccgggagagggccagccgggagaccccagactctggagaggccagggctgggccacaagggtgtcccgcagagaccctcggccaaaagagaccctcctgggcagccacggcgccccccaaccagccccgatccccccacccacgacaggggctctcgggtgggaggcagggagcagacaaaccacacagccaagggatttgaattaactcagccatttttggagaactttggggaacatgaaaaaaaaaaaaaaaaaaaaaaaaaaaaacatttttaaaagaaaaaacggggagaaaaaaatagcttctattgatgagttttatcatctcaattgaatctttcctttccctgatgaagacagctggtggccgagtgcggcaaagaagccagaaggaaccagaatcccagtgccctacacccaccaccagacacactcacacccacacacgttctcagacacacacaagagtgcttgccggttataccaaaccctactattactgcctgcagaaatcaatttaaaaaaataataataacaataaacaattttaaaaaggacaaaaaaattaatgattgagaaaagaggcatttttttctgacatttggtcctgcttgaaacaacaaaagaagaagaaaaacccaccatcaccaccgattcctttgcttcttttttccttttttcctaccttgtttgaaaaccgtgggcttgggactgtgaattattgcatgacattcaaaaagaaaaaaaaaataaaaaaaagttgaatcaa

SEQ ID NO: 8621 - DNA, 447 bp, Homo sapiens
gccactttgaggtctgtgtttcctttgccacccagcccccatgtccgcagacctcctccaagatgctccagggggtcctagtggaccctacaaacctcccttcagttgcccggaagttggtcttccatggacaacacaaaggaggccgtgaggtcctggcctcacctggccagggtcaaggtcatttgccacccttggcttcagggagggaaactgtgtctcccacagccccagtgacttcaagcgggcctgggctccaggaagctggccacctctgagcagggcccatcctgtccggatttgcaaattttagggtcctgagccaagtatggatggttcagaatttgtttctttcctggaggagaagagagctccctttgttttctttctccccatttccattttatttcttctgggaagacccataataaatgattctgtagaggc

SEQ ID NO: 8622 - DNA, 352 bp, Homo sapiens
agcaatcagaacaagaaaatgataagagtgggttagaaggtgatgaggaggctgggtgaggtggctcatgcctgtaatcccagcactttggggagccaaggcaggagaatcgctttaggctatgggtttgagaccagcctggcaacacagcaagaccctatctctaccaaaaaaacatagccaagcgtggtggcacatgcctgtagtcccagctattcaggaggctgaggcaggaggatcgcttgagcccagaagtttgaggctgcaatgagccgtgatcgggccactgccctctagactgggcaacagagcaagaccctgtctcttgaaaaaaaaagtgatgaaagaggta

SEQ ID NO: 8623 - DNA, 1154 bp, Homo sapiens
gcccttggcctccccgccccacccgcccccgccacccctccacgccagggtccctcaaagcttctgtggcttcgtggtcactgctccagcctcagccagggcagggagggggactccgagacagggaagaccggggccctcctcccttatggggccggcacaatcagtgggctgggcggagccgcagctgcaaactctgacacaaaagacgtgccttaaggaacccgccgcgtgcccaggtgccccgcggggcatccagctcggccccttggccgcccccctcccaggccccagcgtcttctccccagccccgtcctcccaccaccccagggggcaggcaggcaggccccctcccgtgcgaaactgttaacttattcagctcgctggctttgcacagcctgtcctgggcccagccctgagccccgggccggcgcaggtgggcgtcacctggggactccccactgtcagcagcagccccgggacaccctacccccagcaaccccactgcttccccttcttggtattaagtgcaattaaagccgtgggtgtcgcatcttctccagcgctgggccctcccttgcccccaagctcaagaagggggcactgcccggcccggctgtgaggagggcggcagggggcacggcctccagcttccaaagagcagcgagccgcggagccggggagtgcccacagaccccagcccccgcgcccccgccctccgccgctggtttgtaatggaaccttttctgtgcccctatcttcccggagaccacgcttctcctccgtgccgtgcgacccccaccccatgactattgtgcgattcgtgagcgccgcccgagcggagttggtaacttgttgggtttttttccaaccatcatggccttatctgttccagttttctcagtgttttcagcctgtgagatagatgtttatggcaagaaaaaggaaaaaaaaatggaaatctgacctattgtataaaaatcactattttgtgtgctccgcgtgctatagcttttggggcggccctgcccagtccccgtgcccacggggctccctctcccggtggtgaaagtgtccacacgtgtggtagtctagtgtgccgagctgttttctacctttttgtagtctttcttaaaacaataaattccgctgtg

SEQ ID NO: 8624 - DNA, 1415 bp, Homo sapiens
gggcatgcctgtgcccccatgggttttcttttttcttttttcttttttttggtcgggggggtgggagggttggattgaacagccagagggccccagagttccttgcatctaatttcacccccaccccaccctccagggttagggggagcaggaagcccagataatcagagggacagaaacaccagctgctccccctcatccccttcaccctcctgccccctctcccacttttcccttcctctttccccacagccccccagcccctcagccctcccagcccacttctgcctgttttaaacgagtttctcaactccagtcagaccaggtcttgctggtgtatccagggacagggtatggaaagaggggctcacgcttaactccagcccccacccacacccccatcccacccaaccacaggccccacttgctaagggcaaatgaacgaagcgccaaccttcctttcggagtaatcctgcctgggaaggagagatttttagtgacatgttcagtgggttgcttgctagaatttttttaaaaaaacaacaatttaaaatcttatttaagttccaccagtgcctccctccctccttcctctactcccacccctcccatgtccccccattcctcaaatccattttaaagagaagcagactgactttggaaagggaggcgctggggtttgaacctccccgctgctaatctcccctgggcccctccccggggaatcctctctgccaatcctgcgagggtctaggcccctttaggaagcctccgctctctttttccccaacagacctgtcttcacccttgggctttgaaagccagacaaagcagctgcccctctccctgccaaagaggagtcatcccccaaaaagacagagggggagccccaagcccaagtctttcctcccagcagcgtttccccccaactccttaattttattctccgctagattttaacgtccagccttccctcagctgagtggggagggcatccctgcaaaagggaacagaagaggccaagtccccccaagccacggcccggggttcaaggctagagctgctggggaggggctgcctgttttactcacccaccagcttccgcctcccccatcctgggcgcccctcctccagcttagctgtcagctgtccatcacctctcccccactttctcatttgtgcttttttctctcgtaatagaaaagtggggagccgctggggagccaccccattcatccccgtatttccccctctcataacttctccccatcccaggaggagttctcaggcctggggtggggccccgggtgggtgcgggggcgattcaacctgtgtgctgcgaaggacgagacttcctcttgaacagtgtgctgttgtaaacatatttgaaaactattaccaataaagttttgttt

SEQ ID NO: 8625 - DNA, 949 bp, Homo sapiens
ctgcaggaacccagagtgtcccagcacgccgggaggggcaaccaggcctcccagcgagtcctgcagggcccatctagaggactttgggggccatcagctgcaatccaggtctgtcaaactcagcccctaggaaagaacaggccttgggtctcccctagtcctggccagaaggatgatctcgcttttcctctacaggcctataagaagcaggtacttcagttctaaattctgacttgtgttcttttcgtcttcataaattctaactaaggccactgtgccactgtgcacccttgagtaccattgatccaaagctttcccacagacctccctggcccacctagaggctttcttggtcagtgcctgtcaaggctccagtcctgctgagccaaaggctttgtcattcctttctcttcctgtacatctgagcagacccactccagctttctggtgtcacaggcgggaatgttagttagtaggtagacttagatcccatttctgtcctgctcccaggaagattcttaggtcctcttcaatccagcagcccctcccagaggtgtgatcagcaggatgctgaggaaccatgttgcctttcctgtcaatcacagccaccttcctgttatctcctaaatggatctggcttttcctggaggctgccatggttggaagatggtatcagagggcctgcctgggcagtctgtctccgggccagggtcagggaccctctgcctctggcagccttaacctgtcctctgctaggaccagggtgatttcaagccagggaagcaactgggaccctgaaaactgtccctccccagcccgctccccctctctgtgccctggtccccttgctgccatgtggatgctgttgtgattgctgtttgtatattatcaaaatgtttttatattaaaaatgtttggtctgaaaattaaaagcacttcatttagaatg

SEQ ID NO: 8626 - DNA, 3134 bp, Homo sapiens
gggcacctcatggaccaggggctggtggcccaggccagggagggaaccctgggcagggctctggtgggagagggagacagatggaggcagtggctggtgggccactctctccaggtgcccctcagccatgggccctacagtcccctcaggggactctaacctgggggcctgaggtgccagggttcacagacagggtttcccaccagccacacgcaccagctctatttgggggaagtgtagtgaggaggagcccagaggaccccaggggagtgaggagggagaacttggaagggtgcagcccacttccagactctcccctctcccacccttctaccctgtgaagggaaatgagggctttagtttcctgggcagggaggggcagcttctgaggttgccaaaggcccccactggatggaacctgttagctgctcctctccgcagccagaaatgctgccggctgcacccagagggagcagtgaggcaggacagatggacaggttcctcctgcgctgtaattccctgctccctggagactgggaaaaggccgcagggcagggggactgggcggtggtggctggtggtttaaaggttgaactttctctgaagctcctttccccttgctcttggtccctgccccgcaagcaaacctgccccctctgcctcccagtgcacccaatgaccccctcccttggggcgactcctgatgaagcacaactccccgcagggcccccagcccacaggggtggccatatttgggcagttcccagtcctgtgggctcggctatctggggagcagattttgggtctggatctccctggggagtgggtcctgggcttggatctttccctagggggccctcttactccttcctctctcctcctccttccccattgctgtaaatatttcaacgaaatggaaaagaaaaaaaaaagacaaaaaaaaaaaaaaagaaaagaaaaaaaatctcatcacttgaagccaccgggagcctgcggcccgggccagcccgggctttctccggagcagagcagcgctgctggcctggcagccaggacttctccgtgtacgtgcatccccagtccccgccggggcgggcgggccgccagagcagctttttacaatccagagacagaaaacaaaatctagatgcaacagcgaaacaaagaacccatttccttcctggcaccctcctttcctgctccgcctgcccggcatcatcagcccttctggggcgtgtacctctcactgcctgccccaggaccagaggcctgtctcccccttccctccccaccggcccgggggagacctcttcacacccaaagatgctttgtcaagatggctgcgctgtccctttgagttcctgcttcttgtatattgctctggggactctcgccggggaagatggggctgatttcccacctagagaggttgatggcagaaggaaaatggggaggcactggggttgtggagggcatgggtatggctgaggagggtgctgggaacggcaaggcggtctgggggatggggaggggcaaaggtgagagatcaccttccctatcctccaccttcccgcagggaagacgaagccaggtgccagggctggggtcgggacacccatgttctgggcggcttgaccccaaatcccagaccccggaagctccaggctcgggatgtgtcctgagcacctgtcccggccccctcctctccagcctgtcaggccagcctccccagcccccttccctcaactctaggggcagcatagccccaggccaccctagcccagcccctgcattgccgtttccccagaggtggcccctccacctctgctctgacctctccccatctctctgcccctccttttctcacaagtgccatgagttttcaaacatcttcgggtctcagcctgctgctgccatgaactttgttgggttaagggggaggggctctaggaaggaactggggggaaggggacaggtaggtggctggagggaccctttttgctgctagaaagcccctcccttctcccggggagctggggctggcttgtccccatcaattaggggagaaggggtcagaccaaagatggtggtttgtcccgtgtaagggaacaggtgtggggaagaggtggggttgggttccaactctggctttttctggtagaaaggcctaacccattacaccagaagaccatgggtgaagtctagatggggaggagaagtgaggccagggacagtcttgccagacgactctgaggagggcaagggacagttccatggcccttcccggactgcactaggctgggagctctgttgtgtggaggggtggtcagaggtctgtgaagagcgggcaggaggcatgagcaggcgaggagctggcctgtcccgggaagcagcccagcctgtggctgcccccgacaccaggaggagggccaggagagttccagggggctgaggcacacagagaggccaacttcctccctgcccagccttccttgtatctctccagactcggacaatcaaagggagagagggtgtatcgggtcctgttccagccggcatcgccgggtggcttccaggcctcagagctgtgtggcagggccccctgctggggctggacatcactgcagtccagtgcaaagccgcccccagagcccaggtgtccccccaacctaaccagacctggtgccttgacgcccccaccccagctgggacggtacagagaagggtcttggtttcctctcctactcccttccttaggctcctgaactcgtttgctcctaaatcttgttaattctttttctctggattttggtttcttttggctttcccttgccttcccctttctctgtctccaacactctttccccatgtctttctggctgtctctatgttcctcttctcttatcctcaactttctgtccattcgggcctcctccccacctcccacgccccagcccctccctccttggtctccttttcgatatgccaaaccaattttgggtcgagtgcatttaacgagaacaaaacaaaaggctcataacaacaagaacgtttcagaaaaaaacaaaaagttttaaaaaaattgttgagtcaaaaagtcaaacaataaagaaattaagatttcttggaatgac

SEQ ID NO: 8627 - DNA, 53 bp, Homo sapiens
ggggtgcaccccccaccctatggaccagtcaaataaaagccttcaggcccctc

SEQ ID NO: 8628 - DNA, 1170 bp, Homo sapiens
ctatctgagctccccaaggactgaccagggacctttccagagctcaaggatttctggacctttctaccagttgtggaccatgagagggtgggagggcccagggagggctttcgtactgctgaatgttttccagagcatatattacaatctttcaaagtcgcacactagacttcagtggtttttcgagctatagggcatcaggtggtgggaacagcaggaaaaggcattccagtctgccccactgggtctggcagccctcccgggatgggcccacatccacctccagtccctggccaggggtgagaggcagaccagcagatggacttgatccctctgtgtctttttgcttctggctggtagataatgtcaacctgcagtcttgattcccagaccctgtacactcctccttttctgttgtgtgatcagtttgtgctttattctgtatttgtctcccatgtcttgctcttctcctggagaattctgtcttctctttggccatctcaaattgagaacctaaactattcctgcagaactgcctggttggcgtccacaagcaatacctctcgttccagcaggaccaagggagccagcctccagtgagtgactccagcaagtgcagccacctctcccttgatggtctgggagcctggcctcagcaaggggccttcctgacctctggctccagtgaagctgaatgtcctcactttgtgggtcacactctttacatttctgtaaggcaatcttggcacacgtggggcttaccagtggcccaggtaattttttgtttcatggactatggactctttcaaagggatctgatccttttgaattttgcacagccctagatacaatcccttttgataaaagggtctttgcttctgattacaggagcactgtggaacgtctgtaaatatgtttttataattccatgtatagttggtgtacactcaaaacctgtccccggcagccagtgctctctgtatagggccataatggaattctgaagaaatcttggggagggaaggggagttggaacaaatgtctgttccctggaggccagtccagtgctcagacctttagactcattgtaagttgccactgccaacatgagaccaaagtgtgtgactagtcaatgaagtgcgacagcattaaagactgatgctaaacctc

SEQ ID NO: 8629 - DNA, 117 bp, Homo sapiens
ccaccacgtgccagagccgcccacccggagccgcccgcatgcagcttcacctcccctttccaggcgccactgttgagaagctagagattgtatgagaataaacttgttattatggaa

SEQ ID NO: 8630 - DNA, 93 bp, Homo sapiens
gcacaaccagaggcccaacgactaagccagcccaccctgggctgggcccaggtgcgcggcgcagagcctttgggaataaaaagccattctgcg

SEQ ID NO: 8631 - DNA, 656 bp, Homo sapiens
gactgcccccggaccctgcgatgatgacccgggcgcaacctggtgggggcccccagcagggacactgacgtcaggacccgagcctccagcctgagcctagctcagcagcccaaggacgatggtgaggggaggtggggccaggccccctgccccgctccaatcggtaccatcccctccctggttcccagtctggccggggtccccggcccccctgtgccctgttccccacctacctcagctgggtcaggcacagggaggggagggatcagccaaattgggcggccacccccgcctccaccactttccaccatcagctgccaaactggtccctctgtctccctggggccttgggttctgtttgggggtcatgaccttcctagtttcctgacgcagggaatacaggggagagggttgtccttccccccagcaaatgcaataatgccctcacccctcctgagaggagccccctccctgtggagcctgttacctccgcatttgacacgagtctgctgtgaaccccgcaacctcctccccacctcccatctctccttccaggcccatccctggcccagagcaggagggagggagggacgatggcggtgggtttttgtatctgaatttgctgtcttgaacataaagaatctatctgctgttgg

SEQ ID NO: 8632 - DNA, 194 bp, Homo sapiens
aactagaatattcaactccatatggaaaatcatatccatggatctctttggcattatgaagaatgaagctaaggaaaagggaattcattaaacatatcatccttggagaggaagtaatcaacctttacttcccaagctgtttgttctccacaataggctctcaacaaatgtgtggtaaattgcatttctcttca

SEQ ID NO: 8633 - DNA, 3843 bp, Homo sapiens
aaaaatcttctgaataagatcttccctctttgcccgtggaaaatctgaacaatctttgagccatctagaggggaaagaaaagactttgttctgtgtgtttcaagaaattcaccatgtcagcaatatgaaggatgttatggaaggcgtgctaggcattcaattcctgcagaaaccggaaatcttccatgccctgcaatgtgctcatcaaactctcagcatatggacggccagctgtggcccatatcttggtcactctgaagcacaatatttatgaagctatagaacgttaagacctctttcacagcctctccttcctacaaagactcctccaaatcttaaaatgaagcaggaaaacgagcctaagaggactttcataccgacaacatctgaaaggactagaatgttcacaccacgatctggatttcttaattttttgtttttgtttttgttgttctctagttctacgggtttgattatttagtcatgtgaaaaatattgattactcacacatagatcaagagagacacggctcctgccttcatggagcttttaggggaaaatgaagtggctcttgcagctagagttgactcagaagccgaaattcctagaaatcaggtttctactgctaggcaattgaagtataaactattttataaacactgtcttctttcgtcttcacaccaacatgcagaaaagtttctaatctcagatcggggatgtgcaacaaattccatttcaaaggaatgacctgcaaaactcctaaatattccaagcaaatgcccttaaccctgtctgttatctgctttccttgaacagaaattctacatgaccataaaacctcgaagatgggtatggcacagttcatgccctgtaatcctagcactttgggagggtgaggcaggaggatggctcaagcccaggagtttgagaccagtgtgggcaacagagtgagaaccatctctacccaaaaaaaaaattaaaaattagccaagcatggtgatgatataggagttaaggagaaatcatttaggcaaatagcaagggtaggaagtcctcagtaaggttttccatttaatgaaaagcagcccccaaaatcattttcttttctaacaaagaacagcctgtaaaatcgagctgcagacatagacaagcaagctggaagcttccacgggtgaatgccggcagctgtgccaataggaaaaagctacctagactaggcatgtccaaaatggcggctccaagttcccttctctttgccagccatgtgtacagtaaaaagcaggcaacatagtgtcagccaaagctcatttgcataataagattagggtggggtggccagctcacataggggtaggccctaggtaaatcagacaccgccttctcaagcctgtctataaaatctggtacactatgacgagggtcagatttcccattcagacgcccctctcccatgcaagagaaagagctgttctcctttctctttcttttgcctattaaacctctgctcctggccaggcacagtggctcacgcctataatcccagcactttgggaggctgaggtggtcagatcacctaaggtcaggagttcaagaccagcctggtcaacatggtgaaatcttgtctctagtaaaaatacaaaaatatatgaaatctcacatagatgataatattaagttccaaaagcaactcaacctggtagattctaattttttttgaggcagggtcttgctttgtcacccatgctggagtacaatggcacaaacactgctcactgcagcctcgacctcccaaggcctaagcaatcctcctgcctcagtccccctccaggtatttgaaactacaggtgtgtaccaccacaccgggctaatttttgtattttttgtagagacgtgggtctcactatgctgcccaggctcaggtcttaatctcctgagctcaggcaatccgcaggcctcagcctccctaagtgcggggattacaggcttgagccactgcacctagcctctatttgttttacaaaagagaaattgagatcctgaatgttaagtgacttgcctgaggccatcccactaacaggagccagggttaggattcaaaccccatccaactggtcccagagctggagcttcttgcactgccctacactacctaccatctccatcctctgggcacctttttataagaaccaaaacattacagagcattgctttgtcaactcagctgggaacatttcccagtgcaactcacatttttcactgctctgtgcctgtccgtataagctcaatgagtattgatttaggggctttggagaactttgaatgctaccccccaagtaaccattgttggcaacctggtacctctacttttagccatttctccttctctataaatagtgcagaagtaacccacttggtaacaggcatccttgccaagcctccaccactaggtcagtgtaagaattaaagaaagaggaaagaaacacaaaaagtggcttgatggttaagacaggtttattttagagaaaacacacctgagaggggctgctggctgaattaggttagagtcttttctacagactaagagtgtttaaggatttagggtgggagagtttcttagaggcttggactgcttctgtgttttttttgttgtgcttatatgggagggagagtggtgtgtttgcttttatacatttttctgcagctgtaggcataccccccaagtctgcttttagcttccctattttagtgcacctggagggaaaggaatgtgcttattaaggcccactgttttactggggcccattgtatgagggtgaagtttggcagttacccaagagacttttcctccaccttcctctgtgcccgagctgttttatctgcattttactgtctgctttttttggctgcttatagtttttaaaaaagtaatttccttaaatccagaaggctaaaaatgaagctgaaacttaaagtggcggtgtttgtccaaaataacggggctcctgctctgccagtcagtaccctcaagtcactcctgatcctcaacctccatgcctaaggctggttcaagagaccacataatatctgccttttattacatacatgatgggtgcatgggattctgcgtgccctttgcttgatatagactgctaaggtgagatggggaatatcagagtcagctgctgcttgaggaagcagaacacacagctggaggcttggaacatgtgggtccctatgagtgtagagcccatatccccatagagtctacctagagcaggggtcgccaaatgttttcttaaagagcctgatagtgtatatgttaggctttgtgagccaggtatttacagcaactcaattctaccactgtggtatgaaaacagctatagacaatcataaatgaatgatcatggctatgttttaataaaactttacagacactgaacttgaacttccattgtgatatgaaaacagctatagacaatcataaatgaatgatcatggctatgttttaataaaactttatggacactgagcttgaacttcatatatcagtcatgtgacacaaaatatcattcttctttttatttgttttcacccatttgaaaaatgtaaaaactattcttagctgtacagaaacagatggtgggtcagatttgactcactgcccatagtttccagaccatgatgttcaggttcatggaagcacttcactctacactaatttattcatccattcatcacatatgtgatgagcacatacagacacacctcagagatattgcaggctccactccagatcaccacaataatgtgaatattgcaataaagcaagtcatacacatt

SEQ ID NO: 8634 - DNA, 954 bp, Homo sapiens
ttgcagggctctaagcttcagaggtagtaactgtcattcttcaatcagatagtggaaatagaacttgctccttctattaatacttattatatttctgggagtttcaatttgttgtgatttcaactggtcttgtagaatttaagcaactccttttattaagctttctgctctctgatatccaacagttttttctctttgttgttttcctactttctcaaggttatttccgactttggatcagaaacactttggagatttccatttgtctcatacagggaagagttgtatgtctcctgtggcatagactacacttggcaattggggtaattgatgtaaatttatagtggaatatgacctgagaccacaatttgttcacttttgtattcttcagtcctatgtctgtctctaccttcaatgctcctcctgataatgtagacctgaacatacttgtgtattttgcagctggtcatgagattgtgttgtcctcattaggacatcatgtctttgtcagtgccatgtccacagtatctgccatactccctggcatagtacggtaaggcaaaaattgtttatcaaaaatatgttccgagtgcaatgcccactgaaagacaaacttgcatatgttgattaacttaatatggacttacagtcagagatgaccttaaatatgatggagtaaaattgtcaatcatacattgaattgctatggaagacttgtttttatgatgtgcatggactcattgaagtatggaagcttagtgcccatatataagtttatttattggagtgatggatttggtgccatggtctataatgtttcatgcatccatacttctgtttttgcttcaaaatttttagtgctccctacaaatacgaatccttctatcccactaaccaaaatacctccttcattataaaattttgtcgtaaacattaaagtgcaggtcagtgaac

SEQ ID NO: 8635 - DNA, 16 bp, Homo sapiens
ggggcctccagctctg

SEQ ID NO: 8636 - DNA, 276 bp, Homo sapiens
ggccttgtgggtcaggacgcttggctgccttcctgcccctggactgtgtccagctggtttggagtctcatcattgcttgccctgggcctatcccatgaggcccagtgactccacaacctccctgaggaggggatggaggggtcaaatctcagagaggctctcttgtgagctcttggaccctcctcttcacggacccaactgtgccgtttgtcccctctcttatggagactgaataaaccacctctggcccatgtaggcccaagtactcagtctcag

SEQ ID NO: 8637 - DNA, 1029 bp, Homo sapiens
gacgctcgtcagttcttagatcttgggggcctaaagagacccccgtcctgcctcctttctttctctgtctcttccttccttttagtctttttcatcctcttctctttccaccaaccctcctgcatccttgccttgcagcgtgaccgagataggtcatcagcccagggcttcagtcttcctttatttataatgggtgggggctaccacccaccctctcagtcttgtgaagagtctgggacctccttcttccccacttctctcttccctcattcctttctctctccttctggcctctcatttccttacactctgacatgaatgaattattattatttttatttttctttttttttttacattttgtatagaaacaaattcatttaaacaaacttattattattattttttacaaaatatatatatggagatgctccctccccctgtgaaccccccagtgcccccgtggggctgagtctgtgggcccattcggccaagctggattctgtgtacctagtacacaggcatgactgggatcccgtgtaccgagtacacgacccaggtatgtaccaagtaggcacccttgggcgcacccactggggccaggggtcgggggagtgttgggagcctcctccccaccccacctccctcacttcactgcattccagatgggacatgttccatagccttgctggggaagggcccactgccaactccctctgccccagccccacccttggccatctccctttgggaactagggggctgctggtgggaaatgggagccagggcagatgtatgcattcctttgtgtccctgtaaatgtgggactacaagaagaggagctgcctgagtggtactttctcttcctggtaatcctctggcccagcctcatggcagaatagaggtatttttaggctatttttgtaatatggcttctggtcaaaatccctgtgtagctgaattcccaagccctgcattgtacagccccccactcccctcaccacctaataaaggaatagttaacactca

SEQ ID NO: 8638 - DNA, 517 bp, Homo sapiens
tggtccttgctggcctgcccaggaggcatggatactcaggaaggaacacacacccattatctgtgtgtgcctgggagtccatacaatgtccatacatgggtgaactcttgaatcgctcataggcatgggactcctggatcccacacaagcgcacctatgggtgcctcgggacacaccaacccctatactcacacacaggcatggatgcatgtgtgtgtaacaaacactttgaccctgggaactgggtatacctctcttccagtggagccagatgccgagaccgagtgtcccacctcctcccttcctggggcctcactctgcgctttgccaaagtcgcttctctgccatagctgcacagaccttaaaccctgaccttcctgtccctgccttcgacctcctgcctgggtcttcagctcagtgctactctgaatacaatactgctgaccacatttggctacttcagcttaaatgtatgttaattgaaatgaaatacaatgaaaatgcagtgctcagtccc

SEQ ID NO: 8639 - DNA, 2242 bp, Homo sapiens
tcattggacacggactcttaataaaacggtcttcagttccagattccttcccagcaagctatagcttaagtccattttcttccgtgaaagggacaggactccatcaagttatggaattcctcagagccctgggcctgtcccccggggtggattagtcatgtccagcagcacacgcctagtcccgccttcgggaaggctgcctgcctggccagccgcccaggcctctctgtgtaaagactgcctggctgtcctgcccagccttcctggttctctggggtcctctgggtgggtggcatctcctggagggtgatgacaatccccaacacatgcattcatgtggtgctactctgtgtgcaaagccagaccccaagtatgttttctctctttgtcccatccctctttttctgggactttggaccctaactacttccctcctgaaccttgcagtgacatcagtccaggagagctctcgttcagtgtgcggaagaacactctgacctctagagctgtcctagataaggagtgggagctttagaggcaaggcctctagaccctggaaggctcagtgaggctcttcccacagcatgcttctcactggtgccctgtaaggctcgagccaccgctgactctgagccttttggagtctttcctccttcgtctccattgttcccgtgcatttccaaaagcttaagttgcctggtgggcatttccccagtttctttggcctccgtcttctcaagtcacatagggaaagtacctcctggaaccaggctgcagtatgcaggacctgccaggcaggcactggtgaagggccttgggcctatcatccccccaaccccacctcaccccacccgcctcctctagtggggtgagtctgggctggtggaccagagagggtgtcacagaccctcagggactgccccatggacacctctgactggtgttaacagtgtgaacattttccccgtcttcagtcccttagaatgacgacagcccctggggttggggcaggcgagtgtggccacatcatccaagccctcccagagacacaaataggcttttttgctctaaaaataaataccagcccttttttggtcacaaatccagcatctcagcagaaaactgcctgacatgaaaagtcccctgaggaactgcatctgcgtttcaggggcttttcattttttctccttttttaaagtgtagattgtgggtgcttcctagaggcctgccttcttctggaactggaagtgggctatcaccatgggcaagcccttgggtgcaggctccccacctgcctgggaactctggcagctctcctcagctccttgggcttgagcagctgcaactgccccagatttgctgtggaagcaggggctagccctggcctcaccagggcctcccggggccctgcattgatgctcaggagttcctgggctgctcttgatcctttctgggcatccagcttccagttaagctctgtttgccaaacaaactattctcagctgccctttggcctgcgcctgatgtgttcctgttgcagtcccgcctgcctgagacaggagcaggcaggagagccttcatgcccagattcccacaggacaattggggagctgctggcattgtctttctgggaagattctgctttcttggaccaaatggcagcctgattaccagtgtcgggcctgcatgctgcccccgacacacgcacgcacgcgcacacacgtgtgcacatgggccatagccacaagccagctctcctccagggtcctttcaacctcgctgtccagggaccctgtccttcttgcccgtggggcttccatctggcagagaacgttcagggcttgttgaacttgaaagctcattagacttaagctgtcacctgtgcttggtgccccaggaacagccagagaggacagtgcccactcacttcttgttggcagcctcctgtgcaggaagtgccagccgggcctcgacgcaccagctggctgtgggtcctgaggaggggcgggaggcggccgctcagtgcagatggggactcctctcctctgccctgaccttaccctccattacctccttcactggagtggggctggggggtgggtggaatcagtgttttaatcggatttttaaaaaacattttatttctttgtacaattaccatcctatgtaaagatgaaatttgtgttgagttgaagattgtcatggaataaagatcacaccgtacttgaggccatcttcatgt

SEQ ID NO: 8640 - DNA, 886 bp, Homo sapiens
gcgcacctaggtggcttctgactttgattttctggcaaaacattgactttccatagtgttaggggcggtggtggaggtgggatcagcggccaggggatgcctcagggcctggccctcctgcatgctatgcccggggcaggcctgacgggcagctgaggattgcagagcctgtctgccttacggccagtcggacagacgtcccgccacccaccacccctcacaggacgtccgctcagcacacgccttgttacgagcaagtgccggctggacccaagccctgcatccccacatgcggggcagaggcccttctctccgccaaatgtctacacagtatacacaggacatcgttgctgccgccgtgactggttttctgtccccaagaacgtgacgttcgtgatgtcctgcccgccgggagtctttccccacaccccagccatcgccgcccgctcccaggaggccagggcaggcctgcgtgggctggaggcgggcgaggccggcccaccccctcgctggcactgactttgccttgaacagaccccccgaccctcccccacaagcctttaattgagagccgctctctgtaagtgtttgcttgtgcaaaagggaatagtgccgtggaggtgtgtgtgtccatggcatccggagcgaggcgactgtcctgcgtgggtagccctcggccggggagtgaggccaccaaccaaagtcagttccttcccacctgtgtttctgtttcgtttttttttttcttttttttctatatatattttttgttgaattctattttatttttaattctctcttctcctccagacacaatggcactgcttatctccgaaatggtgtgatcgtctcctcattgagcagcggctgccaccgcgctgtgggt

SEQ ID NO: 8641 - DNA, 1385 bp, Homo sapiens
tgctcatttccctgttccagggaaggcgttgggatgatggatgcgttggtctttctcccttggtttgtaagcagtacaagggcgtgtgctcccagaatatgctgtaatctaattttggtgaagagacccagcgtttcctcctgagcagtgcctctcacggcttgtctcatgcagtcgtgtggcttcttgcccaggtttcaaagctgaagtacattgtccttagcggctgtaacatgtctcttgacagtagtgcacttggaataataaaggttgggtgattatatcttgatgatacattacttgttcaatacagccactgatggaatgcttccttttttatttttttccttaatttttttttttatttggttgggaacagctgaatactaggaatatatcttgctctatagaggatttttttttgtatgtttcaagcttcagcctttaacctatacctttgtagtgcaccatatggtgtgtgactttcacaggacttcgcagcacctggttcacatgtggcactgaccgcgtcacatccacgcactcccaaaggccagaagtatctgaccgacctacgccactggaaacacacccaccgcaacctcaagaaccagactgtgcagagggcattgcgtcccaatctttagtccttgctgaatcagttctctaatattttacctcatttgtgttccacctctagattacttcaggtttttttcctttaaaattagttactaccactcaaatgtatttacaaagagaatttggccaggcacggtgatgcatacctataatcccagcacttcgggaggccgtggtgagaggatagcttaagcccaggagttcaagaccaacctggacaacatagcaagaccccatctcttaaaaaaaaaggaaagaaaacttgatgtgattgccataggtggaataatccaacataaattgccatagatagaaggtatctgtaatatatatatatatatataaaatgaaatatatgtttcattttagagaaataactattactttagatctttccaaatctgagaaagggaggctagcatgtgttcaaggttagcacgcaacagaatttcctaaaatcagaagaattggaagatcctccccttttgaaatggccctgctgtgtcagtttccctgtggccttttgaactgtacatctcacatgttgggaaacgctggccactgggaaatcattagaaaggaggctgtagaatatttgccgagcctctactgtataccaggggctaactcaccaagcacattctaggaattgggccctgctcatgaggagccttagtggagattccaggtgaatatttatgaaaaagtcaacattagaactgaaaatggaaataaactgcttg

SEQ ID NO: 8642 - DNA, 74 bp, Homo sapiens
cccgagctcggggcgggcggagcccgcgtggccgaagctggaaaccaaacctaataaagttttcccatcccacc

SEQ ID NO: 8643 - DNA, 716 bp, Homo sapiens
tacctctacctttccagccaaggcatggaccctgacacctgccaacagcccctctgccctcacaacctcagcctggccttcatgacttctctacccaagtcacaacctgtcaggctgcaccacctcatcctggcccgccgaaccttgacctcacccctgcccctacccgaaggccctctgtccacacaacatgaacctaggctgtgaccttttgccttcacaacctctgtccagtccttaatcctgtgttgcaattctctgtccagacaatctcaactctgaggttgcttgtttcgtccctgactccttaacccctgatgacaactcttatgccagcacaactttgacctgatgacctcatcccagcccttgatcgccatcactaaaacaattttagaatcacacctggacaatctcgtgctacctacatactgccactccatttcattaagctattgactagcacatccatctcggcctatagttggctttgtcctcactctctcactttgggccactgtcccctccctgatccagggttccaccaccaggagggcagacccagccacataccacaaccacccccaagcctcacactcccttgtctttttccagactgttaagccaagacctgccaggagtgtctctaagagatccaggagggagccacccccaaggaccctgccagccacagacctccaataaagacagcatgg

SEQ ID NO: 8644 - DNA, 74 bp, Homo sapiens
gagaaattcactgggaacaactaaattggattaccgaaggctattgttaaaaattacgttccgtggtgactcat

SEQ ID NO: 8645 - DNA, 747 bp, Homo sapiens
gttctgcagagacccactctgaccccactaaaatgacccctgattcatcaaaagtgaagcctagaattaccctaagaccctgttccacagtcctgtattccatcctagatatctactcaaaataattgagacaagtgttcaaacagaaagacgcttgtgcgtgaatgttcatggcggccctattcacagtagccaaacgatgaaaacaaccccaagctatatattaccagatgaaaggataaacaaaatgtggtccatccatacaatggagtattacacagccataaaaaggaatgaagcagtgatccctactacactgtggatgaaccttgaatgcatgatactgaatgaaagacgtcagatgcaaaaggtcacatagtgtactgtccttttatacgaaatttccagaacaggccaatctgaagagatgcatagcggattggtggctttcagcagctgtggggaggtgggactgaggagcgactgctaatcagtatggggtttcctcccgggatggtgaaaatgttccggacctagatactgacgaaggtagcacgacactgtgagtgcactaaatgctattgaattggacactttgaaatggtgaatttcgtggtatgtgaattctacctcaatcaaaaaaatttgctattttatctcacatacattttttttctgtccaggttgttcatataataatatgctgtgagcatctttccatgacattaaatcatcttaggaaacatt

SEQ ID NO: 8646 - DNA, 1360 bp, Homo sapiens
ctgtcctacccacccacccacctctgtagagtcccagaaacaaaactatgctgacacctctgcttgagcctcgttgacagccagcatggggctcctggggactggtgggatctaagaaagggaggtgagtgggtggaggcagggtgacgtctctgaacccaaaaccctgacggcctctctggctgagcacagggcatctaggcccttagtgggttctcccagagcccaagtaaaaactttatcctgtgggcagtagggagccctgggaggtgtttgagcaggagagggaacaggattaagaatgggtttaaggagcaagactgagactctgattcagcgagaaacaaccataggggcagatcccttcatctgtcctgggaatgtcctcccaagactggagtcctcagctcagaacaaagggaaaggggtgcagcttccaccctggcaggctctcagaaatttttagttcctttttccaccaacttcccacccctgtttctccccctcccagtgcgttctctctgtgactctcttcccttactttcagaggcataggatctggagccagactgcttgggctcaagtcctggctctgctgcgtgacttgagcaagttaattcctctctctgtgcctcggttccctcaaccatataatggagacaacagcattacctatatcagggttttcctgaggtctcaatataagggactcagagctgtgcctggcacacaatgaatgctaaatatatggagccattattatttcctgtctcagaaagtctggctgttaaagaatgttgtctttcaagatcgttatttctaccacgactttaaaggctgtgttttggaactcaaaggcaaaaattctaatatctgtgctccttgaacaacctcttctcctagagggctgtgcatataagatatgtatatatatatatatattatatatatatatatatacacacacacacacacacacacacacatatatacatatacacacacacacacacacacacacacacacacacacatatatatatatatatatttttttttttttcctgaggatggtgaaggtacctgactgtgtgaggtggtaggagaatgagagaaacctcagtcagtgtctcaaaataaaatcctgctacaaacattgatctcttttcatagcctaagggatgttgcatcgctaaaccctgttgacttctctaatctcttctgtagctgatctccttcccttgctacactcggttactctggccttgattctgatctccaaatacattatattttttatttgggaccatcgtattgcctttgcacctttatcaaatataagttgcctatatttatttgg

SEQ ID NO: 8647 - DNA, 96 bp, Homo sapiens
tggcaccacagaggagccgagctataggagggcggggtgacccctcacccgctgtggactctggtttctgagaataaacacaagtcactgagtcac

SEQ ID NO: 8648 - DNA, 173 bp, Homo sapiens
gtcctccgcctccgggccaccccactcccttccgcttgcagcttccctgggatttttgtctccttttaaaggcaaacctcccagcttctttagcctcttggtacctcacactctctgtccctcgcgttatttattctacactgccacttctgtaagaaaaacagtttctcaat

SEQ ID NO: 8649 - DNA, 54 bp, Homo sapiens
tgatccccattggatataaggatgactggtaaaatctcattgctactttaatct

SEQ ID NO: 8650 - DNA, 1270 bp, Homo sapiens
gcgcccatgccgggagccgcgccggtggccagcggtgccggctgtgggaccttcctggctgactggcagaggaagattgcagtgacagctcagttcttacaccgtctccacttgtggagagccacaggaagagaaggaagaccagcgcatgcccagtgggaacgccgtgctccatggcgtggagggcacgggtgccacccacaaaccacaccaggaggcgctgcagccaccagggccccaggctcgttttcctttatagcgaagcaaaaaacacaagaccctccgcccgagtaaattcttcagccacgaagggatggatgtgcatctgccctaagtcagattgaagcctcctcctaggctccaggaggagcatgtgcaggaagggttggcctgagccagagccggcaccccagctccttcctccagctccccgcacccaccggccctgacctggcttcccctcggctgtgtagggacaaagccgaagcccagtgccatgactgcccgcggattgaaaaacagaaacacaaaactttgacttgacttgcgaagtgaagcagggttttcatttttactctccttggtttaggtctagaaagaagaatactgacctgagaggaggcccagtgagattctgaaacctaattcttcgaaggcgtactggcccttagttcagttattttagttgtataagttgatattttttttctggaatgtagccatttgctgttatctgggaaacaagattctaacaggaaaccagcctaagacacttcaggttgagcgctgcctcggagtctgtgcccgtcgcgtcccctgcttgagttttgcacttggaagaaccctgcaccggctggcgtgtgcgacggcccagtcccatccagagcatggagcccgaccccagccagcgccttccactccatcatttcatttcacacccccgaagggaggggaggccaggaggggagctgctcctgccagaagctggtgggtgaccgttgggaatcggccacacctggtgtccatgggcagcctggtgcaattccattcatttgtacagaaacatttttgaaaaattcttttcaataagatgcaaaatcttccaacttttcaacccaacgtgatgaatatttgattttgttctagatttcctgtagctgtgaattgttaaaatgtatgattcaggataaaacgtaaacacgtgctgttagtaatttcttgtggatttcattgttttgccttcaaataaagcctttttttaaagaccttt

SEQ ID NO: 8651 - DNA, 1906 bp, Homo sapiens
agtccaaaggacaggaccagactgttggtgactccttccccggcccccacagcagtatcagaaacttctgacaatcagtgaatgtacaacccagccgaggggacggtgcataactctccatcagaagccctggggttcctggccccccgtgagccgcaggaggatgcgttgcctgcagtgcagacggccgtgagctctgggcaaacctaaacagagaccagtgtctcatgctctttcttcctggagtctgtcatctgagggccgtgtccctgcggagatcttggccacgttgtacctttccatgtggaattattccccaagcagtgtagctcagagcacttgtgtctgcattccagataacattcaggacctgtgtgaaaagctggggtcactgtggctgtagaccatgaactggcagtgggggtgtccagggcggtgcttgagaacgtcagactggctagtttaattccctggcgcagatacgcataggaccaacagggtcaccaagcagacagggagcccgcgagaatcattcaaaacatccccagccacagagatggatccagtttcctggtcatccccttagcagttcacaagttcctggcaaatgttccaaagcaaaaagcgattgcaattagcatccagttcctgcagcctggtgctctgccctgcacgtcagggttggcatccacccagatccagatggaagggaaacttctctcttctcctttgcctcctcttccctcaccagagcagggcgcttctcttggggtggtgagaaggatcttcgagaaatcgtgttcagtatttcaagctctatttctgtggcacatgtcttttgagaggcatcttcacctcttctgtgatgacttggtatgttgtttggtagagagatcttgattttcggaggatcttgcatttttctagggaatattttgtagttgtgtgtgtgtgtttttgccttggtccccattatgggatgcattaggactggcctatgcatcgaaaatctttttgtttgtaaacgtttaaaaacaaagttccccggccaggcacagtggctcacacctgtaatcccagcactttgggaggccaagatgggcggatcacgaggtcaggagttcgagaccagcctggccaacatagtgaaaccccatctctactaaaaatacagaaattagccgggcatggtgtcgcgtgcctgtagtcccagctcctcaggctgctgaggcaggcgaattgcttgaacctgggaggcagaagttgtggtgagccgagattgtgcactccagcctgggtaacagagcgagactccatctcaaaaaaaaaaacaaaacaaaaccaagttcccactggtgatgcctgtctgacacgttttggtatttagtaggaaatgaagtgtttcgaagcttcgagagaagcttcaaaattgtcacaattgctgaaaacagaatgaatcgtgaacattatctcaatattttgtataatagacaagaccacagtgttttggttccctgacctgtttttgtgtttatgttaggatctgaatcatgttctgggtaaggggacgaggagcgaacactgcactaagatttggtttgccaaatcagattctttggtcaagagtcagtttggggccaggcgtggtggctcatgcctgtaatctcagcactttgggaggctgaggtgggtggatcactggagtttgagaccaccctggccaacatggtgaaaccccatctctactaaaacaaaaattagccaggcatggtggcacctgcctgtaatcccagctacttgggaggctgaggcaggagaatcacttgagcccaggaggtggaggtttcagcgagctgagatcacaccactgcactccagccttggtgacagagtgagactctgtctc

SEQ ID NO: 8652 - DNA, 1120 bp, Homo sapiens
ccggcctgtcagccacaaagtgcattcccatcttgcagaagccgggtgggcgggcaggcaggtgggcaggtggccggggcccagctgcctcctgcgctgggaactcggggagtccggcccaggcgggagggagggggcgggagtcacgcggtctctctgcgctcttccctcaaaactctttttgtgaaatgctgctaccagtttactaacaaaattgcgaagaaggaccgcgtggaaggaaggacggcaaagtgagttcagaactctatagcaaaccagctataaaaagcgttagtccctcacccccaaagaggtgcggacactttccagcacctgaaagctggggcctcagttgcaggcaggcacagaaaacctgtgggagaggtcacctttaacacagcaacagaagcacgcatctcatctctcttgcattttctgttctttaatttggccctgagtgtcttgagacagtgggccatgccactgcctctgtttgctccctacccagccactgtcaggccagtgttgtctgtcatgtgccagaagcttctcagctgtggtgagccactggcattgggcaggcgggccagctggccagccagtgtgacccacactccatgggcagccacctgtttatatctggtttcagttataacccagtttttaaagaaatgctgcaaaaatttaagttttctcatgtttattttaaacaattcctcttccatcagaccaccagacaaaaaaacctttcctttcttcctcccttttcttttttcccttcctgtacacatctagaaaacttcacctttctagagtccccccaaaacaacacaaaagttattgtgggtgctactggttttatgctgtactgtggggcgagggggaagacctgtctgtacgctggaaacactcataaccattcctttagattcgtttgccttatggttatttgtcataaacgcgatttgcaaaaacaaggagccttagtgaatgtacagtacctagacttctgtgttctcaggacgcagaagggagcaactttgctatttggtccagtaagtggacaccttgtgatataaatgtggaaataaaaaaaaaaaaaaaaccatttgcacaaacc

SEQ ID NO: 8653 - DNA, 1092 bp, Homo sapiens
atcccagcgatgaaaccaggaactcactttcccgggatgccgagtctccattcctccattcctgatgacttcaagaatgtttttgaccagaaaaccgacaaccttcccagaaagtccaagctcgtggtgggtggaaaagtgttcgccgaggtgtgcatggtttcccagccacgtccctgttttcaaagatagtttcactttggtctctgaattgaaatgctgtctactgaaagggtttcaggagcgtttatgtaaggggctgtgatgaaattgcattccccatagataaaagaaaaatcatttctatccagagatctgagcagaaggattggcttgttagtttaacacagccgtatttttggacattcagtgttacttgctgagtctgacagcctctgggcccggccaggggccctgttaacaaactgctttcacatcccaacagggtctgcttggccactcagtgcagctgcgattaaccctaaaggctttaaggaacgggccacctgtaacagagacaccagccttcctgtatagacactaaattgttagcaagagtgttgagctagttcctggtgaagtgtttccacagaagacatgtggagcagttgtggggatattaagggaaactttcctctgccttgacccctttgttaaataaaatgactttgggagccattcattgtacagttgcaggaatgagagtgattttatgatgtggtacattgggaccatgttctaaaaccttgggtttctgagtctgctttttgagtaggtgattttgaggttgaaaaaccaggggccttcatctaggaaatacagcattttccagaagcttctttgaaagggaatcctggttttgttgccaaaatgaaacgcccggggttggcgctgaatcccacaactgtgtgatttgcttgttgagttttttgttgtctggtttttttgtttgtttgtttataccaataagaatgagcctgaatgttggtggtttttgaaatcctgacttggaggtaaacctggaggaaggaaaaaaagtaaatatgcaggcttttaggactgagtagccttgaaaataaacctcatttctaa

SEQ ID NO: 8654 - DNA, 156 bp, Homo sapiens
tcctacaaccacatgcagttgtgggaccgcagtttggtcctggggaccattcatacccacacacccagcttgtgcctgtggttaacatctcagaaaactctggtaaatgatcactccaggatattgacaagaatacacgttactgatcttactcac

SEQ ID NO: 8655 - DNA, 110 bp, Homo sapiens
ctcatggttacattcaggatacttgagcactttatatactaccgtagcactgtagctattttttatgtgataatcttgtttgataaaaaagtaaacctgttttgcaattg

SEQ ID NO: 8656 - DNA, 466 bp, Homo sapiens
ccatgacggggccacgtgtgctgtggccaggcctgcagacagacctcaagggacagggaatgctgaggcctcgaggggcctcccggggcccaggactctggcttctctcctcagacttctattttttaaagactgtgaaatgtttgtcttttctgttttttaaatgatcatgaaaccaaaaagagactgatcatccaggcctcagcctcatcctccccaggacccctgtccaggatggagggtccaatcctaggacagccttgttcctcagcacccctagcatgaacttgtgggatggtggggttggcttccctggcatgatggacaaaggcctggcgtcggccagaggggctgctccagtgggcaggggtagctagcgtgtgccaggcagatcctctggacacgtaacctatgtcagacactacatgatgactcaaggccaataataaagacatttcctacctgc

SEQ ID NO: 8657 - DNA, 185 bp, Homo sapiens
gccccttacccagccatgtctggacatgccagacagctgtggcatgtcataaactgtcctggagtgacatcatgtcatgttgcatgatttggcatgttggggcacatttggcgtgagggaagctggtgcacatgggtgtccagggcctgatggggtgtggccaggcaatgaagaaagactcaggt

SEQ ID NO: 8658 - DNA, 530 bp, Homo sapiens
ccgctgggccggcggggcatcgcttggtgagcacagccgcagcaggaggaggcccgagcctgcgccaggtctgcagcgcagaccacctgggcgggccgttcgctccggtgggcggggccaggtcagggagacgcccccaggctgcctgggcggggcgtggcatccgagggagcccagcggacattccgctctccgcttccgtcccgcggggcccatcggcgttttggggccgcagccgggaccctcacggaagatgaccttgtacagaagctctccctcaccttccccccaacgccacggccaaggcaggccccccaccccgctgtcttccgtgtcagccgtgcttgatcctgggacccacgagccccacagggaccctcgaggccccatcccgttatccgagacccttcctaccccccattcctcggcgctgggagctatttttgcccaagggggggggatgggggggctggcgccaccgaacctgcacatctcaacttgtaactcaataaacagaagtgacaatcgga

SEQ ID NO: 8659 - DNA, 292 bp, Homo sapiens
ctctacccgccctgccttctcttctcatatgcaatatcagtcattcacaggggcggccggtctccaaaatgcaaaatgcgcttcagcccccgagggcccccagtattggtcggtgccccccatctgccgttttcctttccaaacgaaaggaaacccacaaatccaacagaaaacacacacacacacacacacacacacacacacagaacaggcgattatttatttgtttttaatttattttgtcatatttttgtaaaacggcagaaatgcaataaaaactatatttcaacag

SEQ ID NO: 8660 - DNA, 907 bp, Homo sapiens
ggaggctccaggcctgaggaccaagggatggcccgactcggcggtttgcggaggatgcagggatatgctcacagcgcccgacacaaccccctcccgccgcccccaaccacccagggccaccatcagacaactccctgcatgcaaacccctagtaccctctcacacccgcacccgcgcctcacgatccctcacccagagcacacggccgcggagatgacgtcacgcaagcaacggcgctgacgtcacatatcaccgtggtgatggcgtcacgtggccatgtagacgtcacgaagagatatagcgatggcgtcgtgcagatgcagcacgtcgcacacagacatggggaacttggcatgacgtcacaccgagatgcagcaacgacgtcacgggccatgtcgacgtcacacatattaatgtcacacagacgcggcgatggcatcacacagacggtgatgatgtcacacacagacacagtgacaacacacaccatgacaacgacacctatagatatggcaccaacatcacatgcacgcatgccctttcacacacactttctacccaattctcacctagtgtcacgttcccccgaccctggcacacgggccaaggtacccacaggatcccatcccctcccgcacagccctgggccccagcacctcccctcctccagcctcctggcctcccagccacttcctcacccccagtgcctggacccggaggtgagaacaggaagccattcacctccgctccttgagcgtgagtgtttccaggaccccctcggggccctgagccgggggtgagggtcacctgttgtcgggaggggagccactccttctcccccaactcccagccctgcctgtggcccgttgaaatgttggtggcacttaataaatattagtaaatcctt

SEQ ID NO: 8661 - DNA, 380 bp, Homo sapiens
gcacatcttggaaggtccgtcctgctcggcttttcgcttgaacattcccttgatctcatcagttctgagcgggtcatggggcaacacggttagcggggagagcacggggtagccggagaagggcctctggagcaggtctggaggggccatggggaagtcctgggtgtggggacacagtcgggttgacccagggctgtctccctccagagcctccctccggacaatgagtcccccctcttgtctcccaccctgagattgggcatggggtgcggtgtggggggcatgtgctgcctgttgttatgggttttttttgcggggggggttgcttttttctggggtctttgagctccaaaaaataaacacttcctttgagggagagc

SEQ ID NO: 8662 - DNA, 221 bp, Homo sapiens
cccgctagggtggaggagaggagtggggtttgttgatgaacctccacccccaccccacccccgcacgcctgtaatcccagcacttggggaggccaaggcgggaggatcgcttgagcccagaggttcgagatcaacctgggcaagagagtgagaccctgactctacgaaaattaaaagttagcccggtgtggtggcgcgcacctgtggcttagctaccctga

SEQ ID NO: 8663 - DNA, 341 bp, Homo sapiens
ttcctccttgggtgcagcctcagagtggcctgaggcccagagggtctggtctggtgagctcctgaggccacacagcaccataaagtctcgcatctacaggcctttgattacctcctgggatgggtgctcactatctaccccagaccaatgccacctgcagcctgtggagtcaactgcagaataaatcacaccctagccctggcttggaggatccccgctttcacagatgctggacactgacagccaaatgtcctcactccaggggagccccagacgctccgctccctgcatgtgtaacaccccttcttgctgtctcttagtaaataaacgacccaaagcag

SEQ ID NO: 8664 - DNA, 591 bp, Homo sapiens
ctcctgcccgcagacctctggattaggtctctgttgactggctgtgtgaccttaggcccggagctgcccctctctgggcctcagaggccttatgagggtcctctacttcaggaacacccccatgacattgcatttgggggggctcccgtggcctgtagaatagcctgtggcctttgcaatttgttaaggttcaagacagatgggcatatgtgtcagtggggctctctgagtcctggcccaaagaagcaaggaaccaaatttaagactctcgcatcttcccaaccccttaagccctggccccctgagtttccttttctgtctctctctttttattttttttatttttatttttatttttgagacagagcctcgctctgttacccagggtggagtgcagtggtgcgatctcggctcagtgcaacctctgcttcccaggttcaagcgattctcctgcctcagcctcccgagtagctgggattacaggtgtgcaccaccacacccggctaattttttttatttttaatagagatgaggtttcaccatgatggccaggctgatctcgaactcctaacctcaagtgatcctcccacc

SEQ ID NO: 8665 - DNA, 646 bp, Homo sapiens
tagagacggggtttcaccacgttggccaggctggtctcgaactcctgacctcaagtgatccacctgccttggcctcccaaagtgttgggattataggcgtgagccaccatgcccagcctaatttttgtatttttagtagagatggagtttcaccatgttgcccaggctggtctcaaactcctgccctcaggtgatccacccacctcagcctctcaaagtgctgggattacaggtgtgagccactgtggccgacctactatttttattatttttgagctaggttctcagtctgttggcagactggagtgcaatcatggctcactgcagccttgaactcccagactcaagtgatccttccacctcagcctctggagtagctgggactacagacatgcaccaccacacctggttaattttttatttttattttttgtagagacaggtgtctctctacgttgcccaggctggtctcgaactcctgggctcaagtgatccacccatctccacctcccaaagtgctaggattacaggcgtgagccaccgtacccagcctggtcccatatcatagtgaaatggtgcctgtaaagctctcagcattggcttggcacatgcagttggtactcaataaacggctgttgctatcccc

SEQ ID NO: 8666 - DNA, 47 bp, Homo sapiens
tcgttgaggctcagagagggtgagtgactcgcccgaggctacgtagc

SEQ ID NO: 8667 - DNA, 669 bp, Homo sapiens
gagccatcccactccctttcccctcttccctgtcttccccaccttcccccaactacccgggcctgacccggcccctaccagccacgggcacaagacccctgctcctgacttagcccgtcacccttatttattattgtagctatttatttatttattgaagatgtcccccaggggcccaggctcccctgcccgccccaagccctgcccctcctgtacatatagccctttccccactcagctgtggtgtctcgtggccccgtgaactcaccgctcaccctcctgaaccccccccccccgcctttttttaaaattcacccccatccacagttgtcagttgtgaagaggggccagatgacaccctaaagcaggctgatcgggcaatgggaggtggccaggcctgccagcccctcggctctgccgcggtgggccgaggccgctgttgggggtttccctgtgtggaccatggggatcagagtctggcctgccaggctcctctccccgttttctcttttggtgggggggtgtgctgtgggtattcaccaccctgggaccccccccccccccgcccaccagacctgttctgacctcatgagtgtcaaacgtgccccccagttccttaggagatgtcatgacaacactacacgcacccaataaagcgaatggaccatc

SEQ ID NO: 8668 - DNA, 2968 bp, Homo sapiens
ggccagccctgcgtgaactgcaggggcaatggatggtaaagccctttggctcttggcaggcagactttccaggaagaggctccatgtggctcctgcttcactttcccacccatttagggagacaatcaagctcttagttataggtggctcccagggtctaattggaggcacctggctggggtccactctgaccctagacttgcctaaaagagctctctaaggggcagcctcttacgatgccctggtgtctttctcctgggcttctatccctgtgaggagaggtgctgtctgctggagcctctagtccaccctctccagtggtcactcttgagtcacatctgtcacttaattatttccttctttatcaaatatttattgctcatctacttcgtgccagctttctgcctctgtagtagccctgcacaaagggtggggagtcaggagaccatcccaaaggcatctccctgtcttcctctaccaagcggctctctgcaagagcatggaaatgtgagtggggaaaattttcagcaccaaagcttcactcatacccagttttgtttctgaaactacggtagggggcaggaagaggagcagaaaagaagggctgggcaaggcatagtggcttatgcctgtaatcccggtactttgggaggctgaggtgggaggactgcttaagctcaggagtttgagaccagcctgggcaacatagcaagacccccaccatctctgaaaaaaaaaattagccaggcatggtggtgtgcacctgagaatcccagctactcagaaggttgagacaaaggggatcgcttgagcccaggagttggaggctgaagagagctatgactgcatcactgcactccagcctgggcaacacagcaagatcctgtctaaaaataaaaagaaaagagaaggaaaggaaagagacggggctctgaggccgagcacagtggcccatgcctataatcccagcactttgggaggctgaggcaggtggatcacctgaggttaggagttcgagaccagcctggccaacatggtgaaaccccatctctactaaaaatacaaaaattggctgggcatggtggcgggtgcctgtaatcccagctactggggaggctgaggcaggagaatcacttgaattcaggaggtggaggttgcagtgagccgacatcatgccactgcactccagcctgggcgacagagcaagacactgtctcaaaaaagaaaagaaaaaaaaaaaagccgggccaggtggctcacgcctgtaatcctagcactttgggaggctgagtgggggtggatcgcctgagatcaggagttcaaaatcagcctggccaacatagtgaaaccctgtctctactaaaaatacaaaaaattagaggctgggtgcggcggctcacacctgtaatcccagaactttgggaggccgaggcgggtggatcacgaggtcaggagttcaagaccagcctggccaacacggtgaaaccccatctctactaaaaatacacaaattagctgggcatggtgttgggtgcctgaatcccagctactcgggaggctgaggcaggagaatcgcttgaatccgggaggcggggcttgcagtgagccgagatcgtgccattgcactccagcctgggtgacagagcaagactccgtctcaaaaagaaaaaaaaaaaattagccaggcatggtggcaggtgcctgtaatcccagctacttgagaggctgaggcaggagaatcgcttgaacccgggaggtggaggttgtggtgagccgaggtcgcgccactgcactccagcctgggcaacgacaacaacaataaaaagagggggctctgtgcccggcatgtctctgaagactgattgaacctatgcaccagttgttgctttaagtcgctttattttctgtctttggtgtctctggatgtaggagccccctgctttctctgtccgcagaactccatactgggtcccctacgtgttcctccttccctaggacagcaacaaaaacacacaattttccctctctagcaggtctctaagtctcctgattcctgaaactgcctcagactccccctagagggagggaggcccctgaggctttcttgccatcatagcctcttctgggcctcagtttcccctctgtaacctgatcctagtacttggataaactccgacgaggtgtggggggttgttgtctgtgacctccctgaaatatcttagacatttggggtactgagcatttatctggggttaaataaaatctttacatcttaagacattcgattgaccaaattgagtgtcctggccatttcactgatgaggaaactgaggcgcagagaggtcctcttgccagctcaaagtcaagcatctgggcgcccaatgttagccagcggcaccccctggtggcgggcgtgggagacacggcggggcgcgcttgtcgggggttggggggtgggtcggaggggtggcatcctccagccctgatggtcccacttaccgcacctcgccgggaagagctcgtcctgctggtcgggcctccgagcggactgggcagcaccatgctcaagcctagggttcgatccccgcctccggaagcctcagtatccatccctcccctctgcctccctcttcgcgtgcctgaatatttatacaagatacaggcgtcatcacagccgccctcggcttccagagcagctggcttcgttcataaatattataaccactcagaattcatcatcatcacagttaatgataaaattccacagtgccagaactaaaagtcatccgggttcacgaacttggtgcatttccttccagacttttaaaaagaagatatttagggaatttttttttcaagatttttccccccagtccgcttacaaagtaataccatgttcgctgtaaaaaatttggaaataatggaaatgtataaagaaggaaataaaattctgctgtatctccaccca

SEQ ID NO: 8669 - DNA, 82 bp, Homo sapiens
gaccctggctccctgcagtggggacttcgtgggaggcactcatggctctctgggtctaatgaataaagtcctccacagccta

SEQ ID NO: 8670 - DNA, 680 bp, Homo sapiens
gtccgcgcgcggggcgcatgcgcggccaccctccccaaggggcgggctcgcgggggggtgtcgtgggcgccccggacttggagagggtgcggccctggggaccccccctccccgagtgtgcccaggaactcagagagggcgcggcccccggggattccccccccccgagggtgcccaggactcgacaagctggaccccctgctcccgggggggcgagcgcatgacccccccgccctcgcgctgcctctttcccccgcgcggccgccccgtgttgcacaaacccgcgcgtctcggctgcccctttgtacaccgcgccgcggaagggggctccgagggggcgcagcctcaaaccctgcctttcctttacttttacttttttttttttttctttggaagagagaagaacagagtgttcgattctgccctatttatgtttctactcgggaacaaacgttggttgtgtgtgtgtgtgttttcttgtgttggttttttaaagaaatgggaagaagaaaaaaaaattctccgcccctttcctcgatctcgctccccccttcggttctttcgaccggtcccccctcccttttttgttctgttttgttttgttttgctacgagtccacattcctgtttgtaatccttggttcgcccggttttctgttttcagtaaagtctcgttacgcc

SEQ ID NO: 8671 - DNA, 556 bp, Homo sapiens
gcgcccacccagaccggctgctgcgccccctcctgccagggtggcgattccgctccacagtctcggacggatctgctcagaaaggaagaggcaggcgccagggggaacccccttcgtgttttgtgaccctcccttttaggtgaagcccctttttcttgctaaaaccggcaattctccggttagaaatgttacttggtgttttttggttttgtgaaacggccgtcccaaaactggctggattcctagaagagtctgtgttgaaggcatctttcaagccctcgctctggttctcagggcagcattttccaggcgggtttgttttgcatttcttggagcctctccgagcagcaaccagacgggagatttttattttaagctgttcatgctgggactgacagcctgcagggtttccttgggcgcggccccaaaattgccttcaaaacaaacccgggacggttgaaagccttcgaaccgtgcaggggatgcctcgggccctggcccttcgcttcctctcttgtgttatggaaataaaaacaaataaaactacacactgcac

SEQ ID NO: 8672 - DNA, 842 bp, Homo sapiens
gcctaagatgtcctaacctccacccagaaccccttcagtccctgctgggtgactcagggcgtcctaacgcctccatggcctcagtttccccatctgaagaatgggtacaggaaaggattgtccttgaggccccaggaagctctgccgccccctccctgtccctcatgccgctcctcagctccctcagctcctagagggggaagaggagagacccccaacaaggggacaggacggtcactgtgccaatcctgtcatcaccctcctgtggatgtacaggcagtgctcaataaatgcttcgaggctgatgaggctgctggctcagggtgcgtgggttcctcaaggtggggatttctgagttctaagaccaagtctccatctgagactcccaaattgctccccacctcccatccctgtttttttttgttgttgttgtttgtttgtttgtttttgaaactgagtgtcactctgtcacccaggctggagtgcaatgctgcggtctcagctcactgcaacctccgcctcctgggttcaagtgattctcctgcctcagcctcctgagtagctgggattacagcacccgccaccatgccgagctaatttttgtatttataatagagatggggtttcgccatgttggccaggctggtctcgaactcctgacctcaagcgatctgcccgcctcggcctcctgaagtgctgggattacaggcgtggccactgcgcccaggcacattcctcccttctgcccctctcagggccccttcccaggtccctgatctccaggcttggcctccagagcagcccacaccaaccccaaaataaaaaaatgtatatattccttt

SEQ ID NO: 8673 - DNA, 98 bp, Homo sapiens
ggccccggtcacacagtttctcggctcttcctccccgctgccccccacgaccctaccttgaaggcccccacaaataaaggcgctgccactcagccctc

SEQ ID NO: 8674 - DNA, 2088 bp, Homo sapiens
ccgccctccccgatggcggggatctgggagggtcgggggagcaaaaggcggtgagagaggatttatttaaaaaaataaacccgaggaagatgctcatctgagccagcaccgccggctttcagggcagcccctgcagacgtctggccctggcgggtggctgcaagcccacctcggccctccctgcgcttcctgagcagtccctgcttatgatgggctccccaggaagcccactgcctcctccctggctgcagcctccggggttcagcctcctgtctcgccagaagactcctaggcccttggggtggcgcgcctgccttttctagttttatacaaagacagccacttttagctactgctaatgagacttgagtctatttttgtacaaaagagaagcaaaatcttttttctaaacctgtgcctccctctcctcggacacccagggtctagccgctgccctgggtcctgcctgcagtattacagaggtcgtcgaaaggtgcagctgcgttctgagggcgtggggaatgggcaggtggcctctgctggtctctggctctacgtttaggcacccctttccccagcctctcctccttgggcagggtctctgctccagcaagcaaacagggtggcccaggtggctattttgagaactccagctggtgcccccagacagctgctcagagccaagggggcagagggctttcagcgcccccaggcctgccctgctatttcaggccctcagctgtcgggggccactgtgtttctgtgctccaagttgagactcggccgcagcggcgtcagacttttctttgcgatgtcctcggtttcccatttgttgctgctgctgctcattccacactgttgagaccttgtggtctcgatgctgctggcctccctccgtccctctgtccacttgtgggtcctggggtcgtcttagcagagccaccgccaaggtttgcactcagggaggggctgatggagggctgggcgccatggggtcagggaggccccagggacccatgggcagagctggggagccaggaggatgggtctgcctgctctgggggtgcaggctctgcagacaccccaattgctgctctgttgctgtgcctagtctagtgtcccccaaagcatcggggggccacgcaagtgtgggtgtgtgagtgtgcgtatgtggggaccccccagggcatggtggggtctgaggcgtgtgttcccatttagggctgaatgaagccatgacttggaaaggtggtggggggtggatggcggctgtgactcagggcccagggatcacatgggggtcactgctgccatcagcagtcaggcagggagaacagaaatgcaaaaatacagatgtctatttttctaaactggggggtggaggggtgcctcctgacagcttccaaagagctgactgtggagggcccacagtgtatcccacccctgcccgagagtctctctcctttgggacccccgggttcccagagctccgaggaaactgatccttcatgtttcaatagctgttgttgtttttctctttgggccgggccgggccggggaagggccgagcaggctccaggaggcctccagagtcagctggaccttgctgtgtcgcccgcaggcagccctgcagacaccggtgaggtgggatgatttcaggaggtcccagcccgggactgcccgcccctctgccctgggaaccagtccaaggggctgtcagttgaatttgcctttttgttgttgttgttgtttttgttgtttatttgttctccttttaaggaattatgaagctaagaaaagttttgtgttttgggggttggtggacaaagttctagctgattaaatatggtctaacttattgatactatttttttttcttttaatgttgtactgtggagaaaaactattttgagccatggggttggtgtttacaagaactttccacttttgccaaaatgttacaattgaaaggcatctatctgcgtcttcagtttcctgatattttcttaaaagatctagtgtcctttttgtacactaaacaggtgaatgctgacttttttcattctccaataaatttcactgaactga

SEQ ID NO: 8675 - DNA, 411 bp, Homo sapiens
ccacctaggtggctgccaccccctctgcacaccatggaccctgccctgcgctccccaactcccccaggctccctgtccactgccctccctggtctggccccctcctccgggttaggggagcaaggattgggggtcgtgcagcccagccagcaggagggactgaggccctctaggaggaaagcccagagggagggggccctcattccttcagacccagttttcccccaccctccttaccccgctgggctaggtctccgccagggctggcctcagtttctcctcaacaggcctgggggcagcccttcccctgcctagtccccgcctgagtgccagccccccaccccgcctgccgccccctgtccaggttccctccccgccacagtgaaataaagcatcccaccctgcagtttc

SEQ ID NO: 8676 - DNA, 329 bp, Homo sapiens
gctgtaggggctcaggccaccctccctgccacgtggagacgcagaggccgaacccaaactggggccacctctgtaccctcacttcagggcacctgagccaccctcagcaggagctggggtggcccctgagctccaacggccataacagctctgactcccacgtgaggccacctttgggtgcaccccagtgggtgtgtgtgtgtgtgtgagggttggttgagttgcctagaacccctgccagggctgggggtgagaaggggagtcattactccccattacctagggcccctccaaaagagtccttttaaataaatgagctatttaggtgc

SEQ ID NO: 8677 - DNA, 142 bp, Homo sapiens
ggaccagggtgaggacccgccggatgacagccaccctcaccgcggctggatgggggctctgcacccagccccaaggggtggccgtcctgagggggaagtgagaagggctcagagaggacaaaataaagtgtgtgtgcaggga

SEQ ID NO: 8678 - DNA, 1016 bp, Homo sapiens
gtgtggaggggcccgcaccccgcgttccctcctttagtgtcacccgtccaagcgtgttcgtgggcaggcccccaagacccagcagcagatgaggccgacgcggatgctgccccccaagcctactccaaaacagagactgcaataaaggcgtggacgatgtggccagtaccctgaaggacaggacagtgaggaaggggagggagaggctggggaggggcaggcagggcgacaggcagggtctcagcggtagggacactgagggccaggcctagtggctggtgtggcgggagtggcgagccagggccctgtgggtggtgaggagtagttgctggccagcctggatgacgacctctgacccatgtcgccactggagctggtggcagtggggctggggaggaaggaacgccaagggccacagagagaacccaggctccatctgggccgagacatcctggcctctgagtttgacaggggagcccactgcccggccaaacaggagctggggctgggagctcagactcagtccagcccaggtgggagtcctggggaaggagatagcccacgagcctcaccagccctgggtgacagccagatggtgtccgaagccccaggcctggggcaggcagggggtgtctgggccagggatgaacggaggccaaactgggtaacaagcagagtcgggtgtgcagtgtctcataggcaacgtgaggagtgtttgagcaggagccggggcaggaggttgtggaaggccctggaaggtgccgaccagccaggccctctgatttggccggtgggggccatcggtgacgtgggaacgatggtttcagggaagcagtggctcagagctccgtgacgttttttggaacgggaggtgcgagatgcagacatttaacacatccggggctgtagccaggcagaggagcgtcagaccccccaccctgtttggaagggagaacccatcagattcgccttgggtgtagatgaaacagaaataaaagaatcaaagacgactcaag

SEQ ID NO: 8679 - DNA, 839 bp, Homo sapiens
gtgcgcccacccgggcctcggagcctgcctcggccgcggggcattgccctgagtggacagtcgtcttcgacctgtcggctgtggaacccgctgagcgcccgagccgggcccgcctggagctgcgtttcgcggcggcggcggcggcagccccggagggcggctgggagctgagcgtggcgcaagcgggccagggcgcgggcgcggaccccgggccggtgctgctccgccagttggtgcccgccctggggccgccagtgcgcgcggagctgctgggcgccgcttgggctcgcaacgcctcatggccgcgcagcctccgcctggcgctggcgctacgcccccgggcccctgccgcctgcgcgcgcctggccgaggcctcgctgctgctggtgaccctcgacccgcgcctgtgccaccccctggcccggccgcggcgcgacgccgaacccgtgttgggcggcggccccgggggcgcttgtcgcgcgcggcggctgtacgtgagcttccgcgaggtgggctggcaccgctgggtcatcgcgccgcgcggcttcctggccaactactgccagggtcagtgcgcgctgcccgtcgcgctgtcggggtccggggggccgccggcgctcaaccacgctgtgctgcgcgcgctcatgcacgcggccgccccgggagccgccgacctgccctgctgcgtgcccgcgcgcctgtcgcccatctccgtgctcttctttgacaacagcgacaacgtggtgctgcggcagtatgaggacatggtggtggacgagtgcggctgccgctaacccggggcgggcagggacgcgggcccaacaataaatgccgcgtgg

SEQ ID NO: 8680 - DNA, 164 bp, Homo sapiens
ggctggcccagagctgtcaggaccatgaagccaggacagaggccaggagccagccctgcagccctccccacccggcatccacctgcatcccctctgggggcaggagcccacccccagcacccccatctgttaataaatatctcaactccagggtgttccacctg

SEQ ID NO: 8681 - DNA, 240 bp, Homo sapiens
gccggggctggttttctatgaacgattccggcctgggatgcgggccaggctgcaggcggcatagttgggcccattcgtcctggaaagggactggggggtcccaacttagccctgggtgggccgggccgggctgggctggggtgggccccagtcggctctggttgttggcagctttggggctgtttttgagcttctcattgtgtagaatttctagatcccccgattacatttctaagcgtg

SEQ ID NO: 8682 - DNA, 1373 bp, Homo sapiens
atcaaaaccactgatgtgaaagataagccttgaagcagcaattgcccttaaaacatcatccctgccctggatcggcctggagccagtgcccaagtacggtttggtgtgtacatgaaaacaaacgtctctgcagtctctggggcggaggtttcgctggcttttctttctctcaaagaaaaaaacatgcaccattttcaatgtgcttttgcctctcctctctgttcacatgcttttagcagcaagtcccctccaaatctgtcttggttccccttcagaaggtggcgctgcccccgaaaggcacctcagcctgtgagtgctgaggaaccagctcctctggctgattttccagttggactggccattgctctccagaagtgctctgttagcaaacgtgatgtggaaacgatcacagatggtgttttctcgttgttcgccagaatttatacgggggagacaaattcccggtaattaccaagtctgcactcgggtaccaaagctctgaagctctctgaacagttgccatacttgagttgatgaatgtgttattcatggtgtctcatctcatcaatgcatcttgagagacttaatgaaattttagcaacagtatagaatagctctatcgggtggggagtaatcattaaacagatgaaatcggccccagatttacatgtctctttagaatccacagtgtaagcaaactacagttacaaagggatgggggttgtaaaccctctgagactctgcacttttcgcacgtatggcatcgtcaagtgctgtcttattacagcctttgtaaggagaggcaggctcctcctggggtgggctctgcagctgctctatttccaggcatgtgatcgcccccgctctccagattccccagcactctgctgcgtgtaactccactcaattctccactcatccttccttgtgaagcaggatcgttgaagttttaagtatgggcaaaaatctggaaaacttaggatccctctgacaccccaggattaggggacacagcagtggctagggcatcagccacagaactgagcgggaaatgccacttgtattggctgtaaagaaatcctggctttgggccaggcacagtggctcaagcctgtaatcccagcactttaggaggttgaggcggatggatcacctgaggtcaggagtttgagaccagcctggccaacatggtgtaaccccgtctctactaaaaatacaaaaaaattagccaggcgtggtagcgggcacctgtaatcccagctactcaggaggctgaggcaggagaatcacttgaaccggggaggcagaggttgcagtgagctgagatcatgccactccactccagcctgggcgacagagcaagactccatctc

SEQ ID NO: 8683 - DNA, 257 bp, Homo sapiens
ttccagggtcacccccgagaggacaacaggcatctggaagtgctctctcgccactctgggtgctttactgtctctggcttgtttccatcactggaaatcacttagagaattgtagtgtttttggtccttgataaagcctagaagacatttgtgatgttacaaaatggaagttttcttttgtttctgttttttaagatctaagaagttgtgaatgttgttaatcatttagccgttgcaataaatgtagaggaaatgca

SEQ ID NO: 8684 - DNA, 308 bp, Homo sapiens
ctgcctgcagaccctcctggggccctgaggtctgttcctggggcagcgggacactagcctgccccctctgtttgcgcccccgtgtccccagctgcaaggtggggccggactccccggcgttcccttcaccacagtgcctgacccgcggccccccttggacgccgagtttctgcctcagaactgtctctcctgggcccagcagcatgagggtcccgaggccattgtctccgaagcgtatgtgccaggtttgagtggcaagggtgatgctggctgctcttctgaacaaataaaggagcatgccgattttt

SEQ ID NO: 8685 - DNA, 124 bp, Homo sapiens
cgcccccctccgcggtgggggcttggaggtgggcggctggactcaatccaccctggggggctcctttccttcttcctatttgtgtgtatatccacaaataaaacgcgcgtggcgtccgtggacc

SEQ ID NO: 8686 - DNA, 508 bp, Homo sapiens
gacctctaggggctgtctcctccaggaagccctccgggaagcacagcaaagtccctcattctgcacagaaggtttattggttcctcttgggaagggtcccctcccaccacctgtccagaagctgcctttgaagtcagttctgggtttccccagctctggctgaccattttgttccctgagtgtctgagtccccggcaggcggccttcactcagggtcagcgggcaccaggttgctctggaagagcttgaggatgtggttctcgatcacctgttgcactgagatggggcagggaaaaggtgggctgtgagcttgaatcgggagtggggtggaggcacaggccaacctgcgctctccccttaggggacaaacagggacccttgcagagacctgcattacagagcaaagctgggagaaccgaggactcaccccaggaacctcaacttcccctaagtttgtaaaaatgcacttttgtagcttttcagaattaatataaaaatatttcctacc

SEQ ID NO: 8687 - DNA, 2155 bp, Homo sapiens
gctgggagtaggcggacagccagggcgcttgaccactggtctagagccctgtggtcccctggagcctggccacgcccttgaagccctggacactggccacattccctgtggtcccttacaaactaactgtgcccctggggtccctgaagactggctagtcctggcagaacagtactttggagttccctggagcctggccagccctcacctcttctggatagaggattcccccaactccccaactttctccatgagggtcacgccccctgaggacctcaggaggccagcagaacccgcaggctcctgaagactggccacgcctcctgagaccacttggaaacagaccaactgcccccgtggtcgcctggtggctggacccccgggattgactagagaccggccgtacaccttctgcatctcactggagactgaacactagtcccttgcggtcacgtgggacactgggcgcctcctcctccccctcctcctcacctggagagactacaggaacttcagggtcactccccgtggtcacatggaggttgtgggccgaggcgcttattttcccttatggtgacctgagtcctggagactcccattctccccctctccctgagagtcccctgcagtttctgggtaacagggcacacccctctagtttcatgggcgagcacccccatctgccacctcagactgacacacagccagctggctcacttactgggggccacgtcccacccctcagatatttctttgaagggagagcaaacccaccctgtcctctgacgtccctttcccaactgtcaccaaacagaccatcttcccaggcctggggaccggtaagatccatgtcactagttatgcagagcagttgccttgggtcccactgtcaccaaggcaaccagtcctgctgctacctgtcacctagagtcacacaccccttccctcatcaggcacacccatgaagacagtgcctccctcctccagctgtaaccatggataccacacatttctcatctcattggcccccaccccagagacctccacctcaacttctggctgtccctaccctgactcaccgccatggagatcaccctccccgaagctgtcgccagggtgacccaacatccagttctccggctctcaccatggaaacaaactgtccctgtccccaggcccactccagttccagaccaccctccatgctccacccccaggcggtttggaccccaccactgttgccatggtgaccaaactctggagtccgaggtaacagaacacctgtccccctaggcttttccttgtggacaacggggccctgttcaccaagctgttgccatagagactgtcaacgttgtcctcatgacaaccagacttccagttctcaggaacttctcattgtgggccagaagtcctgggtgcctcctactagggctaccctactgcaccccatcaggggcctgatggctgccccttccccagacagggctggacttctggagctgctaagccaccctccgtttgcacgttaactctatgccggatagcagctgtgcacgagacaatcttgcaacacccgggcatgtttgtcgtcgtcctacaaatgaggaaaccgagcctatggcgtgccctggtctgttgagatatgcaagcactgagctcctcttttgtcctctgagaccccatctccattctcacccagttcctctctccttccctgacccccacccacatttccctccttagagatccaggagggatggaatgttctttaaaattcaacacccaccaggctctaagcggcgatctgtgctaagaggtcaggacccagccgaagtcctcggcgttgacaggcagctggggggacatgatccatggacaaggccatcccggccgtgggagaccccagtcccgaagtcttgcctgcaggagtactggggtccccctggggccctctttactgtcacgtcatctctaggaaacctatctctgagttttgggaccaggtcggtttgggtttgaattctgcctcttcttgctcactgtgtgaccaagtgacaaactccttctgaacctgtgttctcccactgtaccagggctgttctgtggtccccgtgagtgccaagcatacagtaggggctcaataaatccttgt

SEQ ID NO: 8688 - DNA, 299 bp, Homo sapiens
gagagctgtggactcaggacccaggactctgtttacgtgcccagtcagccctacctggggaagcgggggttgggtgttttagagacaggagggacatctccgggtgtctttagtcttggctatggtagtttcagtccagtgggtgggatggagaccaacgaccaagtgttcctgcaaggagagcctcccacagctgtcaccatgctccaactcccacacaaacgcttctaccccttccagaacttacccatcatccccccatggatcctttcagtaaaaaccctttcaatttccaaaat

SEQ ID NO: 8689 - DNA, 134 bp, Homo sapiens
gtgttctggaaatacatactttctgaatgaccaaccgtccctggactgtggaatgttccggcctgcatttctgcccaccccttccgttgtcacgagtgccgtgccgtgtaataaagtcccagtgctcatccacc

SEQ ID NO: 8690 - DNA, 387 bp, Homo sapiens
aagccgggtggttccagccattcctgcagccaagggcactgggccagggcggcgcacgcgcaagaggcgcgcttcgagggaatatgcgaagctgccgcgtgctgctgcacatgcgctttttcccttccgcttccctccctttcttcccacgggggagtccgcagttgcccttgttcggaatccacgttccccgcgatcccgggagctggaggcgcatgcgcatccgcgattccctgcgaccaggccccgagagggcgagaccagaggggacggaagcattgcgcctgcgcggaactctcagcctctgcgcggagggcgtcccttcccaaccagccgtgggtgccaggttcccggttggaacctgcaataaactcgctgttcctcgca

SEQ ID NO: 8691 - DNA, 310 bp, Homo sapiens
gtttgggggataagcaggaaagagcgctgcgtgagctgccatgtatcgccagccgttgctttgttactgaacgtgccgccgacgacctcagaaaacccagatgggtggtggtgcccatgagcccctgctcctcagccaggcccgtggcgccggctcatgtgtctgctgcgactcgagatggcctgaaacgccactcattctcccacttcagttcgtttttttgacagtaattttatggtaacgctatgaattgaattgtctgttctaggactgggcacagattttcccattaaaatttttgacttatttt

SEQ ID NO: 8692 - DNA, 588 bp, Homo sapiens
ctaccttgaacttcagcggtacgcggcaagcaacaaatccacagcccctgatgacttgtgggtgctcctggctcaacccaaccaacaggactgactgactggcaggacaaggtctggcatggcacagcaccactgccaggcctccccaggcacaccactctgcccagggaatgggggctttgggtcatctcccactgcctgggggagtcagatggggtgcaggaatctggctcttcagccatctcaggtttagggggtttgtaacagacattattctgttttcactgcgtatccttggtaagccctgtggactggttcctgctgtgtgatgctgagggttttaaggtggggagagataagggctctctcgggccatgctacccggtatgactgggtaatgaggacagactgtggacaccccatctacctgagtctgattctttagcagcagagactgaggggtgcagagtgtgagctgggaaaggtttgtggctccttgcagcctccagggactggcctgtccccgatagaattgaagcagtccacggggaggggatgatacaaggagtaaacctttctttacactct

SEQ ID NO: 8693 - DNA, 486 bp, Homo sapiens
ccaccctggcaccttaaataaggaagaggcccagattgtgaagacggacccatatatccctacctcccaccacctagtggccaaacaccccgccaggagttcaatgctgggagaggtccagagggttcctataaggaaaaactatttaatacatgacctaggggaggcctaaaacccttttggggataatgtcccagagtccccccactagacacaggtcactgccaagcatcagggccactcgggctcagaggtcactcagggtcaatactcagggtcagtgcaggttatgagatccttggggtccaccctagtctctgacacctgggacaggggtgcttttgctactttggttgtggtcactcccccacacctgcctgcctccttcacggactcgaagtgaccttcctggaggaggtgggcagctcagactccacatgctggtggtgcctgaggtctgatggcctctaataaactgtgtcctat

SEQ ID NO: 8694 - DNA, 219 bp, Homo sapiens
gatggcagtgctggtacccactgcccaccctggctgccgctgggcgggaaccccaacagggccccgggagggaaccctgcccccaaccccccacagcaaggctgtacagtctcgcccttggaagactgagctgggacccccacagccatccgctggcttggccagcagaaccagccccaagccagcacctttggtaaataaagcagcatctgagatttt

SEQ ID NO: 8695 - DNA, 879 bp, Homo sapiens
gaatataagcaacattctgaagccttcggttgttccagctccttctgaatacacaaaagagttcatactggacagaagctgtgtgaatacaaacattgttctaaagcccttaattgttccagtttcttttgagcacgaaagaattcccactggtgagaaacagtatgaatgtaaacattgtgattaagccttcagttgacctaattcatttcaaagacaggactcgtgctgcagtgaaatctgttttgttttttgttttttgtttttttaaaaaaggccaagcttgttggctcatgcctatagtcccagcactttgggaggccaaggtgcaaggcaggcagatcatttgaggtcagaaattcgagaccagcgtggtcaacatggtgtaaccccatctctactaaaaattaccaaaaaatgaaccaggcatggtagtgcatgcctctaatcccagctactcaggaggctaaggcaggagaatcacttgaacctggagacagaggttgcagtgagctgagatcacgccactgcattccagcctgtgcgacagaatgagacactgtctcaagaaaaaataaaagtgggaaaatcttccaactgtcctctagagtgtgaatatatgaaaggagtcagagtggggtgaaagtctataaatgtaagacatttgggaaagccttcacacagccttttgagcacacatgagaatgtatactggagagaaaccctataaatattaagaatgtgggaaattcttcatcctagttcttttgttgttgttgatgatacaaaaatattttcatttaataaagattgtcaggttatatttaataagaaagaaagtatcatgtaaacagcccagtaataaaattttacaatctt

SEQ ID NO: 8696 - DNA, 1585 bp, Homo sapiens
gaatttttactaaagagaaatcctacaaatgtaaagaatgtggcaaattccataaatcttgctcaaggcattgaaatcacaagataattcatactggagagaaacactacaaatgtgaagaatgtggggaaagtcttcaaccattgctgacagcttattgcacagaagaaaattcatgctgagaaaaattctgattttaaagaatgtggcaaagcatttaataactactatgaacttactcatcagaggttttgtgctagataaaagcaatgtaagtgtaatgatacacattacatttatctgtggaaagatgtcaccaaataaaagccttagagtacacaaggtgtaatgatagtgatacattacatttgtacatggaaagacttcaaaaatataagccttagagtacacaagagtttttatactgaagaaaaacattacaaatataaagattgttgcaatacttttacttatgttacagattttgttgtacataggagaatttatactgaaaggtaaccctctaacagttgctcaaattttattccattttagataatttacattggaaagaaaccctacaactgtaatgaatatgaaaaaaattgtttaaaaagtacaccttagaaaacactagtttaaggccgggcgcggtggctcacacttataatcccagcactttgggaggccgaggcaggcggatcacgaggtcaggagatcgagaccacgatgaaaccctgtctctactaaaaatacaaaaaattagctgggcatgttgtcgggtgcctgtagtcccagctactgggagaggctgaggcaggagaatggcgtgaacccgagaggcggagcttgcagtgagccgagatcgcgccactgaactccaacctgggcgacagagactctgtctcaaaaaaaaagaaagaacgctagtttatatgaaagcatttaacagatgcagtaaatataaaaaattaataaaaaattaagtctaaatgaacatcagaagattcacagtagaaaccactaagacgctaacactttcaatgttattctaaatcagggcattgattataaagagtaattcaaggttaacataatttagttagcctaaacagaaataggagattaatattttgagacttaaacaattatattcaaagtacactttttgcattgaaagaattttagatttttacaaaggcaaattttgatgtaattgaactctcaaattacttgatgctgtgtctttattcctagtgtctgtatgaaagcatgtggtcaatttctgctgctcggggtttgagaagttctatattaggatgtcatttacatacttttcaacagaagattgaggacactgaaatatgaggtgtgtgaagaaagtacacagagaaacttttgtggttgacttataaaacttgtaagtgctgcatgagatagatgttcagagtaatagtcttgtgcattattcaaattttagtaaattgttttaccaattgcacattagatagtatagtggattttgtaatgcttttcttagactgtgtgaacttagtttcaataaaacaattatttttaatgtgtt

SEQ ID NO: 8697 - DNA, 693 bp, Homo sapiens
gagactgcacagtgtggctgcttttccataatttttgggacgcacaaatgtctgcatgattttgagaaactaaaattactctcaaagttctctttgcatcagatctgaaatgtctgagagtaatagtttctgttgaatttttttttgttcatttttctgcacagtccattctgtttttattactatctaggcttgaaatatatagtttgaaattatgacatccttcctctttgttattttcctcatgattgctttggctattcaaagtttattttagtttcatgtaaatttttgaattgtattttccattattgtgaaaatagtaccactgcaattttaataggaagtttattgaatctatagattactttggataatatggcacttcaataatattcatgttttcaattcatagacaaaatattttaaaatttatttgtatcttttctaacttttcctttttttattgtaaagatttacctccttggttaatattttcctcagaaatttattatttaaggtatagtcaataaaattttcttcctctattttgtcagatagtttaagtgtatgaaaccatagatatacttgtatgttaattttatattttgctaatttactgagtgtatttattagtttagagaggttttaatgtactgtttatggttttttaaatataagattacttatttt

SEQ ID NO: 8698 - DNA, 2113 bp, Homo sapiens
tgtgtcaaatcctttagtgtattttcaacttttattaaaacacaagataattcatactggagagaaatcctacaaatgtgataaatgtggcaaagcctttaactggctcttaatccttatgaaacaaaagataattcatactagagagaaaccctacaaatgtaaagaatgtggcaaagcatttaactggtccctaaatcttactaaacataaaaaaacttaaactggagagaaactacaaagctggaagacatcacagtaattctgacaacacctcaaacttttctaaacataaaataaatcatactggtgaggaactttaaaaatgcgaaaaatgtgacaaaatctttaaatgattgtcacacttgattgtaggtaagataattcttactagaaaaactcttacaagtgtgaagaatgtggcaaaatttttaatgaatactcacaccttattgccaggaaagcatttatacttgagaaaaattgtaccaatataaagactgtgaaaaagccattaatgtctgctcacatcttactcaacatcagagagtacttaaaaaaagtattataaatttaattactgtcaaaaagtatttcagaaaatataagcttttaaagtatttattttgaagacaaacattacaaataaaagaggattgtaatacctttatttgtatcacagatcttattgtacacattttgtactagagaaaaccctgaagcagttacttaaactttgttcaacatcagggaattcagattggagaaaaaccctgcaaatgtaataaatttgaaaaaaaagttttccaaaactacaacttagacaacaccagagggttcatactgagatatatttttgcagatgcagtatatatttaaaacatttaatccaaaataagtctatgtaaatatcagagaattcacagtggaaatatctaaggtagggccgggcatggtggctcacgcctgtaatgccagcactttgggaggctgaggtgggcagatcatgaggtcaacagattgagaccatcctggtcaacatggtaaaaccctgtctctactaaaaatacaaaaattagctgggcgtggcggcacgtgcctgtagtctcagctacttgggacgctgaggcaggaaaatccgttgaacccaggaggcagaggttgtagtgagccgagattgcaccactgcactccagccgggtgacagagtgagactccatctcaaaaacaaacaaactaaggtatggatgcttcagacattacactatatcaaagtgctgactgttaaaaatgatcccaaactaacggtagataaatttatttgtacataactttaaaaggagtagaagattttttggaagtttgtaattacattcaaagtatactttttttgtttgtttgttttccttgagacagagtctctctctgtcgtccaggctggagtgcagtggcacaatctcagctcgctgcaacctctgcctcctgggttcaagcaattctcctgcctcagcctactgagtagctgagattacaggtgcacaccaccacgtccggctgacttttgtatttttagtagggacggggtttcaccatattggtcagggtagtcttgaactcctgacctcatgctctgcccagcttggcttcccaaagtgctgtgattacaggcttaagccacagcgcccggcccaaagtgttcttttttccttgaaaagaagtacagattttttaaaaagctaatattgctgtgattcaactctctagttacttgatgctatttcttcatttctattgtattcacatgtgaaagcatgtgatcagttgtcacggcatcaaagataggagagtttctttttttttaggtgggcattatttatgaccttttctttggaagagtaaggacattaaaatgtaacatgcatgatgaaaatctaagtggagatggtatttgtggttaattatgatattgagtggtgcatgaggtaggtgtttagagtaatattcttttgcattatagtaagaacatttaagttttgttaaaattaaaaaattagtacgttattttactatttgtacttttatgtaataaaatgcagtacatttttaaattttc

SEQ ID NO: 8699 - DNA, 3917 bp, Homo sapiens
aaaatgtggcaaagccttttaccagtcctcaactcttactaaacataaaaaaattcatactggagggaactcctgtgactgtgaagaatatggcaaagcctttaataaattctcaattcctaacagacataagataattcatactagagagaaattctacaaaccagaaagatgtgacagtgctttgaaaacacctcaaacttttcaaaacataaatcatagtgttgagaaatcctagaaatgtgaagaatgtgataaagttttaaatggttgtcacacttgattgtaggtaaggtaagttatactggagaaaacttctacatgtgtgaacagtgtgacaaaacttttaactaatgctcacaccttcacaggaaagcatttatacttgagaaatattgtacaaatataaagactgtgaaaaagccattaatacatgctcacatcttactcaacatcagagagttcatactcaataaaaacataagtgcaactactgtcaaaatatctttaagaaaatataagcttttaaagtgaagagtattttgaagaagaacattgtagtagaattgtaatatgtttacttgtatcacagatcttactgtacacgttttgtattagaggaaacctctgaagcagttgctcaaactttgttcaatatcagggaatttatattgaaaaaaactgtgcgaatgtaataaagttggaaaaatactttttcaaaaactacagcttagaaaacaccagagagttcatactaaaacatatttttgcagatacaggaaaaattttttaaaaattttaatcattaagtctgtaaatatcagagaatttacagtagaaatatgtaaggcactgatgcttcaggtattttactaaatcagagtgctgagtatagaaaataatctaaaactaaaattggtaaaatatttgtatataactttaaaagtagaaattttttgcagttattgcattcaaagtatgcttaactttttgaaaaaattagattttttgaaaagtgagtaataatgtaattcaactcttaaattatttcctgccttttcttcactcctatttacatgtgaaagcatgtgatcaattgttgctgcatcagatatgagagattcttttttattaggtgagcattatttataaactttgctatgaaaaagacattaaaatatgagatgtatgatgaaaatctaagtgaagagacttttatggttaacttataatattaagcaatgtgtgcgttaggcattcagagtaatattctgcattatgagaaaacttaatttcatttataagtaaattaaaattagtatattttactaatacttttatataaaatgcagtatattttttaaatttcagattatatgtgatgttaatatattcaacctttttaacatgttaaatactattgtgcattcagtgaagtgttattatgccacagacattaacctattccaccttactcaagggtgtacgtaaaacatggtaacagtatactatttggtaacataatggattaacatctctagtaatctcttttgctagtggctttgactgcaaataagttaaagaatattatttctgtaggttaaatttttgtttttattttattttatttttgagaggtagtcttgctctgtcacccaggctggagtgcagtggcacgatctcggctcactgtaacctccacctcctgggttcacgcaattctcctgcctcagcctcctaagtagctgggattacaggcacccaccaccatgcccagctaatttttgtattttagtagagacagggtttcataatgtaagtcaagctggtctcgaactcctgaccttaaatgatttgcctgcctcggcttcccaaagttctgggattacaggcatgagccaccgtgcccagccaaatgtttattttatttaaatttatttttcttaattatttggggtacataatatgagtatatattcatgcaatatatggcatattttgatacaagaatacagtatataataatcacatcagggtaaatgaggtatccatcacctctagtatttatcctttgtattacaagcaacccagttttatacttttagttattttaaaatgtaaaattaaattgttattgattacagtgttatttttatggtcataataaaagttatgtagaagtataataaaatccctacatttctgaggcctgaataagtatttttaaagttttctaatatttattttttgagcatgtttcctgtctgcctgcaaacacatgcagacatttagttttgatttacatatagttaaatatatgttagtctaaagataaaccttaagtgtaagaaaattatagagtgagtttgtgtgtatgaatttgtacctgttttccgaagaaaaaagcaatactgaacaaaacaaatcattttaacaagatgactactagaaaactaaaagcctcaaaaatgctaaaagaaaatgtattctctgctttgtattgaatttattactgtacattctgtggcttatagttctgaatctccccatgaaaattctgtttatacttgcctggtactcatgatagacccctaattattttgtatcttttttcatataaatattttacagattatgaagtattcattatgtgagctggtctgtgattataagaataatttttacaaaatttagtgcatacaaaatttttaaatgtaattccacaattagtgtattaagttacattttatttagttagaacacttcattttgtttttagttggagaactctatagccctttagttatttttcttttcactttttatagttgacataagtaaatttatttattgagtcaatttgttcaggtaagtactagggaagctttataagtcgtgaggatgtttttatatttaaatgtagcaaacatacatgacagttcttgctgtgtaacagatgctccatagtaagccataagtattcctgctaaagttagcttgtaacttcagttcagagatggaaaacatcagtggtgaagaaataaaattgattcttcatgtggagaggacatagtttccaggctgcaatgctgaatcttgctgaatttaaagagaagttctgcatcttttatttcttaattatcttcagatttctctgtatttattatgtgtatccccagctatgtatgcagcacagcccatctcctttttctgtgttatggcttcagttttctcactgttgtcttaatgccatttcatttcacatggtactttgtaaattttgacgagaaagttggttgtttttttttttttttttttttttgagacagagtctcactcttgttgcccaagctggagtgcagtggtgcaatgtgggctcactgcaacctctgccttccaggttcaagcaattatcctgcctcagcctcccaagtagctgggattacaggcacctgccaccacatctggctgaatttttttttttttaattttttgtagagacgaagtttcaccatgttggccaggctggtttcaaactcctgacctcatatgatccacctgcctcagcctcccaaagtgcttggattacaggcataagccactgcacccagctgaaagttggtattttttaatgcactgaataattgtttttaactggagagtttggttatcaatataactttcggattagttaagataaaagcatacattgtccacaggtgagaagattaaatcagaatagttgttctttgttaaaaaaaaaattagattcttaaagtgtggcaaacataaaatttgcaagaaaatgtagaaattaaatttttaagagttaatggtaagtgaacaattttaaatttattttttattatgtaacatacttttattaaaatatatacttatataataaaagtataaca

SEQ ID NO: 8700 - DNA, 2655 bp, Homo sapiens
attatactggtgagaaattctagaaatgtaaagaatgtgataaaggctttacatggttgtcacacttgattgtaggtaagataatttacattggagtaaacttctacaagtgtgaagaatgtggcaaaacttttaattaatgctcgtaccttattgcacaggaaagaatttttacttggaaaaaggtatatacacaaagaatgtggaaaagccattaatatgtgctcatatcttactcaacatcagagagtctgtacttaataaaaccattatagatgcaactagtgtcaaaagatctttcagaaaataaaagcctttaaagtgaagaagataattcattctgaagacaaacattacaaatattaagagggttgtagtaccattacttgcatcacagatcttattgtacacattttgtactaaagaaaaccctgaagcagttgctcaaatactgttcaacatcagaaaatttatattggaaaaaacccctggaaaatgtaataaatttgtaaaaacagttttgaaaaactacagcttataaaacatgagggtctataatgcttggttgatagtacaaagtttattcaacatcagggaatttatattggagaaaaaccctacaaatgtaatcagtttggaaaaacatttttaaaaaaaccacagcatagaaaacaccacagggttcatactaaaatatgtttttgcagatgcagtaaaaatgaaaaaaatttaatccgaaattaagtttatgtaaatatctgagaattcacagtagaaatatctaaggcgcggacacttcagacattacactaaatcagtgctaagtacagaaaacaacacaaaataaaacttggtggataaattatttgtatataacattaaaagaagtagaagattttcagttataattacaattaaagtatacttttatcttgaaaaaattactgatttttaaattagtgaataatgatgtaattaaactctcaaataactttatgctcttttttcattcctgctatattcacatgtgaaagcatgtgaccaattgttgctgcaccaaagatatgagagattcttttattaggtgggcattatttaaaacattttttatggaacagtaaggatattaaagtgtaagatgcagccaggcatggtggctcatgcctataatcccagcactttgggaggctgaggccggtggatcacctgaggtcaggagtttgagaccagcctgaccaacatggtgaaaccctgtctttactaaaaatacaaaaatttaccaggcacctataatcccagctacttcaaaggctgaagcaggagaatcacttgaacctggaaagtggaggtctcagtgagccgaaatcataccattgcactccaacctgggcaacaaaagtcaaactccatctcaaaaagaaaaaaaaaaaaaaaaaagatgcgtgatgaaaatgtaactggagaggctctttgtggttaacttataaaggagtgatgcaggagataggttttcagagtaatattcttctgcattatagtgacaaaagttttttattttagttaaaattggttaaattagtaagtcattttacttattgtaattttatgtaattaaatgtacatttttaaatttttagattacatgtaaatataacttttaaaaaaatgtgttaagaccattgtacattcaatgaagcattattatgcttctaactttaacctatttcaccttactcaagagtgtatgtaaaagatggtaacaatatactatttggtaacataatggactaacatttctattaatctatttcaccagtggctttcaactgcaaataagttaaagaatatttttctataggttaaatattcttttttgtcttatttaaacttactgttcttaatttctgtgggtacatagtatgattttaattaccttattttattctttgtgctattcataattttttttgtttgtttggtttttttttttgagacagagtcttgctctcgcccaggctggagtgcagtggcgcgatcttggctcactgcaagctccgcctcccaggttcactccattctcctgcctcagcctcccaagtagctgggaccacaggcgcccactacttgtttgggtttttttttggagatggagtctcgctctgtcacccaggctggagtacagtggcatgatcttggctcactgcaacccccacctccccggttcaagtgattctcctgcctcagcctcccgaatagctgggattacaggcgtccaccatcacaccaggctaatttttgtatttttagtagagatggagtttcaccatgttggccaggatggtctcgatcttctgacctcatgatctgcctgcctcggcctcccagagttctgggaccacaggcatgagccactgcacctggccaaatgtgtatatatttatgcaatatataacatgttttgatacaggcatataatatgtattagtcacatcaggataaagtatctattaccttcagcatttatcctttgtattacaagccaattctacacttcattattttaatgtacaattaaattgttattgactacagggtcattttaattataaaaattatatagaagtataaataaagtccatacattcctgagtcatg

SEQ ID NO: 8701 - DNA, 4586 bp, Homo sapiens
gaagaatgtggcaaaggcttcaaccagtcctcaaaccttatggaacataagagaattcatactggtgagaagccctacaaatgtgaagaatgtgataaagacttcaactggtcctcacaccttactactcataaaagaattcatactggaggaaaaaccctacaaatatgaaaaatgtggcaaaactattaattaattctcaacgcttactgaacataagggaatttgtacaggagggaaaccctacaaatctgaagaatgtggcaagccttttagctattcctcaatccttactaaacattcatgtaattcatactggagggaattcctacaattgtgtggaatgttgcaatgcccttaaccagtccttaaggcttactacatataagacaactcatactggagagaaaccatgcatgtgtgaagaatgtgggaaagcctctaatagatcctcaattcttaagagacataagctaattcatacacaagagagactctacaaacctgaaagatgtgacaatgcttttggcaacacctcagacttttctgaatataaaagaaatcgtacagatgagaaatcctagaaaagtgaagaatatgacaaagcctttaagtggctgtcacacttgattgtaggtaagataactcatactggagaaaactactgtaataaacaatgtgacaaacatttaaccagtgctcatgccttattgcaaaggaaagcatttacactagcctgggcaacagagagagactgtctggaaaaaaaaatttttgttaatgccagtaatatcttctcacagcttattaaacatcagagagttcatactaaataaaagtattaaaagtgcaatcactgtcactagatctttcagaaaataaaagctgttaaagtacagaagaatatttattttgaggaaacacattataaatattaagagggttgtagtacatgtacttgtatcacagattttattgtacacattttgtactacaggaaaacctgaggtagttgttccaactttgctcaacatcagggaatttatattgaagaataaccctgcaaatttaataaatttggaaaaacattttttcaaaaactacagattataaaacacaaatgcgtttatactaaaatatgtttttgcagatacagtaaatataaaaaatatttaatccaaaattaagtttatgtaaatatcagctaattcacagtagaaatacctgtcactcaaacttcagatattacactaaatcagactgctgagtataggaaaaaatccaaaactaaagttggcaaaaagaagaattatttgtatataactttaaaagaagtagatctttgaagagttataattaaatttaaagtatacttttttcttcaaaacacagattttttttttttccagacacattggcttactgtggccaatactttgtgatgccaaggtgggcagatcacctgaggtcaggagttcaagaccagccttgccaacatagtggaactaaaaagaaatgtttactaaacatgtttactaaaaagaaataaagaaattagccaaggtctagcttccaggttcatgccattctcccacctcagcctcccaattagctgggactacaggcgcccgccgccactcccagctaattttttgtatttttagtacagatggggtttcaccatattagccaggacggtctctatctcctgacctcatgatatgcccaccttggccacccaaagtcctgggattgcaggcatgagccacagtgcctggcctaataacagaagtctttagcagagcaaaaatgtataaaatgtataatgacattgtataagtaataataaacctactaaccataaaaagccctggatcatatgaaatcacagcgaagttttaccacattgcaaagagttttacctaagcctactgaatgcattcgaaaaaatcaaggtgggatttcaccctaacttgttatattaaatcagtgaaatatatgaaactaaaatctagtgaaggcaccacaaaaaaaggaaagtacaggtcaatattctgggtgaatattggaataataatcctccatgaaatactagcaaactgaattcaaaagcaaatcagaaagttattttgctacattaatgtgagcttttccatatatatgaaggtgtttcatgatatggaagtcaataagtgtgattcaccatgtaaagataattaaaagaaaaaaaaataacagtaggggcagaaaaagcattcaagaaaacccaatattaactcaaaaatgttgtcaacacactggacattgatgaaaatatcttaataagagtcatctatgacaaatccttagccaacatcatactaaaagagcaaaaactggaagcattctccatgagaataaaaataagaatatccattctaaacagtcctattgaagttatgaaatcctagccagagaataaaaggaatccaaacagaaaacaaagaaagtcaaattatctttactgatgaaagaattgtccacctagaatactttaaaggtttcaccaaaagagttctaagcctggaaaaagacttcaaaaaaaatcttagaatacaaaatcagcacaaatgcatagcatttctgtacaccaataatattcaaactgagaacaaaataaaaaacacagctctatttacaatagcaacaaacacacaaaaaaatacctagaaatacattaaatcaagggggtaaaatatctctacaaagaacaacaaaacattgctgaaagaaacgagagacaatgcaaataaatggaaaaatattgctcatggattcaaataatataattaaaatggtcattctgcctaaagcaacctacagattaagtgctatttttatcagactatccatgacgatttttattgaattagaaaaagaaaactattctaaaatacattcaaaagaattaaagagctcaaatagccaagaaaacttcagactaaaagaataaatctgggccaagcatggtggctcatgcctgtcatctcagccctttgggaggctgagatggatggatcacctgaggtcagaagtttgagaccagcctggccaacatggtgaaacctgcatctctactaaatgtaaaaaattagccaggtgtggtggtgcatgcctgtaatcccagctacttgggaggctgaggaaagagaaccatttgagcctgggaggtggaggttgcagtgagccaagattgcatcagaataaccagtataacatggttctggtacaaaaataaacatctagaccaatgaaatggaagagagagtactgaattaagctatactttgcaatcaggttatttttacaaagccaacagaaataaacaaaaggggaattaactccctatttagtaagtaatactgggaaaactggttagtcatatgtggaagaaaactgtactacctttttctataaaaaaaaaacaactcaatatagattaaagacttgatctgtgagtctccaagctacaaaaatcttagaataacacttagataatactggcctctgtaaagaatttatgactaacatctaacatgagtgcaacaaaaataaaaataaaaaatggcatctaagccaaagagcttctgcacagtaaaagaaactatcagcaaagtaaacagatgacctacagtatgaaataaaatatttgcaaactgcagacaatgaaggattaatgtacagaatctataatacatttaataaaaaagcaaacatgatatgaatagccagcttcttctcaaaggaagacataagagctgccaataaacatgtaaaaattgctcaacgttcctaattatcagaaagatgtaaatcaaagtgacagtgtgatactatttcataccagtaagaatgacttattaaaagtaagataaataagatgttgaagttgtagagataaggaaatctttctacactgttggtgggaatgcaaattaattcagaacctgtgcaaagcagtttggggacttctcaaagaactagaaatagaattgccatttgaccaatcaagccgattactggatatctgcccccaaaaagaataaataattttgccaaagagacaccagcactcacatgttcattgcagcactattcacaatagcaaaaacagaatttaaccagttacccatgaatcttttattggataagaaaaatgatgtacttatacaacctccaatactatgcagcaacagaagagaatgaagtaacgtcttttgcagcaacatgaatgcagctctgcttcaggccattctaagcaaattattgcatcagaaaaacaaatgccacatgttctcactcatacatggatgctaaaaattgggcgcacatggaaacaaagatgaaaacaataaacactgagaattctaaaaagaaggaggaaggatgggagacaagcatagaaaatctgcttaggtatgatgtacactacttgggcaatggaattattaagtatccaaacctcaacatcatgtagtctacctgttttacaaatctgcacatgtaccttaaatataaaataaaaataataaaatgttttttggtat

SEQ ID NO: 8702 - DNA, 849 bp, Homo sapiens
aaatgtgaagaatgtggtaaatccttcagctgattctcagtctagtaaacataagaaaattcatactggagagaaaatctacaaaggtgaagaatgtggcaaagcttttaaacagtcctcaatctttattacacataagaaaattcatgctggagagaaacactacaaacgtgaagaatgtgacaaaggcttcaaccggtcctcaaaccttgtggaacataagagaattcatactggagagaaaccctacaaatgcgaagaatgtgataaagacttcaactgttcctcacaccttactactcataaaagaattcatactggaggaaaagccctacaaatgtgaaaaacgtggcaaagcttttcattagttctcaacccttactgaacataagggaatttatacaggagggaaaccctacaaatgtgaagaatgtggcaagccttttagctgttcctcaatccttactaaacattcatgtaattcatactggagggaattcctataattgtgtggaatgtggcaaagcctttaaccagtccttaaggcttactacatataagacaactcatactggagagaaaccatgcatgtgtgaagaatgtgggaaagcctctaacagatcctcaattcttaagaaacataggctaattcatacatgagagactctacaaacctgaaagatgtgacaatgcttttggcaacacctcagacttttctgaatataaaagaaatcatatgaatgagaaatcctagaaatgtgaagaatgtgacaaagcctttaaatggctgtcacacttgattgtaggtaagataatatactggagaaaactactagaataaacaatgtg

SEQ ID NO: 8703 - DNA, 1706 bp, Homo sapiens
aaaatacaaaaaattagccgggcgtggtggcgggcgcctgtagtcccagctatgcgagaggctgaggcaggagaatggcgtgaacccgggaggcggagcttgcagtgagccgagatcacgccactgcactcaagcctgggcgacagagcgagactccgtctcaaaaaaaaaaaaaagaaaattcatactagagagaaaccctacaaatataaagaatgtggcaaatcttttaaccggtcttcaacctttactaaacataaggtaattcatactggagtaaaactctacaaatgtgaagaatgtggcaaatcctttttctggtcctcagccctaaccagacataagaaaattcatactggacagcaaccctacaaacaggaaaaatttggcaaagcctttaaccagttttcacaccttactacagataagataactcatattggagagaaatcttacaagtgtgaataatgtggtaaagtctataaaaagtcctgaattcttaacagacataatattattcatactggagagaaactctacaaacctgaaagatgtgccaacgcttttgacaagtcaaacttttctaaacatcaagaaaatcatgctgctgagaaatcctagaaatgtgaagaatgtgacaaagcctctaaatgattgtcacacttgatcgtaggtaagataattcatactggagaaaactaccagtgtgaacaatgtggccaagctttgaactaatgctcacaccttaatgcataggaaagcatttatgcttgagaaaaagtgaacaaatatagacaaaaagccattaatacctgctcacatcgtactcaaattcagagcgttcatactaaataagaagtgtaattactgtcaaacgactgatcagaaaatatgtctttaaagtacagaagagtattttgaaaaagcattacaaatatgaagaggcattatttatgaccttttctatggaaaggtaaggacattaaaaatgtaagatgcatgatgaaaatttaagtagagaggatctttatggttaacttataatatcgagtgatgcatgaggtagatgttcagattaatattctgcattattatgaaagaaaaacattcttaattttagttaaagtttagtatgatttattgtatttttatgaaatatatgtagcatatttttaaattataaattgcatgtgaacttttcaaccaaacagttttaacatgttaaatactatcatgaattcaatgaagtgttattatgccagtaactttaacctattccaccttactcaagggtgtaggtaaaagatggtaaaaatacactatttggtaagataatggactgacatctctagtgattttttttgccagtgagttttaattgccattaagttaaagaatattgttcccataggctaaatttttatttttattttctcatttaaatgtatttgacttaatttttgtggatacctaatatgtgtacatattatgccatatgtggcatattttgatacggacacacaatatataacaatcgcattagactaaatgcggtctccattacctctagcatttattctttgtattacaaataattcaattctacagttttagttatttttaaatgtacaattaaattgttgttgactacaggattatttttatggtcataataaaacttatatacaaacataagtaaaatccat

SEQ ID NO: 8704 - DNA, 318 bp, Homo sapiens
taatgattttgacaacacctcaaatttttctaaatataaaggaaatcatactggtgaaaaattctagaaatgtaaagaatgtgtcaaagactttaaatggttttcacacttcattgtatgtaagataattcatactggagaaaactacaagtgtgaagaatttggcaatactgttaattaaggctcaaaccttattgcacaggaaagcgtttatacttaagaaaaattgtacaaatataaagagtgtaaaatagccattaatatctgttgacatcttaatatcagaatgttggtacttaataaaagcattataaatgc

SEQ ID NO: 8705 - DNA, 254 bp, Homo sapiens
aaatgtgaagaatgtaacaaaacctttaaaagttgtcacacttgattgtgcataagataattcatactaaaaaaaaacctacaagtgtgaagaatgtggcaaaacttttaaccaatgctcacaccttattgcacaggaaagcatttgtactagaaaaaaatttcaaatatacagaatgtgaaaaagccattaatatctgttcacatcttactcaacatcagagatttcatacttaataaaagcattatacatgc

SEQ ID NO: 8706 - DNA, 288 bp, Homo sapiens
gagacttggactcaagtcataggcttctttcagtctttatgtcacctcaggagacttatttgagaggaagccttctgtacttgaagttgatttgaaatatgtaagaattgatgatgtatttgcaaacattaatgtgaaataaattgaatttaatgttgaatactttcaggcattcacttaataaagacactgttaagcactgttatgctcagtcatacacgcgaaaggtacaatgtcttttagctaattctaattaaaaattacagactggtgtacaagatacttgtg

SEQ ID NO: 8707 - DNA, 3824 bp, Homo sapiens
gccgcacctccggggaggtggggggcccctttaaatgactctgtgattctgaagaggtggcttgggagttgggagaagcccagcggatgccccctggggaatctccacatcatcagtgtattactagtaatgtcccgctggagaggccaccgctgtgcagtgtcatgttccagaaattactgatgaagcagcatgtgttggtggcatgtgcactggcctgccatgacagccctctgactggccccccagtgaagagtaaaggcctgcctgccgcaggcttcggaggcgtctgctgagtcctctcacccgcatgggtctggggaagtgatcacgctcagccgacggtctgaccacacttcatcctccccccggggccttctcatcttgggagatgactcctcttcagagcacctgctgcaggactggatcccacccccctgcaggtcctggggtctcagggccttggagcagcccatgctggaatcatgtttacctcctagtgcaaccgtcccctacccagggactgtcgaatggccccacggaggggacgggcggcctgctgagtgaagccacaaataccgagtggacttgaccccggcccccactaggctgcacacctagactcgccctgccagggcctcgctcttcccatctgaaaagtcctggtagttcttgaggtttacttctcaaatgaaatatttttagtaaaaagtacaggtatatctcggagatattgtgggttcagttccagaccacctcggtaaagccaacatcacaataaagcaaggaagcgcattgttttagtttcccagtgcatctaagtcatgtttactgcatattgcagtccactaaatgtgcaatagcattatgtctaacaaatgtacaaaccttaatttaaaaatatttactgttcaaaatgctgacacagaaacgcaaagtgagcacatgctgttggaaaatggtgccaaatagacttgcctgatgccaggctgctacaaaccttcaatttaaaaaaaaaacacagtattcacaaagcatagtagaatgaggtatgcctgtattgctctttctgaagtggtgtgatataaaccatctctaagaaatgtttctaccctaaagatttccccagtacagtcagctctccgtaactgtggtctccacatttagatccaaccagccttggataggaaatatttgaaaaaagaaattgcattggtactgaacacgtacagacctttttttcttgccattattccctaaacaatatggtgtagcatatttacatagcatttatattgtatttggtattataagaaatctagagatgatttaaattatacaggaaggtgtgcgtaggttacgtgcaaacgctatgccattgcccatcagggacttgagcatcctcagatgtcggtgtctgagggttgaggttgcagtcctggaacccatcccccatggatactgaggcatagctgtactgtgtgttttcactttgctttcagaactacgacttgaatgtgatcgattacaataaatgtttttctaaaaagccattttcccacatattatgtgtaaaatatctctaatattcaaagtcttacaaatggaacaagagggaaggtaccagatttgtggctttaaagaatgcaagagtaggtcaggtgaggtggctcatgcttgtaatgtcggcacttttggaggccaaagtgggaggatcgcttgaggccaagagtttgaaactagcctgggcaatatagtgagacctccatctctacaaaaaatgttattccttggtccccaggtcctggggcagggcagggacttggggctctcctctcaggccctggaggctcggagggaggcacttctgctgaggccctgcttataggaaagctcagtatcctggcacctccatgtgtgtaaggacgtcagggtgaattataacccatggtgattaaggaagggccgagcctttctcttgcagagcgattgctcttctgctggcctcgtctagcacaaatcaggtgccctagcacaggccacactcctggagttaatgaagccactttaatcatttatatgccacttaagttgatgggggacagggcaggggtgggaaggaggggttgtctgtctgtgaaaactgagtgtggcttttcttgttgaactgatcattcctgctcttcctgcaaataagtcctgcatacggaccctggaactaaaaatggaaaatcagagcatgccccctcccaattttgtatagctttagtgggctctaaagttgcccgtttttagtgtgaaggaaaaaacgttgatttgcagatatcgtgagaatgaaacctcaacaaagatgtttggttcagtgcttcaaagttgggggacactttttccatgttgaacaaatgccaacttctccggttgcttacagcaaatccttctggaacaatcggggctgaaattgagttgcctttgttaggcgattgggccccattcattcttactcgtgcatcaggtcctggtctgtgtcaggcccaggggacacaggtggtcccagctcagaggcccagtgtccactgcagcccctcccacagcctgcccacccctactgcagggaaaaatgcccagggaggagatggtccaactcctgatcagttttgtgtccgatggagcaggccttgctgagtgaagacactggaactagctgggtcctggggtgacttggaggctttgggcctaaaagggcagcctgaacctggagtcttatctcccccaggagccgaaagcacttttcttgatttcccccaggaaatcaagcgctgcttctcagctcctgtggttttagtatttatatatctgtatcttctttgtagaaatttatttatttttgaataagtaatacctgcctggtacaaaatttaaaaggtacgggagggcgcaagctgcaagggaaggcctgctcctatgccgaccccagaggcagccactgttaccaatttcatgtgtattcctttaactctgttttaaagtaagtctctgaaaactgttcatttccttttgtcagtatttgttgctgaaaacctagaaaaacccagaaaatataatgaaataaaaactacaaatttcacaacccagaaaactgctggtaacagatttggtgtctttcctgcaattgttttaatgctatgtaggtacacatatatttttttctttttttcttttttttttttttgagatggagtctcgcactgtcgcccgggctggagtgcagtagcgcgatcttggttcactgcaagctctgcctcctgggttcaagccattctcctgcctcagcctcccgagtagctttgactacagtcgcccgccaccatgcccggctaatttttatttttttattttttttttatttttagtagagacggggtttcaccatgttagccaggatggtctcaatctccttacctcgtgatctgcccacctcagcctcccaaagtgctgggattacaggcgtgagccactgcgcccggcctatgtatgtatatttctaacgtacttgccttcttatcctatatgcccctttgaacacctgtatcaatgaatgttaaataatatttttgatgtaatttaaaattccttgtaaatatttgtaatggctgcataatattccactgtgcctaaccatgtgcctggtgtgaattccatttgtggatttttactactgtaatgctgaagtattacagtaatactgtgttaatattctctttattgaattctggtatatagtctttgggattcattcctcaaagtgaaattgctggatttaaaag

SEQ ID NO: 8708 - DNA, 1602 bp, Homo sapiens
catttgcttttgatagaaaggactgcagtttgctttgagggaaactgtggaaggcaccttcaggccccctctgacttgttgttcttggcacatgttcttattttaactgcagagaatcactctgggctggactgttttgtataactgtacagtgtttaatagaggtgcataatcagctgttgttactggtaaaatatgaaggttaaaatgcagtggtaagtgtttggaactttgtgtaaacgggatttagttgtgagcatcctcccgatgcttcaagctgcatgcattaacagacagtttaattaagcatttataacggaatcaggcacaccttttccacgagactcgagtgtgctggcatttctcaccctttcatctttagccctctgagtactttgaagcacttttgcattaatttggttaaaaaataaaataaaataataataatgtatgaagctctgttttttaaactccttaccagcttagttataatgaataatatgaacctccatttatgcaggtctgcaggggtataacacgccttgaaatttaaaagaatattattttcacattgaaacatagatgtatatattgtatagatttcagactctcttatgaaaaaaaatgtgattgtggttaaatgacctttttcttgcatttatagcaacagtgttttatgcacctgctatgctctgggcataagctgtgcctatgtatagtgtatatttctttttttcttttttttaaggtctatgggttttgttttttacatgcaaacattgtaaattatacagaagataccacagatagcatttataaagtatacagaaacattatctgaaagcaaagtatgatagtttgttttgctatacagtacatctatattgatagaggttcatgtttaaattatacatatttattagcatcatattgtcatttgttttgagcagtctgaataaacgagaccgggaaagacatccctggcaggcatcagaactattttgcacatgatttttaaaggtatttattagaaatcaaagaacactcaaaataaactcagtgctcaaagggttaagtctatttgaaaaggttaaaaaaaagaacaaaaaaaaaaaaagaacttgtactgtatttcctaaacattgataaagcctttaaaatgtttgtactgtaatactttgcttaaaagtcatgaggcattctgtgatccaacctctttcacttatttataagccctcttggttgctattccatattgtaggatgcctttctatttcaattggtaactttctgttttgttcttcctaattattctcccaagatcccacactgcagctttatctttaggcttatgaaaggtaacccgtggttaccggctctccaagtgattctgttcttctccatttttggcagttaatttgcagaagtaactgacagctgacaccatatgagaacctttgtataaaatattggcatgtaaacagcacagacaccgtaacacactctgtgccctgtttggttgttgacaatgaagcaccattatgtgactcttcatataacccttttttctacggcagcattaaaattgtctttttgctataa

SEQ ID NO: 8709 - DNA, 1144 bp, Homo sapiens
caggaatgaggagttgttgaacccactgctaggaagcaaggatgcaacaagatgatgctgagcgtgaacacatctgagaactaaatgtgcttccatgagactggcttgagaagtcttcagcaccaagttcctgaaagcttttctgtggcaggaaagaatgcaacaaaaaagttaaccaccaccatctctctcctcttcaaagctaatgaatacaattgaaacagacaaaaattccagtagcatccagatccttaagccagaggtgcatgcttctttttaagtatgagggtttgttggtcacagtgggagaggtttcaccaccgcattctgacctcctcctcccaaaaggtgctaaacctctctgacctgtgtacattcacaaaccacagctagaattcctccacctaggattaagctggagagaagtaagtaatttaggtttcatggtactgtagaggccaggctgaaatgtcatatctgaaggaagaaagcagcagctggacaatgtttctttgcaaagcaacactcgaaccaaaagatgcctcaatcccattttgatattcattttagtgaaaggatgcatcagacctgttccacatcatgcacatgggaaagggtggttatcattttccttctaacaagtaggtacagatattcggttactacacgtgcacctgtagcagtatttctagaaacatccctttttgttgagaacctcccttgaatgtctgtcacactcacacctgacgggatggttactggattagagagtagatttggcacatcttttcttagtcttttgattcaaattcaaaacttaacagcacaaaccaggtcagagttactttcggttagaatttattgccatttattcctttttataaatttctatagattatactgttatttttatgttattggcctagagctacacgtatatgggtttgtcctgagtccgttttcaaatgaccttgtgatagggaaatggttttgtccatgttcttggaaatacttgtgtatgtacagaaggaagggagggattatttttctacaaagtaatttatgatttctaattttctaatgtgccttggatatgtgccaaatgatggaaaagaaacagtaaactttatgattcttgactgtg

SEQ ID NO: 8710 - DNA, 104 bp, Homo sapiens
caagctccgtctcttgtagccaagtcagctgaatttattttcttaagcaatatttgtggttatttcttcctttttttcttacgaataaaatatactcagatgtt

SEQ ID NO: 8711 - DNA, 162 bp, Homo sapiens
aatctgcgggagcccgtggtgtagcctcctctggcctgaaaggtctgcctcacacaggccttccctgcagggcagcccatggtggcagccggaggtgcgtaagcccactgaacgctgcagggcagggaagaaataaatggtctcatagtttaatccattgat

SEQ ID NO: 8712 - DNA, 1403 bp, Homo sapiens
tgtgaggaaacaaacatgttcaggccctgaacatttccggtgctgactcggccttaaacgtttgtgccataatggaaaatatctatctatctgttctcaaatcctgtttttctcatagtgtaaactcacatttgatgtgtttttatgaaggaaagtaaccaagaaacctctaggaattagtgaaaaaagaacttttttgaggtgtgttactatactgctgtaagttatttattatataaagtattgtaaatagaatagtgttgaagatatgaaatatggctatttttaatggtgacaattatgacttttagtcactattaaattggggttacctatatcagtacaatttgtagttgtttccaggtttggctaataatcattccttaacctagaattcagatgatcctggaattaaggcaggtcagaggactgtaatgatagaattaaattagtgtcactaaaaactgtcccaaagtgctgcttcctaataggaattcattaacctaaaacaagatgttactattatatcgatagactatgaatgctatttctagaaaaagtctagtgccaaatttgtcttattaaataaaaacaatgtaggagcagcttttcttctagtttgatgtcatttaagaattactaacacagtggcagtgttagatgaagatgctgtctacaaggtagataatatactgtttgatactcaaaacatttttcattttgtttaaagtagaagttacataattctatattttaagtcttgggtaaaaaagtagttttacattttataaagtaaagatgtaaatgattcaggtttaaagctctatttgacttcctttttttgtttgagatagcgtcttgctgtgttgcccaggctggagtgcagtggtgtgatctcagctcagtgcaacctccgccccctgggatcaagcgattctcctacctcagcctcccaaatagctgggactacaaggtgccctccagcatgcctggctgatttttgtatttttagttgaggtgaggtttcaccatgttggccaggcgggtttcgaaatcctgacctcaaatgatccacccacctcagcctcccaaagtgctgggattacaggcatgagccaccacaaccgtcccactattttactttttaaaatgacattcctactgattgatttttatcttgctataagttcgatgacaccgtgaatctaataaggttcactgttgacacagtacaagttacatagctaaaatacatagcattgaagactaattttaaggattgacaagagtttattttctattgtgcaatatcttaaaggaagcaaccacctttgggaaagtgtatctgctgctcctagggccatgcttgtatacatatttaaataaacatattcatttacccg

SEQ ID NO: 8713 - DNA, 226 bp, Homo sapiens
gatttttgtagagactgaagcagttgtttctgtttacatgttgtttattgaggaggtgttttggcaaaaaagttttgttttgtttttttctggaaaaaaaagaaaaaagatacgactctcagaagcctgtttaaggaagccctaaaatgtggactgggtttcctgtcttagcactgccctgctagctcttcctgaaaaggcctataaataaacagggctggctgtt

SEQ ID NO: 8714 - DNA, 1308 bp, Homo sapiens
ggcgcgcggctgtgggaccgccctgggccagcctccggcggggacccagggagtggtttggggtcgccggatctcgaggcttgcccgagccgtgcgagccaggactaggagattccggtgcctcctgaaagcctggcctgctccgcgtgtcccctcccttcctctgcgccggacttggtgcgtctaagatgagggggccaggcggtggcttctccctgcgaggaggggagaattcttggggctgagctgggagcccggcaactctagtatttaggataaccttgtgccttggaaatgcaaactcaccgctccaatgcctactgagtagggggagcaaatcgtgccttgtcattttatttggaggtttcctgcctccttcccgaggctacagcagacccccatgagagaaggaggggagcaggcccgtggcaggaggagggctcagggagctgagatcccgacaagcccgccagccccagccgctcctccacgcctgtccttagaaaggggtggaaacatagggacttggggcttggaacctaaggttgttcccctagttctacatgaaggtggagggtctctagttccacgcctctcccacctccctccgcacacaccccaccccagcctgctataggctgggcttccccttggggcggaactcactgcgatgggggtcaccaggtgaccagtgggagcccccaccccgagtcacaccagaaagctaggtcgtgggtcagctctgaggatgtatacccctggtgggagagggagacctagagatctggctgtggggcgggcatggggggtgaagggccactgggaccctcagccttgtttgtactgtatgccttcagcattgcctaggaacacgaagcacgatcagtccatcccagagggaccggagttatgacaagctttccaaatattttgctttatcagccgatatcaacacttgtatctggcctctgtgccccagcagtgccttgtgcaatgtgaatgtgcgcgtctctgctaaaccaccattttatttggtttttgttttgttttggttttgctcggatacttgccaaaatgagactctccgtcggcagctgggggaagggtctgagactccctttccttttggttttgggattacttttgatcctgggggaccaatgaggtgaggggggttctcctttgccctcagctttccccagcccctccggcctgggctgcccacaaggcttgtcccccagaggccctggctcctggtcgggaagggaggtggcctcccgccaacgcatcactggggctgggagcagg

SEQ ID NO: 8715 - DNA, 387 bp, Homo sapiens
agccagccagaaatcccagcgcacctgggggcctggccttgcaacctcttttcgtgatgggcagcctgctggtcagcactccagtagcgagagacggcacccagaatcagatcccagcttcggcatttgatcagaccaaacagtgctgtttcccggggaggaaacacttttttaattacccttttgcaggctcccacctttaatctgttttataccttgcttattaaatgagcgacttaaaatgattgaaaataatgctgttctttagtagcaactaaaatgtgtcttgctgtcatttatattccttttcccaggaaagaagcatttctgatactttctgtcaaaaatcaatatgcagaatggcatttgcaataaaaggtttcctaa

SEQ ID NO: 8716 - DNA, 114 bp, Homo sapiens
tctgaggacccctgcagatcagatattggccctcctgccttccttggggctccccgcgttcctggcctggctctgttcatcactacagagaccccaatgaacacctgcagctca

SEQ ID NO: 8717 - DNA, 960 bp, Homo sapiens
aagatacaggaaggcctattacaagtgtgtttgtctttagtgaactcatagtggtgacatacctttccttttgagtataactattgagggaaatattttggccagagagatgtcttagtatctgataatttatactaactagaaacagaattgtccctgtgaaatctttttatggcaggtaatcacttgtcatccaaagaattatattaaagattcacccagtttagagccttacactgtacctgagaataatcgaggggagagacctggtggttaacatgcatttaggtaaaatgtcaggaacaactttcctcttattaatactataaatccatctcaagcatattttaaaataatgagagatggaggaaacaatctagaagataaaagaaaaagatgtgcataacttgttttcagtttccctgtttatgacagtttgtcatttggcgggttgggggatggagcagggaataagacattgaaaaagtctcatcccctttgtgtgttttacatatatatatctctaagtccagagccaggagagttggaccattgagggcagctctgccaacatttagtaaaagtattcattgttccaaaactgtcatctctacccttgagggagtgtgtctttgtgagaaatataaaggcttgagtcatgaaatacttaacacatgtgcacatgtacacatgtacatttatatgcagtgaattgttactcgtggtagttaggttctgtgaattttctgtgcacactgaattagtgaatgctgaatgattgttgctaggggaaatacagcgttagcttctgtgagcctctgatccaaacatttttatcaaccagtcaacacataaccttcttctatgggtatttgtttgtttgtttgtttaaagacactttatcagtgtttcttgaataattataattattctttataataaaaatattttaattatagc

SEQ ID NO: 8718 - DNA, 1602 bp, Homo sapiens
gaatgctagctgtgttggaagctttctggagacaagttacattctcttactgtagagtttatcagcgttttttcactgctggggttgtgatagaagccatgtcagcaccacacactgcagctctccaaagagtgtgtccaccactccactgtgctcagggaaggcagacctctcctctctctttccaatccctaaagggaattaggagtagtctgaagccttgggaagatgtcattcccgccctgtatggctggtttagccatggacatgaccagcttttggctgtgaagacctgagcagggttttgccaacagcttgttctagagaaggtttccctttttctgggacattgttggtctcatgttatgcctgtgaaggatttgtccagccttcatgttactctacacaacaacttatctcctgtgtattgccctggttcatgtgatgataatggccttatgataaagccgcctttagtcttccatgttctgatcactgtgtggggtggttcaagagcagagttaagatctaccaaactgaaggggtctccagattatcttggaggggacaggaggatggcagagaaacaactgtcaatccagatttgacctcatttgcattgccaccaaggcctcctaggaaaaattgtaggaatttatgggtataatattgtggtctgaatggcgtgaatttttatcccgaggagggggcagttgtgacaacctccagtgcatgtgggaacagcatgaattgggtcccttattcccagggggtgccccatattccccaatactgtaaagcagatgctgtttagcacctgccaaggagccatatgccctgaagttcagcattaggcaggtatctcttaactgtaagacataccaggcccagctgggaccataatttgtacagaaacactggatgtgattaatagggagtaggcgagattatagcaaaccagcagaaatggaactctgctaaatgtgcatccgtgaatgctcccttgaatgtggctgtgcaggattcagggtttgcagaaattctcaggacctcagacctctgtcctatgactaatgttactggcagagcaaataatctaaaggttttggttttgtggattaccatctccgtgctgtgcatctgaaggccagtgctgtgctggcaggaaaatagggactgagaaaaagcagatcctatactatagggactgtagtatctatgacgtagccagccattctttgctcccaaggcaagaagaaagagatgacagagtcaatatagggttgccaaatcggattttctaaaatgagtaggaagttggatttttatgtgcaacagtttcttttaatgctttgttgatatgtgattgtcatgcaataattattcatatttggtaagttttgtacatatattatgtacactcagggaaccaataccataatcatgataatgaacgtatccatcacctgcaaagctacctcatgcccctttacattccctccttgccttccctaggaaaccgttgatttacattttttactttagatttgtttgccttttctagaattaacacaattggaatcataaagtatttatactctc

SEQ ID NO: 8719 - DNA, 680 bp, Homo sapiens
gaccaccaacgggactctgggcatggctggggcccctggacggccccttggctggctcctggccctacttggggtgatggcccgcctgtgagctgctgaccgtgggccacgttcatcagccacacgtctaggccttaagcccacttcttaaaggatctgcacccatggggggacatagagggtcccagcctactggacctcccgagctgcccttcaggtctaaagcaacatctggacatctcggctggggcagattccccatcaaaggcaacctggggggtgcaggctggtgcactgcatggagtcgaggtggaggtcacgtgcagagctccatgaggtcccggagcccccctctcaacccgctcctaccccgctggtccctctgaaagcaccgaggggttgatggcattcctttcccattctaaactccacgcagccaatcgctttcctggaggagcgccaacctcgaagacaactcagcactgggcgggttcccctctgctgcttgtgcgcatgcgtgcggccgcccagcaagctgtgccttttgcgcctcttgcgcgtgcgccggggcacagggagggacagcgggaggtgtcgcggggagcctggtgcccttctagatgggcgacggaggcaaggacaagacgagtccgagctcaataaatgcgctgtgcaccctc

SEQ ID NO: 8720 - DNA, 24 bp, Homo sapiens
agcgagcccccggtgcacaagcgg

SEQ ID NO: 8721 - DNA, 100 bp, Homo sapiens
ccatgacctccactggaagagggggctagcgtgagcgctgattctcaacctaccataactctttcctgcctcaggaactccaataaaacattttccatcc

SEQ ID NO: 8722 - DNA, 318 bp, Homo sapiens
gcaatttcttgcaaccaccaccgaggccccgaaaagcactggtcgtcagggagctcctccccttggcccccagcctgtgccagccctggcccggctgccacacctctgtttcctaggctggggacccagcttgtctctccttgtttcttcccactgcactgtggtgcttcagtggccaccagcctcgtcacatacaccagcatctttctgtacctcctccctttggtgacctgaagtcactgtgacagttctccaggaaggaggagcttcctacttttgagtttctctgtggaaataaaacatgaatcttgtttccct

SEQ ID NO: 8723 - DNA, 141 bp, Homo sapiens
actggcatccggccttgctgggagaataatgtcgccgttgtcacatcagctgacatgacctggaggggttgggggtgggggacaggtttctgaaatccctgaagggggttgtactgggatttgtgaataaacttgatacac

SEQ ID NO: 8724 - DNA, 422 bp, Homo sapiens
agggacgactgccttcaagcatccctgcaactgccacagcaggtgggggcagggctcgtgggaccctctggacagccaccaagatatctgagcaaccaagagtcccagccccaccagtatctgcttctgtagcccacggcaccccaaacttggagggacctgcccactcccctcccccattcccaaggttcgcacctcctggagcagcagcgcctgggcagtcctctgggctggcctcgggaaagccgccacctgtggtggcggtggggctctgacagggagtacagctgaccgcttctggagggtgtttctgttcttaggactccagtccaggctggacggctgcctgagggcccttcgttaaagacacgcttgtgtcctgggcgatggtaataaaaccagctcatgctgactgtgctgta

SEQ ID NO: 8725 - DNA, 30 bp, Homo sapiens
cacccaataaagaactttgctgactactaa

SEQ ID NO: 8726 - DNA, 69 bp, Homo sapiens
tctgttcagcatggagaccttcttctaccgcccctgtcttaataaagctgcgtgtttcacttcggcatc

SEQ ID NO: 8727 - DNA, 953 bp, Homo sapiens
gagggggctgggccgcgcccgcaccccgggagcctcctcaggctccctctattaaagccgatctgactccgcccagccagatgtcccgagtgcgccaaggactgtcctctcacccactcctggattctgccctgacctccatcctggacactgccttgataacatagacccttccactgacaccctcgctctcacaccccctccagctttccgaccccacaccgacaactccccggcttccagaccctaccagcactaccctaaccctcagccgacagtctcagccccaccgacccactttcttggcatatagccccacttaagacccctcctctacttccttctgagtcctctacaaagacatccgggtactacatttccatcccttccctattttgacaccaaattatggtgtagacagccctcccccaaccccaggccagtcaggcacaatccccccaccccccaaacgtcctggactgcacagacctcccactccagaccatccaggcctggttcccaagacccgatccttcccctgcaaccagacagtctacaactgccccctccagcccattttctgccgtgaaaccccagccagccacaccagactctggaaccctttttcgactgccccaactcttggacaccaggccaactagaacacccaacaccaaactgtacagactctcccaccccaacctccccagactctgcacggatgtcctaggccccctccccaactctaaccagaccccatccccctaagtccctttgtcttgacccccaagtcttcaaccagatatcctcggcaacccacctcccaccctcctcctcttctccttcaagacccaactgagcacccgctctgattccccacagcctttctccctgccaccactcccttagtctttcccaggcttactctcccaataaatgtgctagagctctgc

SEQ ID NO: 8728 - DNA, 48 bp, Homo sapiens
cacccctgagggggtcatgtggtcaataaaagtccttaggtgctgcct

SEQ ID NO: 8729 - DNA, 550 bp, Homo sapiens
gagccctctcaaccccattgtcctgcacctgcaggaatttacactccactggtctctctcattacagcctgggccgagctggttaggtgagctccataaaacccaaagggacttggtgtcaggagaggacatggagggggctgagtgacagagatggttcagctggtaccagagtagaaacaaggtgcatcctggggttggctttagaaactaaacttctccaaaaggacagggcagattgtaaacgtcgtctcaaaaatgaaatgctgccgggtgcggtgactcacgcctataatcccagcactttgggaggctgaggcgggtggatcacctgaggtcaggagttcgagaccagcctggccaacatggtaaaactccatttctactaaaaatataaaaaattagccaggagtagtggcgcatgcctgtagtcccagctacttgggaggctgatgcatgagaattgcttgaacccaggaggcggaggttgcagtgagctgagatcacgccactgcactccagcctgggcgacagagcgagattctgtctc

SEQ ID NO: 8730 - DNA, 318 bp, Homo sapiens
gactcaaacccagaccctggactgattttccagtccccaccgtcctgcgggacagccagcgtatgctaatgttgcaaacccatgataatgtatgtggaatatcctgccattggggttttacattaaaaccccagaatggctgcagaggggtgaacaggccccaatatttggggtgctgtgatacccctcttctacccacaaggagccctcttgatgatttctgtgaaatcgaggccccttgattgtttctgtgaaacaccctgcacccctagtcctttccccactgagatctttcgggttctctcccctaactcagct

SEQ ID NO: 8731 - DNA, 165 bp, Homo sapiens
gcccgaatcatgacagtcagcaacatgatacctggatccagccattcctgaagcccaccctgcacctcattccaactcctaccgcgatacagacccacagagtgccatccctgagagaccagaccgctccccaatactctcctaaaataaacatgaagcacaaaa

SEQ ID NO: 8732 - DNA, 434 bp, Homo sapiens
cctcggcctccgccccggcccaccacctcgctactgctggaaccgcgcagcctgctggtgctccgcggccccgcctacacgcgtcttctccacggcatcgccgccgcccgcgtagacgcgctggacgccgcctcctcgccgcccaatgcggcagcctgcccgtcggcgcggccgggagcctgcctggtgcgcggcacccgggtctcgctgaccatccgccgcgtgccccgcgtgctgcgcgccggcctcctgctgggcaagtgaccgccagggccgggacccctcggattcccaggttcctgcccctttggggctgctgtgactccgcgacctaggaaccgtgggcaaagggggctcccctgggttatttattttcccaataattttgtgtgagctacagaagaccccataccaaataaacaaaaaaatctttc

SEQ ID NO: 8733 - DNA, 1497 bp, Homo sapiens
aggccctggacacctgacaaagagacagagtccccactagcatctcctgacacccgaggagccctgagtcaccctgagatagagattcccagtaacacatccagagtagagacccctgttagccagccctcgatcattgaggccccattattaacagatactcccataataacccccaaatacagaccccatgtcacccagaaagagattccctgagtagcaccttcaggctagtccctatccccaacccctcagagcagattcccagattaacagatttccatatcaccccaaatgatggtgaccctctccacataatgcattacaacagaacattcttgaatcacccaaccctggatcagaaacctccccattaacaaacactgccccttaagtcctcttgaaataaacataggtcacacccccaaagcaaaagagtaacagacattcatgtcattgttccccatttaacatcagtcctctcaagatgtcgtgaccccatggtcaccctgaagcccttagattccaacccctcaatcagagacttccttcattaacaaagacccttgttcttatccctcaagaagaaacccaccataaccagcccactgtcacccctaatttacagacaccaaaacagtcctggaagtgctaattacaggaccccccaagtcttcctaccctctgcaccctcaagaaacccccagtgccttgtatgaagcccaccccacatggcccacagctcctgtgctggccagactcccagaaaattctctattttttaagtaacgacttccccctttgggggaccccaaaatttggaggccccattctaggactctggggatcccaaaccctagagtacacacgtcccaaactcccctgtgccctcaagtcctacagcccctagaagaccccaatgccgtaactcctaggacccccaaatcatggaatcccaaatccccagggaatcccaaatttgaaaatccaatcccaagtccccaggaaacccaatcatgaggtccttgtgcctggtatggaggagactgcagtcaggatatgcattccaggctcccagacacctcaagccctattcacaggcaccaggaaaccccacacaggaattcccatccctggaaactggagaatttcaatgccccgagtccatgggtttcaagacaccaaattccaagagccccagccctaagggaaccccaaatcctaaagcctccatctctaataaatggaaggccccaaggccctgaggggatctcaaatcctggaaccccgatttcaatctacgttctagtcactggcctcaaaggaccccacagcacctgggccagaccaacagctcgagggagaacctgaaggcccagggggtccagggcggacctggggccccgaccaccaaggacagctcacgactgccccttcactgcatgtccccaaactcagcatgactcctgtcctcttcaataaagacgtttctatggc

SEQ ID NO: 8734 - DNA, 455 bp, Homo sapiens
ggatcaagacagacaatgtcgagggacaaaagatagaagatggaggaggaaagacattatacgtgggcttggcccagccccaccgcccacgcctgggtagtagcagtgcctccctcaagggcctgggttctaccaccccactcctagggatctcttgaaccttaggggtgacctgggcccaagtctctcatcagcccccaatcccctgggtaccaggcttctgccacccccggctcagatctttgcaaatcagtacgacagcctcagagcagagcaagggttgtttgggagaatcatacctggttctaaggagtcccacgctttttgccaagcctggtactgagttcatgataccatggtggacacagctgagaaaatccctgccctcatggtgctcattctacttgagtagacgatgaactagtaaacaaataaacaagaacactgcagacatg

SEQ ID NO: 8735 - DNA, 45 bp, Homo sapiens
cctcctctctcccccgagtgtaataaacaccagattccatgcgtg

SEQ ID NO: 8736 - DNA, 60 bp, Homo sapiens
gaccaagaagcctggggggcctgagagacttgaacaagtgtcaataaacgctggcctctg

SEQ ID NO: 8737 - DNA, 180 bp, Homo sapiens
aaagccttgagtgtaagggataaagataagcctttatgtggagttcacatctggctcagtactaggtaatttttaatgtagtgtaattaatgtcagaaaacacctgtcacttccatcatagaacatcagaaaactcacacccaaagaaaattaaataaatgtgggaattctttttgcctc

SEQ ID NO: 8738 - DNA, 3964 bp, Homo sapiens
tagaagaaagccttcaaatgtatatgatgttacagaacatcagaaaattcatttttgagaaaatgtgtttcatgctcaattccaagcataataaattttatattagagaaagaatatgttgatttaaaagccttccaacaccatttaaacatggtttatcttcagcaaattcctatgagagaataatgtaatgaatgtaggaaaatctttagccttatctgtcattatctccctttctccacttgattaccagtttgatttattggacaagatactaagcttctgtgcctcattttgctgacttgtaaaatggtaataatagtacttatatgtattagttatttattgctgcgtaataaattaccacagacttagtagcataaaataacatataattatatcttataatttggatcaggagtataggcatgacttagttgggtcctctgcttcagggtctcttgcaaggctacagatttcagccagggctgaggtctcatctgaaggctcaactggggaaggatccacatccagactaacatagttgttacccaatgtatttccgtgaggcctgttgcattgagattctcagtttctagctggctgttggctgaacgctgactgcagctcctggccacaatagcctcatcaacatggctgcttgcttcatcaaggcatgcaagccaaaagggaggacagtctgctagcaagatggaagttaccatcttgtgtaatctaatcatggaagtaacattccctcaccttctactggtagaagtaagttactaggatagtccacactcaagagaacgggatgatacaagagtgtgaataagtcctggagacaggaccactggggggcctgtttagagtcagcctgccacactgtggaataggattgttgcaaggagtaagtagttaatacttggaggaatcacagtcatatagcatgtattctgtaaatattatctgtaattgttattattgtcattagtattagtgaattcacgtaaaaggaagatctgtagacataataaatgtagaaatgcctcctgtcacctctcagaaattattaaacataatttattctaggtaaaatttagattgtagtgaatgtaggaagttcttcagcacttgagctgcattagaaatttcatgccaaaaatgaatttcatgaatgtgaggtcactagtaatacagctgttgaagaattagagggaaataggaaatgattttcccataattccagaaagcaaaaggcttacaatccctgttgtctgaccacagtttaaaattaattagaaactatcaaaaatgtggcttaaaagaaattaaccacctaggaatttaatattgttgtgtatatttatgtgtgtgtataaaactcctgtgggaaagaaacaaaacatcattctataagtcagtatacttttggatgctcaaaatgccatatcttcaaccagtaggagttgtttcaagttgagtttttgatgtgatcccaccaataatttgatagtttacttgattgtggctgcataatttggtaacctatgaaagatgctagagcaccaatgtataatttttttgagacagggtgtcactttgtcccccaggctggagtgcagtggtacaagcacagttcactgtaccctgttcctcctgggctcaagtgattcttccacctaaattttttttttttttttagagaaagggtctcactatgttgcccaggctggtcttgaacttctgggctcaagtgatcctccctccttggcctccaaaggtgctggggttacaggtatgagccaccacacccagcccaactcattattcttgaaatcaataaatcagaggaaaaattgtcatttagtttccttttcccatgtgaaccaaatttcagggtcaccagaagttcatcaaattcaaatgaatttggcctggcacaggggtcacacctgtaatcccagcactttgggaggacaaggtgggtggatcacttgaggccaggagtttgagaccaacctggttaacatggtgaaaccctgtctgtactaaaaatacaaaatttagccaggcatggtggcacacacctgtagtcccaggctgaggtgggaggatcacttgaacccaagaggcagagtttgcagtgagctgagatcgtgccactgcactccagcctgggtgacagagtgagaccctgtctcaaaaaaaaaatttgttttttgaatgggtttttcttttttgaagaagtctaataaatctagaaggaattagaggattagaaaaatcaccattttctagaccttaatggaataatgggtccagaaaacatgatcttcaatgggtactacaactaataggtgaaatattttatagcgagatttttatggtggatctatcaaactggccacctctgaaccctttgatctgttttaaccttaataaaaatgggtctatcagacaacacacttcctgacgtaatgcaataggaagtccacaccaccatctacaaagccttattgctggaataatgaactgaaagcagacagggactagatgaacagtatatggtcatcccttggtatccatggggaattggttccaggatcctccactgatggtaaaatctgaggatgctcaagtcccttgtataaaatggcatagtatgtatttgcatattacctactcacatcttcctgtatactttaaattatctttagatcacttatacctatcacaatgtaaatactatgtaaatagttgttatactgtatttttcaatttgcattatttttattgtattttatttttattgtttttttttgagtattttctatttgagattggttgaatctgcacatatggagggctggctataaagggcaccacaaggaagaagccaaacagatccagaatgtgtgaaattctacagagcaaattacctgatttcttcaactaacaggtagcatgaaaatacaaggggaagggcaaccattaacagattaaaagagacttaaagagacatatcaactaaattcagtatgttggcattacttggacctggtttgaacaaaacataaaaagccattttggagacagtgagggaagtgtggacatggactaaatattaaatgatatttacatatattaatttggttagggattatgtcagtgtgattataaaaaataaaagatcgtatgatatgagatacatactatgaaatgaagatagacacatttggattaaaatattctagcaaaagaaataattggcaaagagagctggaaactaaattggcaacatgttgataatttaagtggagtgttttgttcatggagacttattgttctaatatttctacttttgtatgtgtttgaaatttcaataataaaatgtttaaaatcaaaaccaaaattatagactatgtagaaatgaatgacagtgagatgcctgcacatctaaccttgtcagatataatcaaagttctgttcagtgacaaattaatgccctgtaatgtggtaaggaaatcttatttgtggatacagtcttcatcttcttcacttacccacagcagcaacaccaggcctgtcacacagatgaatgtgttgagggaatgaataagtatttccgtcaagaaaaaggaaacaacaaaataaaaccaacccaagtaaagaacagccaagtggccaggtgcggtggctcatgcctgtaatcccagcactttgggaggccatggcaggtggatcacctgaggtcgggattttgagaccagcctgaccaacactgagaaaccccatctctattaaagatacaaaattagccaggcatggtggtgcatgcctgtaatcccagctacttgggaggctaaggcaggagaatcacttgaatccaggaggcggagtttgtggtgagttgagatcgcgccactgcactccagcctgggtaacagagcaagagtctgtc

SEQ ID NO: 8739 - DNA, 782 bp, Homo sapiens
gaaagtcttttcaacttctgtgttatagaacattctatgaatgtagtaattaatctattttgctccatacatgcaactgcgttggcattagaggttttataccattaaaagagtgtgacaatgtattgtagtccatcatcactcaaacctgaaacttcagcatatttgttctaaaaactaatcctgttataagaatgaaaaagacatttaccgtcatccctatcccatcactttgtgtcatactggacaagacgcttaactgctctgtgctataattttttaatttatgacatggtcatataagagtgcagcagtttgacacactttcaatcaagaggtggaatctacatccctctgttgtatacaggaatctacatccctctgtgactgcttcgcccagtagaatatggtagacgtactgctgtgctggtttcttgactcagactttactggtagggttacttcatctcatgaaatgacagaactgtcttgttacaaagtctggctactttgctgaagagaccacatgaagaggccctgaaactacgtagagagggagaggcacctgctgaaccctgtcttcttgacatccaccaagataccagacatttgagtgaaattttggatccaccagaccagccaccagctaaatgccagtgagcgacttggtaacctgaactgatgccatgtagaatggaagaattgaccagctgagcccctggcccaaatttctgacccacaaaaacatgagatataataaaatggttgttgttttaagccac

SEQ ID NO: 8740 - DNA, 1297 bp, Homo sapiens
tgaaacagaatatatgaaatgtgtagggaggcttttaattatggctcaaaacagaatttatcttgttaataattcctctagatagaataatgtagaaacattttatttgtggactacagcttattcagcctgggaaaaataatgttggagaaatactctatgaatagaatatactttggaagcccttaactaaacgcttacttctcttgacatcagataattcagtctagcaatatgatagataattcagtctgtcatactgaaaatgacagcacttttaacacctttctaaccttcttaacgtcagagaatttttgtagaaatgtagtcctgtgattgtcattttttcccctaatttctctaattgttacattcttagtattttaatccatattaaatttatatggctataaatttcatctgtttacatcctgatttgtatactattttaaaaatacctttagtacctgggagaagtgacctctttatttttgaagatggcttattctttttgttctttataacattaaggctttcttattgtaaaaatgttcatgaacgacattttactcaatagagattcttcattatcttcatggtgttttgttgtgttactgtaatatcacttatgaaatcctattggtggatatcgtagtctcctctagatattttgccataatacatgccaaaatacaagtccctgctggacattctccctaagcacatctttgtatcatatcttttaattgcagaagtaatgtgtgaatatattttccttataaaagatgcaaacattacaaaaaggcaaatgtaccctttgaccatatcccaaaggatagtctttatcagttcattatttattgctgatcatttttctgttcatatatacatgcgtgtctcagtaaaaattataaaatgggggataattataatacctacctcataatgctttgtgaggattaaatgaattaagatcgataaagtgcttagaattgtgcctgacatgataaatacatactcactgaatgttagtcatcgttattatattcatcatcatcagtattattatttgtagaaaggctttttaacttctgcagaacttagtcaccattaggcagggtgtttgactgaagaaagaccctttgaaggtaacaagttaagaaaatttcccatcatcatgtacttactattgaacatgaaataatcctaggtgttgggggggaaagtactgtgaataatgtgtgtgaaggactttattccgactaatactctttttgtcgcattatatacccagtaa

SEQ ID NO: 8741 - DNA, 3308 bp, Homo sapiens
agttctctatgaatgccttggatttagcaaaacgttcagcagattttacacttaatagtgtattggaaaattcattttacattaaagtgacatgaatgtgggaagtccttcagcagcaattcaaaacttaaatactatgatgtttaataagtattatagtgtaaagaaaacccgtacccccaaaactcccacaacaagcattatcaatgctgtacttctaggagtatactcattaaagttaggatctagtcatggacactacttaatgtgttcctggaaggcctacagatgcattaagaaatagatatgagatgtatgaggatttgaaattaagagacaaaattatcatttttgtgatgttttgctacatatatgaattgtaaaactagaatcatcaaaattatttgttgttgaagcagtcataaaactgagactgagacagaatattgaattcagaaatgtgtgcatgaatatatggggaattggtaattgatagaggcggtatcccagattggtggggaaatcatggattacttaaaaattaattgactcttcatatggaaaaataatatctcccatcataatataaaatatttttcttatgaattcttaaagtactaaagactaaaatgcaaaaagcaatacttaataatataacagttttataagaagatgtttttaaaaccttagggcaggaaagaacttctaaaacattccagaatacccggtagttccactcttgagtatggtagtcccctattttctgcaagagatggactctaagacccccagtggatacctaaaacccagataggaccaaactctatgtctatgtttttttcttatatatacatacctatgataaaatttagtttacagattagacacagcaagagatttaaaacaataataaacataatatggaacaattataacaatatactgtaatcataaaagttatgtgaatatgatctttctctcagaataccttattgtactgttctcaactatttatgaactgtggtgactacaggtaactgaaaccatggaaagcaaagctgtggataagggggaactactatatatatgcatctacccaagaaacatgaacacagggagtcatgtactggtctatagctgtatagttcattgcaccatgagttatagtagccagaagttgggaaacaaatgctgtctcttgtgaaatagatgaataaaatgtgatagtaacatagtagagtactctctagcagttaagtgacaaattaagtctatatattaacagaaatatttttaaaaaattagagtgaagaaaaatgatgaacatattgtaatgatgcttctgtgaatttgaataaaatcaacactaaccagccctagtactaagaattggttatggataaattatgtaaaactaaagaatggattgaaaggatatgtatatactcagttcccaaaagtggagtggttacctctaggaagaaaggaggtggaagggaaatgttaccaagcatggtagttaaaggatacttcaattttgtatctatttcttattaaaaagaaacattctaagtaaacataacgaaatattaattctgggtggtggtaatatttgtgttcattctatcattcgtgctatttatttccttaaacttctgaaagttaaaaagtccagataggagtgaggaagctgtacatgaaacataatggacttacattcctagtcagatactaatattctgtagaagatatttctaaaatcttatctttaaaatatgaaataatttttaattggggtggcaacttaaattcaattaaaataactcatgtgtcacaagagtaaattttacataatctgtacgtagttctaatctgtatatagtcttggaggttatgatttgccacagattggttggatcacatacatttaaggatcatattattaaataatatatgcacagacatggagagaattagtttttactaaaacatttatcagaaattttaatactctgcataaccagtattagcattagaaattagccacttttaaaatgagaaaactgtgtcactcttcaatttttttataagccattgaggaaaacattaactcctggatttcagcttcacttttaacctgcagactaaatttctttctcaattatgtcagacacacccaagtcaatcccaacccccttgttaccttgggaagaccgtgctgaaaaaggagatcttccacctaaacagtgttctcttatttgaagcaaatctttttgagaatttgtttacttgatttctttccacaataaactgacagagaacgctactaatgatttttttttttttttgagacggagttttgttcttgttgcccaggctgcagtgcaatggcacaatcttggctcactgcaacctctgcctcacaggttcaagtggttctcctgcctcagcctcttgagtagctgggattacaggcatgcgccaccatgcccggctaattttgtatttttagtagagacggagttgcaccatgttggccaggctggtcttgaattcctgacctcaggtgatccacctgcttcggcctcccaaagtgctaggattacaggtgtgagccaccacgcctggctaattttgtatttttagtagagatggggtttctccaaaggctggtcttgaactcccgacctcaggtgatccgcccaccttggcctcccgaagtgctgggattacaggcgtgagccaccgtgcccggcctgatgtttttgaatgattatgaaaatgggtatacagcattaaaaccttagactgattttaaatatattaatttcttttaaactcaatataatgttaatattactgtagcacttactagcatttctgaaggttggtcttgagataagattgaaaatgacagttgttgattttctgaggtaatatacccaaataaaatatatgtatgtgtacatgaatctaaactgtcttcttctgttcctcattttgctttacttaaataatctttcatattttttaagtgttttgcccatgtgcttgggtagccttgaagtcaccagaataactaggactcaaattcagaccaaaccaggactagctttttgtgccatgagttagccatggtcctggacccagcaaaaagaatgattatgatggtcagagtaagatgagcaattgcaacataatattctctaatattgtatactgtaaatttattcagctgccctcgtttactcacagtttgcttatttgccaccataagaaatggtacaataaaaattcatgtaatcacc

SEQ ID NO: 8742 - DNA, 2476 bp, Homo sapiens
aataaatgtataaagtggttttttatttctgattttcacaggaaaatactgtggatggatttaataggtaatcaaggcaattcagtatctccctctcttaaagtctgtttttagacttcatggtcattctgtatgtagacgtagaattgcttagtcatagctgatatatacttatagctttgttagatgttgccaaatatttctcctttttatgttaaaaagtttttttcatgagtttctcatcctggcatgttttgtttacaatagcttttgatgtttgtattattgctcttttgactattcagttttttaattgtaatattacttcaatatcttttctgcattgtaattctttgcttgtgatatctatacttacttattttcctccacagagttagcactcctagtcagatacaatgtatttttacagtcttacagctcatcattttgtgtaatgttgttttgttttgttttaaatgatagaagtgtgatctcctttccattttcatccaattgttgacttctctttaaatttctactttattttgatacaacatattccccccaaaaaaacacatacataggaactggttatattccaccataacacacacacacacacacacacactatatacatatagtgtatatacacatatagtgtatatagtgtatgtgtgatgtatactatacatatcacatatactatatgtgtgtatatagtgtgtgatgtatatgtgtgtgatgtatactatatatgcccacacatgcactacataacacactatatatatatatatatatacacacacacacacacaatatatgtatatatagtatatacactatatactgggcactatatatatatagtgtgtatgtgtgttatattggaatataaccagttcctttaagcagtctttttacctgcaggctataccaaccaggatccaaatgaagagaactcttttaaatatttgataaaactactcacccagtaagtctcttaaaatttatcattctcttaaagtatcactctaaaatttgtcaaacacctttaaaaggggagaaaaaatgaccactgaacttacattaagagaatttacaactatatattaacatggcttcaattgtttttttaatctattatcattatttttctttttattccctctcagagttgacttactaggtttgggcatttcaacaatcagcagaccttctttggtttaactaatctcatttaactccaaaatcatctctctcttaggactgctgacttggttatgcagtcaatgagatcacgagccactggttattggattttttttctttttttttagacagagttttgctcttgttgcctaggctggagtgcagtggcgcagtcttggctcacctcaacctctgcctcccaggttcaggctattctcctgctcagcctcctgattagctgggattacaggcatgcgccaccatgaccggctaattttatatttttagtagagacgggatatctccgtgttggtcagtctggtctcaaactcccgacctcaggtgatccacccgcctcagcctcccaaagtgctgggattacaggcatgagccaccgcacccagcctggttattggatttatttatttattttgagatagagccttgctctgtcaccaggccggagtgcagtggtgtcatctcagatcactgcaacctccacctcccaggttcaagcgattcccctgcctcagcctgccaagtagctgggattacaggcatgcgccaccatgcccagctaattgtattttagtagatatggagtttcaccacgttggccaagacagtctcgatttcctgaccttgtgatccccctgcctcggcctcccaaagtgctgggattacaggcatgagccaccacgcctgtccggttatttgatttttataagaaaattttactattattttcagataaatttatgtcactgtcattcattacattttaatttttgaaactgatgtctttcccagaatttatgtactctataacggtgtgaatgattaccagtattaagccattttctcatctgatatattgagctatgttttatgtaagtattgcttattcaagtagttttaaaagatatgtaattggttgttgtttcatgtcctacacagtaagaacaagagtatgttaacctttttgtcaggatatttgctatttcatatctttgaaatagagtagtagctctatttctaactaaattctatttatgtaacaacacagctaatttactcttggatctcattctccctttttatcctgagttaccatcagtgctaatgttcctcttttgggtatagttctccaggagaacttgtcctatatttctttgtgtgtgtttttttccttccagcttaaacaaattaaaactaaatatctaaaccttgtatacagacattaaaattagtgagagaaacaa

SEQ ID NO: 8743 - DNA, 1004 bp, Homo sapiens
aatattatataaaagtgtaggaagggctttattcatgactcattaattgatgtcatttatttttttctcttgaggaacaccacaaatgtaagtaatattggaaggcattttaacagagcacacatccagcagcagcagcagcagcagcagcagagaattcatcatgcaatcaatataggaaagaaattactgatcagttatcaattgcagaatatcagggtaaaattttatgagatagcatgaattctttttgaatcattctcaaaacattctcatcagagatgttgcataaagaatttatatataatttggccaagcatggtggctcacacctgttatcctagcactttgggaaacagaggtgggtggatcacctgaggtcaggggttcgagaccagcctgaccaacatggtgaaaccctgtctctactaaatatacaaaaattagccgggcgtggtagcacacgcctgtagtcccagctactcgggaggccgaggcatgagaattccttgaacctgggaggtggaggttgcagtgagccaagatcacatcactgcactccagcctgggtgatagaacaagactccatctcaaaaacaaaaacccacaagaatttatatataattcattttggaaatctttcatcattagcaaaattctgttgtatttccacaaaaatcatgtaattaatctagaaaagccttgaactatgtcatacaatttatttggcatgtcttgtttcaatacatcctgcctctattttttttttttggaaagtatcttaaatctatgtctgtttaatcgtattcattagattataagggttgaatgatttgagatttacatgacttagtgactgtcatttgtattggtattaagccattttatgagaggaggacttttaagactataatgattatagacaaatatgtcatctctatttatgtcttactgaacatcagaatgttaattctgaaaaaaaatcagtaaaatacaatgaagaa

SEQ ID NO: 8744 - DNA, 1271 bp, Homo sapiens
aatttgttgatggaaatatacattgtctttgttttatttaaggaaaaagttggtaagccaccagtttcattagtatttatttatttaaataatccttgaaaatcaaatgtttttaagtgagaaagtggataactaaagtgtaaattttggtctcattttaatgctgtttctgagttattgtattaaccattattgagaataaatttttttattgagaataaattttctaaaattacatgtttcactgaaaccagtgaaatatttcactgaaacagtgaaataaaatgaaaacaatttcctcccttccctcaaatctctgagataaccagtatgtgtatttcttcttcctttatgctcaaacaacctgtacacagaaagcattttttgcatgtgtttggaggagcttttacccccatacagacatttgacagcgtcttgtccttttcataataatcatgaatacttttccaggtcagtacgtaaagatgtaacccattctttgtaaggttcagaatatttctagaatggaatgtatgtccgtattttgggccattacctactacagacattgaagttgtttctaatgttcacctagaactctaattttaccttcttttgtttctattgtgcagattcccaacagtgggattaaagagtatctggcgtatatattttgacattacatttattttttaaaatcttctaaattttttgtttaataaaagcacacattataaaaattcaaaaattaccaaaaatgtgaaaattaattctcccctaacatccagttctgtagccactcactttccacagatgcaacaactgctatcagtttccttttattctaacgggaatatttcatgtaaatttcataaattctttggacaaaagtaggttattcataatatgtgatttattacacattctcattattagtccacatttggcctacttcattttttttttttttgagacacacccaggctggagtccagtggtgcaatcttggctcactgcaacctccgccacccaggttaaaaattctcctgcctcagcctcctgagtagctgggactacaggcatgcgcagccactatgcccggccaataagctatatttattcttatttgatgtggatgaaaattatcaaaattggccaggcttggtggctcatgcctgtaatcccagcactttgggaggccgaggcgggcggatcacgaggtcaggagatcgagaccatcctggctaacatggtgaaaccccgtctctact

SEQ ID NO: 8745 - DNA, 141 bp, Homo sapiens
atgacagtaaagtaagaccattttgttaacctttataataatttttttaaaacaggtaaggagaacaaattaggatacatattatcaaaggttctcctatgtattcgtttttaaacgatacgataacaaagtaccaagtac

SEQ ID NO: 8746 - DNA, 1490 bp, Homo sapiens
gagaaacagtgtgagaaaacccccctgagggttgggtctgattgtacactgttgcacgcatgcagcagaaaaatatgtatattattgtaaatagaaatgaccacagcagaatgtcacacatggctgttctggagagggcctctgagaaggcactgaatgaggcgagggacccttcctacattgtcaccatccccagtaaaccttgggtcattattcatactgacaaggaaccgagtcaatttggtgaataggaaaagccttctcatgaaaactacaatagaatactgttaccaaattcttcctaagaaagatcgtattaagttaacgataatcctgtttactgtggattaggtatagtgccaacaaattgaatgataaaacaacataatacgtagttattttgatagtgatgaatcctaagttatgtgagttgttcgttgtggaacacattgtgtaacagactcctgggtgtttttctttctcattcgaatctaccacagttggtcatatccaaccctcattcagtatttctatcaagaaagagatgctacaaaaaaaaaaagaaaaaacctttatgtatacagacgtaaacctcagaatgtatgttgagtccccactgtcatctaccaagacttgcacccccctcattatctaccatgactgtctctcagcctcacgggccctcagcactttgtgttttgacccccagcaccgtgtcttgtgaactcccatcaccttcaagaaagcttccgaggtaagaattttatggtcatctgggacaacttaaatctcccttctgctgtcatagttcttccaactcagttgcctttttttttttttcgtactcatcactgacttgaagcttagtatctggcttccttaaggatgtaactttcatgtaacagattaataacttatatgaaaaccaacacaaccatatgtttagggctggaaagggccatgacgcctggccatttttcctgttttaccttactcttatgtgtgtcacacttcatcaattccggaaacagtttctggagatctcctcattacctcttttacaatcacctcactccagcatggtgtctgttacctcttcccacttgtgacaatgtctagtaaggtccactctccattctgtgtgatgaccacttattacaaccctcagaataggggacagtggtgtgccccctgcaatacaatggtttctatctcctgatacttttattacacctctagcaggatgtcttgtgatcctccttattgatttttccctcacgatgatgaacaattatctcccgttactcacctagcagtatctaactgtccctaacacagcatgtgggaatgccctcaatacggtggatgctgttaactttcttccttcccctcaggcaatggcggtgacttacaatgaaccataatgtccacatttcccaactgtattttggagcctcttctgtccccttctttctaggaccccagttaaa

SEQ ID NO: 8747 - DNA, 405 bp, Homo sapiens
gagaaacagtgtgagaaaacccccctgagggttgggtctgattgtacactgttgcacgcatgcagcagaaaaatatgtatattattgtaaatagaaatgaccacatcagaatgtcacacatggctgttctggagagggcctctgagaaggcactgaatgaggcgagggacccttcctacattgtcaccatccccagtaaaccttgggtcattattcatactgacaaggaaccgagtcaatttggtgaataggaaaagccttctcatgaaaactacaatagaatactgttaccaaattcttcataagaaagatcatattatgggaatgataatcctgtttactgtggattaggtatagtgccaacagtttgaatggtaagacaacataatatatatgatagtgatg

SEQ ID NO: 8748 - DNA, 1437 bp, Homo sapiens
aaaccctatgaatattgtgaatatggcaaggccatctgaaggaattaacacctcattgcacattacatgatcacttccagagtagaaaactatgaatgtgggatagccttctgaaaaagccacaaatttatgaaacattagagaattcttccaaggtgacaaattatataatgaaaaagctgttaccagaaactttcagcagacatcttattgataatatttaatcagcattctcattgaaatctgaaacaaggtatcttccatcagcataacaacacaacacttgagctcctagccaatgtattaagtaaggaaaacaagtatcaacgaagaactataaaaataacttttatacaagaaataattagaaaatgtgttgatagaaaacctaagaataaacacaacaatgagttaggtctttatcaagttataaaatatgttgaaaggcacaaaagaacacctgaaaaatgatattttgtctgaaaagacttgacattgtaaaaatataatttctctcccaaatcactaagtttaatatacttctgaagtttacatcagttttattttaaggaacttcacaaacttatccaaaaattttatgtggaaaagtaaagaaacacaaatagctgaaacaaacttgacaaagcaagtagagaagacacactctattattagatatatcatgtacttatttaaagctgctgtcatttaaacaatgtattaccaagtgaataaatcaagcagtagtaagatagtgagcattcatacaaaaatccaagaagatacaggaattctgtgtatgacagtgctattgaaatcactggggaatgaatggcttatttaataaatggaaggttcataggagaaaaattttagctttctactttatatcatatacaaaaataaaatccaactaaagaccagaatataaaaagcaaaattttaaaactatgatgaaagtagaatccgttactttagggtaacaagatttctttaaaaaacatgtaaacatggaatagtctgttgaattttggtgtattggcctcacaggcacccacaaatgtacacaaagagatatatatcactgtgttcctgaatcatggtttgtattgcccaaaattggatataacaaatttttatcaattgtggaatagatgaataagtgtgatcatttctgtgataaaatacagaatttagaaacaaaatctacctatagttatatggatagattacaatatataatattgagagaaaaaattaaaatgcacaaaggaacacagtataacatttgtataatttaataagatcttgcaaagaacagtactgtgtattggtcatggatccatatatgacttggttgccttttgggatgtgggaaaggtttggtgggagttgttatatttatctgtaatatttctttaataaaagagtgaaagc

SEQ ID NO: 8749 - DNA, 344 bp, Homo sapiens
gaaagccttgaatgtgattaaatttaagaaaatcttcatctatttcatatctataatgaatgtagaacatcttgcttctgctcagaatctgctcattcttagaaggcctacattaacatggatgcagaataatttcagaaaccccttaaataattccttaacatctctataaacgctagaatataatgctgaattatatcctttattaagcatcatctccatttcaccatatcctaactgaaatcctatatatttcttgtgtgttcttttctatttgtaaaatactgtaattgtattacaatgactaaattataattaaatacatataattccctttcgatagc

SEQ ID NO: 8750 - DNA, 2493 bp, Homo sapiens
taattattagaactcttcctttgcgaattttatgttgagcataggaagtacattctagaggaaaggtttttgaacgtgggaatcccttttgcttcatgctcacaactaagcataggaagttttatttaaaggaaagaatatgttaatgaacatatagaagcctttcatcacctttgaaaccatgttaaactttaggaaattcatcctagaaaagaactttattacaggactgaatgtggaaaagcttttgatcttacctattattatctccatattcttccatctgtgtatatacacacgaaggttgctagggaaccacttcattctgaaaatgtgtaaatgaaaggaaagtcatttagtctgcatttcctgtaggaactgtatttcagggcaaccagaagttaaggaggtaaagttcttctttattagaaaattccaggctaatgaatgcagaaagaataatagaaaattatattagaaaaactattgtgtaacacataatgaaataatggatctaggcatgattctctgtacaggttgacaccattcagtgaaggttgtgaactttatagtgaatagatgagactgacaacgtctgaacccactcatcatctcaacttcacaaaaagcaagagagtaaaaattacgtgcctcctaatgtgctacagtaagatatacacatcttgccaaaaatattgaacctgaatttaagcctcaagagccaactcccagtttagagaaaattcaaggaatggaagagtaaattacatgacacaaaaaggagcaattaaatctaaaataagggtaattctacaagaggaatcacctggtttcccaaccaataaaatggcattttaagaaataaggtggaactcctaggtattgacagacttgagacatcagtcaaatgcaatgaaacagtggtttttacttagatcatgagttgaacaaacatgtaaaagaagagatacttaacaataattgggagaatggaatattgacaatattagataatattaagaaactttgttatgtgtgataatagcattgtggttatgtaaaagtgtatttgttagagataatttctgaagtctatacacaggagatgatatatctggaatgtccttttgttcatacaaaagaaaaatgaggatgaataacaagtttggcaaaatgatggtaacctaagtcttggatacatggtttttatttgttttgtttttgctattctacttttgtgtatttaaaattttccatgatgttcttttaaagatcaaattatccatgaaattatagccagtttaaaatgaattattttaaaaaaaatttctggctgggcccggtggctcatgcctgtaatcccagcactttgggaggccggtgggcagatcatgaggtcaggagttcgagaccagcctgaccatcatggtgaaacctcatctccactaaaaatacaaaaattagccaggcgtggtcacatgcgcctgtaatcccagctactcgggcagctgagacaggagaatcacttgaacccaggaggcagaggttgcagtgagccgagatcacgccattgcactccagcctgggcaacaagagcaaaactctatctcaaagaaaaaaagaaaatttctacatattaaaacttgtggatgttgccaaagctctacacattgggattggaatattaattacactataatgacgataatgtattcaggaagttaaaatgtaggtccacattttatttagttgacctctctatctctatattatagtacccatggtatgcaccttttttttttttttttttgagacggagtctcgctctttcgcccaggctggcgtgcagtggcacagtctcggctcactgcaagctctgcctcccgggttcaagccattctcctccctcagacttccgagtggctgggattacaggcgcccgccaccacaccaggttgatttttgtatttttagtagagatggggtttcaccatgttggccaagctggtctcaactcctgacctcaggtgatccacctgccttggcctcccaaggtgctgggattacaggcgtgagccaccatgcccgactctcacttcatatgtttaaagaatgagtaaaagaaagcaattactactgctaaatgtgggaaataatggactagacctgtactaatatatggtagtcactagcaacctgttgagcacttgaaattgagttattgagcactgaaatgtggctagtccaaattcaaatggtgtttttttgtaaaacacaagattctgaagacttagttattttaaaaaagttaagtatctcaatttttcatattgagtacatattgaaataatattttagatatattggttcaaataaaatacattaaaatgaataacacttttttgtttttaaaattgttataggaaaatttatatatgtagctcacgtatttctattgtcagcgctggcataaacaataaaaagtagacttgg

SEQ ID NO: 8751 - DNA, 1416 bp, Homo sapiens
tgagacatcagagaattcacagtggggagaaaccctatgaatgtaatgaatgtgggaatgccttcatttgtttttttgattttaatagacatcagagaattcacaaaggagagaaaccctatcagtgtaaagaatgtgggaaggtttttaataattatccaactcttactcaacatcaaagaattcataccagtgtgaaaccctatgaatgtaaggaatgtgtaaagacctttacttggctttcaaacttgaataaacatcagacaattcacactggtgacaaaccctatgaatgtaaagattgtaaaaaagcttttctttgttattcaacatttattcaacactatagaactcatactaatgagaaacctatgaatgtcaggaatgcagcaaggcctttaagcagagagcccatcttagtcaacatcaaaatattcatactggtgagaaaccctatgagtttaaggaatgtgggaaggcctttgcttgtttcctaccttaatagaaatcagagaattcacactagtgagaaaccgtatcagtgtaaaaaatgtagaaaatcctttattgattgttcaactcttaacaccagagaattcacactggtgagaaaccctttgaatgtcaggaatgtaggaaggcctttaggcagagggcgcatcttactcaacatcaaagaattcctactggtgagaaaccctatgaatgtaatgaatgtgagaaggcctcttcttgtctttcataggtgaaaaagcaccagagaatacatacatgaagggacaaatcttatgtatttgaatagcgtctttttatttaacaatccttatctaacatcaccaaattcacattgcagagaaacttcagaaatataagaaatgtgggaaacacttttacctgtccctcagctatactttttcataacagaatttgtacaggtgagaagcctaatgaaagcccgatatgtgtaaagatctactctcacaatatactcaacattatataatgtatagtgtgattaatataggaaatccttgattttgaaattatcaattatggaatagcaaacaatttgtaagtgaagaaaatccagtgactgtaaatttttttacctcataattcacaatttattaagcatcagaatttatatggaaaaaatagaatatcaattattaataaaaacattaccactaaaattttatttgacttatagagaatagcatatagagaataatcatgttgactttgtgaatgtagaaaagcttttatctattacacgaatctttttcagcatcattatactttcaccagtttccacgtctgttttattaccaagtaatttaaactgtatacttcagattacaaatttcttacattgtgataaggttattgtgaagattaaatgagtttatccaaaga

SEQ ID NO: 8752 - DNA, 1665 bp, Homo sapiens
tagagaaattgtggcatatacaggtagtaaagaaagcacattgtgtcaatggatttatcccactgaacaatttgaatgaagacaatgtggaatggctttgagatacagttcagtttttattaggcatcaatttgtattggtgtgaacttttcaaaatgtaaatcatatatgcagtttctttggtatgacctgtgttaactcagattcagagaatttataatgtatttttttaataacataagaaaacttttctgatattcctctagttttggattgccaaaatattcacagtagaggaaaactgagaaaacgtaggaaaccattctttatacttgcatgtaaacatcttccagcaacaatcatttattgttaaacctggaaaaagccattacacaggaaacctctgttgatataagcgatgatgggaaaggctatttagccactctgcatatttaatgctcatgatcaacatctgcttcctatagctgggatgatatgggggaagatatttatcccttctggggatcatatataaatgatgatagtagtacctacagtatagtgctgttagaattacatgagttagatgtggaggtcagagtggaagcaggtgtgagagggtcccgcagaagaaaacatggctgccaaagtgtttgagtccatcggcaagtttggcctggccttagctgttgcaggaggcatggtgaactctgccttatgtaatgtggatgctgggcacagagctgccatctttgaccaattccgtggagtacagaacattgtggtaggggaagggactcactttctcatcccatgtgtacaaaaaccaattatctttgactgctgttctcaaccacgtagtgcgccagtcatcactggtagcaaagatttacagaatgtcaacatcacactgtgcatcctcttccggcccatcactagccagcttcctcgcatcttcaccagcattggagaggactacgatgagtgtgtgctgccgttcattaccacggagatcctcaagtcactggtggctcgctttgatgctggagaactaatcacccagagggagctggtctccagccaggtgagcaacaaccttatggagtgagcagccacctttgggctcattctggacgacgtgtctttgacacatctgaccttcttgaaggagttaacagacaggtggccccccaggaagcagagagcgccagatttgtggtggaaaaggcggccatcatctctgctgagggtgactccaaggcagctgagctgatcgccaactcactggccactgcaggggacggccagagcgagctgtgcaagctggaagctgcagaagacattgcataccagctctcatgctctcggaacatcacctgcctgccggcagggcagtccgtgctcctccagctgccctagtgaggccccagcctacctgcacctccgtgaggcaactgggccacagccccgatgattcgtaacaccacctttcgccctcaccccagaaatcactgaaatttcatgattggcttaaagtgaaggaagtaaaggtaaaatcacttcagatctctaaaaaacaaagaattacatgagttagtacatgaaaaaattatgggaaactacatgaaatatactgttacgttcaataaacattagcttctgtat

SEQ ID NO: 8753 - DNA, 190 bp, Homo sapiens
gaccgtaaagagtacgagcgcgccattcatcatcagacagcccacactggtgagaaatgatggaatgttagtcttataggtatggctttagcaattgagagagttcaaaatgcagatcttgccacattagaaagcattcaatgtcagtcctgttttaatggaatatctgactattcaatggtaaattaag

SEQ ID NO: 8754 - DNA, 346 bp, Homo sapiens
gccggctcggctcgccgcgactctggggtggtgctcgcctacctgcctctccgagctcctcaattctcccccaccctgaacatcccgcagggggagggggagagggggaagccgagagggggctgggccaccccctcccctctgtgcaagtggaatgtctgccctgtgggtgggtgggcccggccagggcctctccctccctccctccctctctgtcccttggcaaatggacaccaggggcttctcccctcaaagccataccccgcctctgggcgggcatggggggtggtgggtgccagccaggggcatggacagagcctttttctaaagaaaaagacaaaaagtt

SEQ ID NO: 8755 - DNA, 79 bp, Homo sapiens
ccctcttgcactctccctgccccccggacgccgcccagcttgcttgtgtataagttgtatttaatggttctgtaacaat

SEQ ID NO: 8756 - DNA, 891 bp, Homo sapiens
actttgtggggactgagcttgggatctcccccgtggcccgcccccacaccgggcttctgggaggtgggctccagggctgtggagagaagttgggtggttggtgcaggcagcttctgggcttgagtccggccccctgcacctccagtccacactccccaggagctcacctgctcccaggtcgaactccatggcggtaagagaagttgggtcctaaggccaagggcgcctgggccctgcagaggagcggagcagggggaggagcgctgagacctgcccgttggaggaatgctgagacgccccacccaacctctgtcctggtcctcagccctgactcattgcccggcaccacccaggatttcctctgtgagaagtgggggagatggacaggtgactgcttccgccagccttggtgcctcaggggaggccgactgaggggggctctgtggatggcattcggggagctacaggtttcccccaaaagctcagatgctcgttcttgaagagggaggtgctgcccctgccttcctgcgtaccgcgacaatacagcttcctccgcggcgctttaacacgcagggcgctgctgccaggggcgtcccgtgttctaactcgctcccacagcccctccggcttggtgagcagcgtctgaggggtgaggggcatagacttggagccagcctgctgcactagatgccagctgtgtcacttagcagcaaggtgacctcagcaaagttgttttacctctgtgcctcagtttcctcatctgtaaataacagctacccatgggattgatgtgaaagtcagaggagttaatttcctagaatggtgtctggcatgaagtactgataatgtgttggttttttaaaaaataaaaggtaggtgttttaggccagt

SEQ ID NO: 8757 - DNA, 248 bp, Homo sapiens
gcgcgcccgctgaacctcccgctgctgctgctgctgctgggggccactgtggccgccgaactcatctcctgcctgcaggccccaaggtccaccctgtctggccacaggcaccgcctccatcccatgtcccgcccagccccgcccccaacccaaggtgctgagagatctccagctgcacaggccaccgccccagggcgtggccgctgttacagaaacaataaaccctgatgggcatggcgtggacagcc

SEQ ID NO: 8758 - DNA, 60 bp, Homo sapiens
gtgtagtcggctcaacaccctccaccttcccctccatgccaataaaataaccaatccaga

SEQ ID NO: 8759 - DNA, 982 bp, Homo sapiens
acatctcttggtctcctctcttcctcactcccttcccccagtcagtcctgagtcctgccgtcagactctggcagggctcccagaggtaggcctccagaggcatccgccttcccatccacactgcctttagtggtacgtccgtcatctttttccctggaagtgactttcctcttttgcatcctggtggatgctaatcctgctccctttccctgcacttagtatctgtgcggctgtgtgttggatacatttagactcaggcctcattctaccaactccctacatctccatttctttttttttttgagacagagtcttgctctgtcacccaggctggagtgcaatgatgcaatctcagctcactgcaacttccgcctcctgggttcaagtgattcttctgcctcagcctcccaagtagctgggattacaggcacgcgccaccatgcccggctaatttttgtatttttagtagagacggggtttccccatgttggccaagatggtctcaaactcctgacctcatgatccaccagcctcagcctcccaaagtgctgggaatacaggcgtgagccaccacgcccagctcctgtttttctgcatagaatgtgctccctctgacagcctatactttttccctctttatctcgttgaacgtctgtctttcctcaacaggagcatcaactccaggagaacagggatttctatcaatgtcattcactgctgcatccccagtgcctagaacagggctggcaggtggtaggcgcctgacagatgcttgtctgatgcctgaatgtctccttacccatgcccacggcacaggatagatgtgctatagggcaaagaactttgagggtcgagcagcaggggcccattcagtcccagggagcagagacccccccaaccccttcacaaaccccaacacccctgacttggcccccacagagagaggtcctacagctgtcataaattaaatttattctctgga

SEQ ID NO: 8760 - DNA, 169 bp, Homo sapiens
tggtggagacacgcccagtggatgatcctactgctcccagcaacctctacatccaggaatgagtccctaggggggtgtcaggaactagtccttgcaccccctcccccatagacacactagtggtcatggcatgtcctcatctcccaataaacatgactttagcctctgc

SEQ ID NO: 8761 - DNA, 660 bp, Homo sapiens
gatctccggatgggcgcacctgctgctcagggcagggttgctgagcaagaccacctccctaggccttgcctggcatgggtgccactctctctggcatccacctgtctggggctagtctctggccctcactgctcacggccgggtgaccactctggcctgcgtactcctcactcagaaacaagaacagcgacagcccttctcgagcagatgacacgagctagtccacgttgacagcttaagacagtgctagctctgccctggctctcctagaaggtggaggacagacacaggagaaataaaaaaagatgatgctgcaggaatccttcttaaaaatattacatgttttattatcctgtccccagagggtggtttatccagaaaccaagaaaaaaaatcaatcagaataaactcaaaaaaaaaaggtagggggagcaaaaccatcaaccaccaggcagccaggccatcagcccacctccacctctggagggtccccagagacccacgcccgacgcagacccggaggagcatcagcaaggggcccgggcagagaatcggctatgtcttcattatgagagcaggagagacggcagagatatgttgctaggtgaatatatatttatataataaatccgtaagttaataaagtaaatagtaattctc

SEQ ID NO: 8762 - DNA, 89 bp, Homo sapiens
tctattcctggggccataactcatgggaaaacagaattatcccctaggactcctttctaagcccctaataaaatgtctgagggtgtctc

SEQ ID NO: 8763 - DNA, 189 bp, Homo sapiens
gagccctcgcgtcccaggccccagccagggggccggccttgtcccgcctcatccacagaaagggaggatgggcgatgacagttgtttctatgccttctgacccagtttcccagtttataactttatgacaatgagtttctcaagcccaaggccttatcttcaccccacaaacaataaagcaaagtaaag

SEQ ID NO: 8764 - DNA, 333 bp, Homo sapiens
ttaggtgcctaggaagagtcccatctgagcaggaagacatttctctttcctttatgccattttttgtttttgttatttgcaaaagatcttgtattccttttttttttttttttttttttttttaaatgctaggtttgtagaggcttacttaaccttaatggaaacgctggaaatctgcagggggagggagaggggaactgttatctcccaagattaaccttcacttttaaaaaattattgtacatgtgatttttttttttcctgttcatacatttgtgctgcccatgtactcttggcacatttcaataaaattgtttggaaaataaacacagc

SEQ ID NO: 8765 - DNA, 1270 bp, Homo sapiens
gggtttcacacccctccgttcatgcctgtaatcccaacattttgggaggccaaggtgggaggattgcttgagcccaggagtttgagaccagcctgggcaaaacagtgggacccccatctaccaaaaaaaaaaaaaaacaaaaattagccgggcgtggtggcgtactcctgtggtaccagctactcaggaggctttgcagttttagacaggcgtatcagagaaagcctcactgaggtgacatctgcagaaaggcctgaaggaggggaggggaagggaggagcagagtgggtattaggaagagcattccgagaagcaggatgagccagtgcaaaggcccagaggtaggctgttcccttttcctgggacccctccctcctccttgctgctcctaaaccacataggtcaggagtctggactgacccaggtacgtctggcatcttgcttgaggaacagggggttttgttttgttttgaaagaacgtctctgtctgttgcccaggctggagtgtagtggcatgatctcggctcactgcagccttaacctcctggctcaaacaagccccctgcctctgcctaccaagtagctgagactacaggcacctaccaccgtgcctgtctaatttttaaaattttttataaagatgaggtctctctttgttgcccaggctggtctcaaactcctaacctcaagcaatctgcccacgtcggcctcccaaagtgctgagattataggcgtgagccaccgtgcccaattgtgatcgtttttcccaaagaatgtatcacatgctaacaaaccatatatttatgtatttcattgttcatagtaactacaatttaaaaaactaaaaagaaacaagtgaggccgggtgcggttgctcatgcctgtaatcccagcactttgggaggccaaggtgggcagatcacctgaggtcgggagttcaagaccagcctgacaaacatggagaaacccgtctctactaaaaatacaaacttagccgggcatggtggcgcatgcctgtaatcccagctactccggaggctaaggcaggagaatggcttgaacccgggaggcgaagattgcggtgagcggagattgcgccattgcactccagcctgggcaacaagagtgaaacaccatctcaaaaataaataaataaataaaaagaaacaagtgaagttaacgttaataataatatatttgatttaacacaatgtatcccaaatattatcacttcaacatgtatccatattaaaaagttactgacatattt

SEQ ID NO: 8766 - DNA, 595 bp, Homo sapiens
cagctgcatctcccaggcgggatgccgagctcctcagggacagctgagccccaaccgggcctggccccctcttaaccagcagttcttgtctggggagctcagaacatcccccaatctcttacagctccctccccaaaactggggtcccagcaaccctggcccccaaccccagcaaatctctaacacctcctagaggccaaggcttaaacaggcatctctaccagccccactgtctctaaccactcctgggctaaggagtaacctccctcatctctaactgcccccacggggccagggctaccccagaacttttaactcttccaggacagggagcttcgggcccccactctgtctcctgcccccgggggcctgtggctaagtaaaccatacctaacctaccccagtgtgggtgtgggcctctgaatataacccacacccagcgtagggggagtctgagccgggagggctcccgagtctctgccttcagctcccaaagtgggtggtgggcccccttcacgtgggacccacttcccatgctggatgggcagaagacattgcttattggagacaaattaaaaacaaaaacaactaacaa

SEQ ID NO: 8767 - DNA, 339 bp, Homo sapiens
gaacccacccacagcagccctcgggggtgtcactgcttcctggagttcaggagaccccggacacctgggacctgtgttgctgagcccgtcctgacatctgtgttcttcctgtcagctccacgcccgggcccctggaccacggggtccacctctcctctgtccttgctgcctcagagtcagtcactgaccctgttatcattgagggtcccagtgggaagcaggacgtctgggctttacggttctagggacaggagaagcagaggaagaggcttccatccctccttccttctttcctcctacagtgctgagcaaaaagtccccaataaatggtcaggacaa

SEQ ID NO: 8768 - DNA, 1206 bp, Homo sapiens
cgactggactactgcctgacgttgtcagtcaagaccagccttgcagccaggtgcagtggctcacacctgtggaatcccagcacttcaggaggccgaggtgggaggatcactggagctcgggagttcaagaccagcctgggcaacatagtgaaaccgtctccacaaataatttttaaaaaattagccaggcatggtggtgccgcctgtagtcccagctactcaggaggcttgggtgggaggattgcctgagaccaggaggttgaggctgcagtgagccgtgatttcaccaccactccagcctgggtgagaaagcaagaccctatatcaatgaaaaaaaaaaaaaaaaagaccagctttgcagccagaagccagaggatacccagggacagtagggctcccaggtggctggttctcagcacaccttccatgaatctgcttgctgctgcttcagtgtggtggccatcatgctgtgtgacaaaccaggctgttcacagcttcctcagccccccagaaggggagtgtcaggaagagacatttagttcatttgcctgcaaattttcttctcctgcaaggatctcggtggactcagtcacaaaacaaaggctaaaccaggatttataagagagggcttataaatccctctgccgacgcagggagcagagacttgccggcatgttttgggggtaatgatcgtgggcagggagcagaggtccgctgaggcagtctgtccttgagactaacaaagtcatctgctgtttggggaaatctctggtgttgggaacaggcccccaaatctggccataaactggccccaaaactggccataaacaaaatatctgcagcactgtgacatgtttgtgatggccatgacccccaccctgaaggttgtgggtttactggaacgagggcgaggaacacctggcccacccagggcggaaaaccgcttaaaggggttcctgaaccacaaaccatagcataagtgatctgtgccttaacgacatgttcctgctgcagataactagccagacccatccctttatttcagcccatccctttatttcctgtaagaaatgtttttagttaatctataatctatagaaataatgcttatcactggcttgctgtcaataaatatgtgggtaaatctctgttcaaggctctcagctctgaaggccgtgagacccctgatttcccactccacaccct

SEQ ID NO: 8769 - DNA, 1387 bp, Homo sapiens
tccagcactacccttcttgcaagacagcctgactgtgccttccagggcctgggaccattggctgggacccctcattaaccaaccaagcacttgtacctccctggcatactgagaattcctgggtccaatcaaaggccctgacgggccctgtcttcaggttctagaaactaccagaagaagcttcttccatcttatctacctactgcagctgctgctttgcgggggggccctactgtactgaggggaaacccacaagtgagcatgggggaatgcccatcctggagaagaattcttgccctcccctctcttctcctcccaaccaaaaccctccgatccagccccaggcccctctgtaccatcccctcccctccgcaccactgacctcttgtctcctgttgtttctgccacagggacttccttggtcccttcagggaagccctcaactcatctctgaacttagaatctcatccttagggctcagagagtcccagccctaagggtgtgaacctcacctcctggggcttccgagctacagggctgggaccaggtcatgcagctgaaagtctacgttaaaaaaaaaaagtttgggccaggcacagtggctcatgcctgtaatcccagcactttgggaggctgaggcaggcggatcacctgaggtcaggagttcaagaccagcctggccaacatggtgaaaccccgtctctactaaaaatccaaaaaattagccgggcttggtggtgtgcacctgtaattccagctactcgggaggctgaggcaggagaattgcttgagcccgggaggcagaggctgcagtgaaccaagatcatgccactgcactccagcctgggcaacacagcgagactccgtctcaaaaagaaaaagtttggatcaggcagggtggctcacacctgtaatccctgcactttgggaggccaaggtgggaggatcagttgagccccagagttcaagaccagcctgggcaatgtagtaagacccccatcgctacaaaaaatacaaaagttagccaggtacagtagtacacacctgtagtccaagctacttgggaggctgaagtgggaggatcatttgtgcccaggttgaggctatagtgagccatgatcataccactgcactccagcctgggtgacagagcgagaccctgtctcaaaaaaaaaaaagaatttggagatggttctgcccactctggtttctctgaaaaaacgaggtaattccctgagcccaaccctgatcctcaaggacctgtaattgtgtggtatttaaaattaaaataacattatttttattttgactttttttcaaacagtaagaataatatatcagcagcatgtatctgccaatcatatgtaataaatttcttattttgcca

SEQ ID NO: 8770 - DNA, 64 bp, Homo sapiens
gcccatcgtgactcaaaactcacttgtataataaacagtttttgagggattttaaagtttcaag

SEQ ID NO: 8771 - DNA, 115 bp, Homo sapiens
tctctgggctggggactgaattcctgatgtctgagtcctcaaggtgactggggacttggaacccctaggacctgaacaaccaagactttaaataaattttaaaatgcaaaaactc

SEQ ID NO: 8772 - DNA, 359 bp, Homo sapiens
gtcccagggcattcagggctggttcagacaccattattgtgagcagcaaagcacttttctagtggtctgtttgtgagcctttcacttgtttgttccccacccccaaacctttgctgttaataaagtcaacttctctttacttcccctcccagcccctatgatgtcattcagcccagcacatacctcccgcaacccccaggtgctcaaggatcttggcttgaggcttagaaacacaggccagaggcagggccaatggtttcccacaaaatgtagcacaacgaaggtcagaattcgttttttttgtttgttttttttttttccaaaataagcccagaccattaaacaagtgaaactccaac

SEQ ID NO: 8773 - DNA, 1327 bp, Homo sapiens
gtcggctgtgatgatgacattggtggcaaggaatagccaagtgacccttttgggatcaaaagaacaggcaggctgtgccagtttagttaactcagtcattagggggaatgcaaactggaagggaatacggcaatgtgcaattgaaggaggaagcacactccgaaatggaaacagacaagactgttgaatcttgttttctttcttcttttttagtattatttaaatagagaagggagtctcgcatccctaggctggtcccgaacgcttggacccgagcgatcctcccgcttcggcctcccaaagtgctgggattactttacaggcgtgagccaccgcgcccggccgaatcttgttttcaaacaggtcccaagacacttctgacttagcactttgttagcaatgcattttcctgcatttgtgaagaatccttcatgactttcaccataaaggatggttttgcaaagatatgagaaaaaaaaaatgccaataacagaacccatagaaatgaacctaagtgatgaaagaaaacaaagaaatagagttgtcaggaatccaggtgtacctgagttactaggattggaaggctattgagaggactttgaaatttcacaatttgtggtcatgtcaacaaatcctagtgtaagattcatatttgtgttttctgaggtactttagatgaacagtaaatattcaatagaaaaaaccacgtattatatgatcagtgttttcaagtctatgtgaaattgggtaggtgtggaataaacttgttttttgttaattttaagctttttattttattctagaatatgtattctattcacaagactcaacaaaaaaaagtatcggccgggcgcactggcttacgcctgtaatcccagcactttgggaggccacggcgggtggatcacctgaggtcaggaattcaagaccaccctggccaacatggtgaaaccccatctctacgaaaaataaaaaattaactgggtgtggtggcacgcgcttgtagtcccagctactcgggaggctgaggcaggagaatcacttgaacctgggaggcggaggttgcagtaagccgagatcacgccactgcactccagcctggtcaacagagtgggactccgtctcaaaaaaaagaaaaaaagtatcaaaagatgctgtgagaaatctctcttgttgctgtcctttgccaaactcagaactattccatgcaggtgccattgcttgtggcttggagttttgttgttgttttcttggttttgcttgttttttgctttttcactgtacgcctttcaggttttctaatgcatatgcaaataaacatcaatct

SEQ ID NO: 8774 - DNA, 560 bp, Homo sapiens
ttatgtggtgacactacttcaagagaacctctgcattccagtcataccaatcctgcaacttgattttcagaagtcaagagtatatcgcgataagacagtgcacaggtggaggggaaaaaaagggggagggggaagcttatcttgaaaaagcatcacagaagtagaaaaaaatgtcgaaagcattataactgtaacgttctttgagtttgtgattgatccacatttttccccctgcattatggaaaatgtctctcagcattgctttattacaaagtaaaggatggttttataaaattgagactgatgaaacatcaatactagagcccatgaggatgaaagaaattatcaaatagtgctgaacagaataagatgttaacgctgagttattaggactggaaggctatgaaaagaacttgaaattgtcggaatatgtgctctcttcatgtcatattcaatagaagtttctagtttaagattgattttgtgttttcttaggcatttcaagtgacaagcaaagtaaatgtatatattatgtgataaatcatgttttcaagaacgtc

SEQ ID NO: 8775 - DNA, 124 bp, Homo sapiens
ccagacttcatgttgccaaggaatccctgtctctacgtgaacttgggattccaaagccagctaacagcatgatcttttctcacttcaatccttactcctgctcattaaaacttaatcaaacttc

SEQ ID NO: 8776 - DNA, 364 bp, Homo sapiens
ccctgccccctccctggggcccctcctgaagccataccctcccccatctgggggccctgggctcccatcctcatctctctccttgactggaattgctgctacccagctggggtgggtgaggcctgcactgattggggcctggggcaggggggtcaaggagagggttttggccgctccctccccactaaggactggacccttgggcccctctccccctttttttctatttattgtaccaaagacagtggtggtccggtggagggaagaccccccctcaccccaggaccctaggagggggtgggggcaggtagggggagatggccttgctcctcctcgctgtacccccagtaaagagctttctcac

SEQ ID NO: 8777 - DNA, 80 bp, Homo sapiens
agttcagcgctgtcaggattgcgagagatgtgtgttgatactgttgcacgtgtgtttttctattaaaagactcatccgtc

SEQ ID NO: 8778 - DNA, 164 bp, Homo sapiens
tcagtcatccaccaggaacgaagatttcctgaagaagacctggtccctctggaggttgcagtggctgaaggatgcatcatgtgctcctaccctgctctaccgcttttctgggtcacagaggccaaatgtgagagcattgaataaatatcttaagctaagctgca

SEQ ID NO: 8779 - DNA, 105 bp, Homo sapiens
ggccaatccagggggacctctctatccctcgccctcccacctcaccatgtaacttcccccgactcatgtgtttgttggtaaaacacttgtcactggtgatcataa

SEQ ID NO: 8780 - DNA, 1383 bp, Homo sapiens
agagcccggatccaagactccttcacctccccccgcatcccccatctgcagcccgccttcctctgcctcctgagcgcggactccttctcacgggcggagctgctgcgcgccgagcgtcgcatcctgagccgcctggatttccggctgcaccaccccggcccgctgctgtgcctcgggctgctggccgcgctggcagggagcagcccccaggtgagcccttgtgaatacgcggggtgggggcgtggccggcgcgaagtggggcgtggcctgacagtcgccccgcctcacttgcaggtgatgttacttgccacctacttcctggagctgtctttgctggaggccgaggcggcgggatgggagccgggtcgtcgtgcggctgcggctctgagcctggcgcaccgcttgctcgacggggcgggctccaggctccagccagaactttacaggtgtagtcttggcggaggaagtgtatggggtcaccgcagcttcagggacttaccttcctggtcatttttacggtctcggagaatgagagacaattattgaggaggaggtggcacctagacttgatttttctgggtgtgggagagaatggggtgggaggaccccattagtccagatctggggtctcttaaccttgccccagagtggaagatagtctcccaggcccagaagatgctcctattgccttccagggctgagaacgaaggatcacccaggcctcgagtcctccatctctgtatctggtggtggatggggtgttcctttagctgctagggccgctaaccatgctaccaggtggcagggcgaaccatggtttccctcagcctgtgcacccagcatagagaggatggctgcccatcctcagctcccctccttgcttcctcgagtgttctgactccgcactagccgcgccctgtaggaagaatagggtgtccacctctccccggtgctcgcctagtcactccagttgaagacgggacgcgtgcccgatctcaagagagcccccgacccgtccgtggggaaccacatcgacgcttcttctcagcctccagtctccagttccaaggatgggtcatctccaaccacttgccctgcctcagtttctccatctccctgctgcagccccgaggaactgggcaccctcgagccgtgcatggcccgcgctgcgctccgaggtcccgcgccgggtcgcgccgcagtcttcctcaagtatgcgcggccccagcgccaggggaccagccttgccgccgcctgcctgctccgccgcctccagtctgagcctccctgagtactgggactcagtcacaaaaaaatcaacaacaaaaaacaaaaccctcccagtgtgtgtccgtctctcatctcaataaaagaatttatttt

SEQ ID NO: 8781 - DNA, 3555 bp, Homo sapiens
gcagtctgcccacgcagaggacgcacgctcgctgccatcaccgctgggtggttttttccccctaactttttacttagcctttttggtttgtgtccccacccccacctcctcaccccctttccagttcttcttcaggcccctcccagacgcaccccagcggcccctgcagcccctgcctccagcctccagcctcacctttgtgcccagactcgcatttggaagactccacctcccgcccaggcctgggctgttgggcggttggagattcaggttttaatccacacaagccccagtgaggggtgaagcatggcgcctggggcctgcctgagtttctggcctgggtgtcgtgctggtgtctgcctccgcgctgctgcatctggacgaaggctgccttctggtgggacgcgacacccggcagacagtggtgctgccttccaggccccgtggcctaggctcggagtggccaggcacggggcggtccaatcccccacccgctgtccccctatgggggcagaaaagcaataatgtccaggggcaggcaggggcccttgggagctgcagggctgggggttagggctgctccctggtgaatggagtcagatcctaggatctgtaccatggggaaccaggagtggccgggctgggtgccgcctcctggtccggcctcctccccaccaaactgtcctcaccctatggatgaggcaggaggaacatttggggccaaacctgcctgcctcccagccccgtgccttactagggcttccttccagctggccttacctcccgctggaccctgggcctggcctggccccactgggggctatgggctgggctcaccctctcctctgcgggggtggagggccaccagccttggctgttacaatcttacaccggacagtattgggccccatggacttggtcagggaggggtgggggtgggcatctctggtacctattggggtggggggcctctgaaaagggaggctcctaggcccccctcacccctccctctccccagggccccacgttctgcagccttaaggttgaacatgagtgcacgtccatgtcagtgctgtgggactcctgtgcgtgcctcggactgcgtgtgtcggcgggacgcaggcacacgtgggtgtgtgtgcatgtgtgtttgtgtgagggcagcgtgtcctccagtgtgcatggtgtgtgggcttgggccccatccctggcccgagcatttcatcctgtgggggaggggtgctgacctagtgggaggagccccactgtgatccatgagctgccctgcccacgcctcccctccctgtagcaacacctctgggtgtttggagtttagcttttgtgggtttgctctccctatcccatctcctgtactacacagttcatggcagggtggggaggggtggggttggttcgggtgggtgagggtctttttcctctgtgtgcgatgttgttatctgacagttctccgtccctactggcctttctcctcgtcttcatatttgtacggtacaagcaataaagacactcatttcagaccagggcccagcctgcactcacgccagcccaaccactctgggctttgccttggtgatggagtcagacccctgggccccagctcctcctgtactagccgttcccttcagcaaggagggcactgagctcagggtgagggcagctggggtgtgtgcaggagctcaggctggagagggtgggtggagctggtgctgtggggctgaggggtatgggaaggctccccgcatgtgggggtggggtggacagagaccactccaggccctcagtgctgcttaggctaagagaggtggggtggagggacagggctggaagatctgggtagcccagaatgaggagggtgcctgtgctgtcactgaatgagagggagtggttcattccacccggctgccgagcctcagaggggggcattcctatcctgccccacctccctgtttatgctgccacctggaagccttgaggcccccaaattccagtacagacccagtggtgtgttcatggtggcgtggttgctgtcacctgggagctcctgagcgtttggttagaaccctgttcagcttggggtcagccctcccctagtcactgccctttagcctggatgtgtctgggcccctgcacttcccgtgcttgagtcacgtggctgcatggccgggcgctggccggatggaacacctcccccagcaagggaccagggaccagagccctggcctgccctgctgagccctgctgtgcagagggcctggcacagatgaatttgagattttgccgcaaggtgttagcacttcacacccattgagtctttgagattttaagtgaatgtaagcagaaaaagtcagatccaatttacagaaatcagagttagctacagctaggactcgtttggttggggttttttagtttgtctttctaaagtcatgtggaccttaatttaattacaaaagtctaccctggtggtcataaaataggcaggcctatgaagaaaggccttttactcttccatctcatcccagccccgagttgacccacgttgctgctcctcacaccatggtgatgcaggtctcgtagtgtgggcacaggcctggctacctcatctttttagtgcctctctcctcttccacaggatggggtcccacagctgcagcagctggccccgtagttgagcatgtgtggttatcctgtagagcttttcccaagaagggtgtttgaacttagagtcttaataaaatcttaccaaataaattttgagtagaataatcgtcttttgcaatgtacattttaaaaatttcacacattcttttttgtatataaagaacagtgactgggcacagtggctcatgcctgtaatcccagcaatttgggaggccgaggcgggcgggtctcttgaggccaggggttcgagaccagcctgggcatcatagggagaccttcatctctacaaaaaatacaaaaattagctgggcatggtggtgcatgcctgcaatcccagctaacttggaaggctgaggtgaggtgggaagatcacttgagcccaggagtttgaggctgcagtgagctatgattgcggcactgcactgcagcctgggacaatgagactgtgtctctaaaaataaaaaaaaaaaaaacatgatacatgctattaaaaaagacagcaaagcaggagtataagaaaggaaattcacccgaggtcgcagggccttgagtactcattttggtgctgattacctctctgcaaatggacacggcatcataaattggtagtttcctgctctttttgtgtaatcttttccagttaatgtgaagcctctgggggctgccctcgtgcactgatggttgtgtggagtcgggggcggcagtgcgattcccttttagctgctgcatggggggaactcaggctttccagctgcttcctggggttccatggggtagacccctcaaccgcttcagctgccccgttaacaggaattgacttggtttcgtttggtgctaccagcagtcctgtaataaactagctatccatctgta

SEQ ID NO: 8782 - DNA, 816 bp, Homo sapiens
cccacctgtgggcggggtgcaggcagcagagcctgcgggcatctgccctggccgccccaggctcctggcttcatcacgcctcccaccagctcctggatgacacagcttgtctccctcgggctctagagctaggcccgagcattcgggggatcaccccatttctcctagcctgggatggtcgtcgcagctggcctggcctgctccaggactccccttctctcatgtcctctgtgctttcttctctggctgtggccttggcagaacccacttttctacctctcccaagtgccagggggcttcttcctctcctacattccccttcttcccctgagcagggtctgctgcctcagaccccagctcatcagcctccctgtccccctcaactaagtgggtgtcacctggtgggcctcccttcccccactccccactgacctccctcactcctctgcgcctccccccactgctgtgacttctctctctccctgtcttcactttgttcatttctcttctgttttctgtccccgtggcaaggcccgactgtccgctgcgtcctgcccgaccctcctgtacctccggcctcccagcggccccctcgtcggcggtggcgtcgagcctgttgagactgttagccgccctctactcccaggctggagggacctctccagaccctgggctgcggctgaggcgcatccgttttcctgccctgggcatctgtctctgaaagtgtatggcgggtggtgggcaaggggcactgggaagggaggccagtgcctagagtgaagacagctgctgttttaatatatttttgtgactttc

SEQ ID NO: 8783 - DNA, 315 bp, Homo sapiens
tggtgattccacccctgcccatcactgggggctgcgctagctgggctggcattccctcccaacctgaactgctcctcagagccatctcctgaacccacaaattattcttacagaaagatagttatccagaaattctcattccccgtctgcggtgcggtgcgtgcctgcacacctctcctaaacacagcagggctttggagtctggcccatgctccttggccagaaggacagcaggaaagggggctgcaccccgctggccctgcgctcgcccttggccctgctgcctctgtctatttcaatatagaactgttcagc

SEQ ID NO: 8784 - DNA, 4792 bp, Homo sapiens
gccccattccccgccatcgtgggccagccttgccctctgtcttgtcactaacccaagctaattccaccctctgccccttcctctctgccccaaactcttccccgggaagggggacagacccaccccagcccagggccctcacccacctcggagaggcgtccccaccatcggatccaggcttgctaggggtcctgaaccaggctacttcgaaccaggaaagccagattccagcctgagtgctggcccaattactgctgagtggccctggacaaagttgtttctctccctgggcctcagtttccccatctctagaatgaggatgttggggaaaatcccggatcaggatctagaagtcttgggtccccgtccctacactcctgttgactcatttggagatcctagatggctgcctgctttcctgggcactcatggtgaaatgacaggcaagaagtggggatgatgtttggggaacaagatacttgacccagcacatcccccgcctggtccaataccaggtggggctcttcctgtccactcccagcctcccactgtcccaccgcctcctgcctctctcctctctccccagaacatccagagtctgtcccctgtgaagaagaagaagatggtgcctggggctctgggggtccccgctgacctggcccctgttgacgtcgagttctcctttcccaagttctcccgcctgcgtcggggcctcaaagccgaggctgtcaagggtcctgtcccggctgcccctgcccgccggcgcctccagctgcctcggctgcgtgtacgagaagtggccgaagaggctcaggcagcccggctggccgccgccgctcctccccccaggaaagccaaggtggaggctgaggtggctgcaggagctcgtttcacagcccctcaggtggagctggttgggccgcggctgccaggggcggaggtgggtgtcccccaggtctcagcccccaaggctgccccctcagcagaggcagctggtggctttgccctccacctgccaacccttgggctcggagccccggctccgcctgctgtggaggccccagccgtgggaatccaggtcccccaggtggagctgcctgccttgccctcactgcccactctgcccacacttccctgcctagagacccgggaaggggctgtgtcggtagtggtgcccaccctggatgtggcagcaccgactgtgggggtggacctggccttgccgggtgcagaggtggaggcccggggagaggcacctgaggtggccctgaagatgccccgccttagttttccccgatttggggctcgagcaaaggaagttgctgaggccaaggtagccaaggtcagccctgaggccagggtgaaaggtcccagacttcgaatgcccacctttgggctttccctcttggagccccggcccgctgctcctgaagttgtagagagcaagctgaagctgcccaccatcaagatgccctcccttggcatcggagtgtcagggcccgaggtcaaggtgcccaagggacctgaagtgaagctccccaaggctcctgaggtcaagcttccaaaagtgcccgaggcagcccttccagaggttcgactcccagaggtggagctccccaaggtgtcagagatgaaactcccaaaggtgccagagatggctgtgccggaggtgcggcttccagaggtagagctgcccaaagtgtcagagatgaaactcccaaaggtgccagagatggctgtgccggaggtgcggcttccagaggtacagctgctgaaagtgtcggagatgaaactcccaaaggtgccagagatggctgtgccggaggtgcggcttccagaggtacagctgccgaaagtgtcagagatgaaactcccagaggtgtcagaggtggctgtgccagaggtgcggcttccagaggtgcagctgccgaaagtgccagagatgaaagtccctgagatgaagcttccaaaggtgcctgagatgaaacttcctgagatgaaactccctgaagtgcaactcccgaaggtgcccgagatggccgtgcccgatgtgcacctcccagaagtgcagcttccaaaagtcccagagatgaagctccctgagatgaaactccctgaggtgaaactcccgaaggtgcccgagatggctgtgcccgatgtgcacctcccggaagtgcagctcccgaaagtcccagagatgaaactccctaaaatgcctgagatggctgtgccagaggttcgactccccgaggtgcagctgccaaaagtctcagagatgaaactccccaaggtgcctgaaatggccgtgcccgatgtgcacctcccagaggtgcagctgcccaaagtctgtgaaatgaaagtccctgacatgaagctcccagagataaaactccccaaggtgcctgagatggctgtgcccgatgtgcacctccccgaggtgcagctgccgaaagtgtcagagattcggctgccggaaatgcaagtgccgaaggttcccgacgtgcatcttccgaaggcaccagaggtgaagctgcccagggctccggaggtgcagctaaaggccaccaaggcagaacaggcagaagggatggaatttggcttcaagatgcccaagatgaccatgcccaagctagggagggcagagtccccatcacgtggcaagccaggcgaggcgggtgctgaggtctcagggaagctggtaacacttccctgtctgcagccagaggtggatggtgaggctcatgtgggtgtcccctctctcactctgccttcagtggagctagacctgccaggagcacttggcctgcaggggcaggtcccagccgctaaaatgggcaagggagagcgggtggagggccctgaggtggcagcaggggtcagggaagtgggcttccgagtgccctctgttgaaattgtcaccccacagctgcccgccgtggaaattgaggaagggcggctggagatgatagagacaaaagtcaagccctcttccaagttctccttacctaagtttggactctcggggccaaaggtggctaaggcagaggctgagggggctgggcgagctaccaagctgaaggtatccaaatttgccatctcactccccaaggctcgggtgggggctgaggctgaggccaaaggggctggggaggcaggcctgctgcctgccctcgatctgtccatcccacagctcagcctggatgcccacctgccctcaggcaaggtagaggtggcaggggccgacctcaagttcaaggggcccaggtttgctctccccaagtttggggtcagaggccgggacactgaggcagcagaactagtgccaggggtggctgagttggagggcaagggctggggctgggatgggagggtgaagatgcccaagctgaagatgccttcctttgggctggctcgagggaaggaagcagaagttcaaggtgatcgtgccagcccgggggaaaaggctgagtccaccgctgtgcagcttaagatccccgaggtggagctggtcacgctgggcgcccaggaggaagggagggcagagggggctgtggccgtcagtggaatgcagctgtcaggcctgaaggtgtccacagccgggcaggtggtcactgagggccatgacgcggggctgaggatgcctccgctgggcatctccctgccacaggtggagctgaccggctttggggaggcaggtaccccagggcagcaggctcagagtacagtcccttcagcagagggcacagcaggctacagggttcaggtgccccaggtgaccctgtctctgcctggagcccaggttgcaggtggtgagctgctggtgggtgagggtgtctttaagatgcccaccgtgacagtgccccagcttgagctggacgtggggctaagccgagaggcacaggcgggcgaggcggccacaggcgagggtgggctgaggctgaagttgcccacactgggggccagagctagggtggggggcgagggtgctgaggagcagcccccaggggccgagcgtaccttctgcctctcactgcccgacgtggagctctcgccatccgggggcaaccatgccgagtaccaggtggcagagggggagggagaggccggacacaagctcaaggtacggctgccccggtttggcctggtgcgggccaaggagggggccgaggagggtgagaaggccaagagccccaaactcaggctgccccgagtgggcttcagccaaagtgagatggtcactggggaagggtcccccagccccgaggaggaggaggaggaggaggaagagggcagtggggaaggggcctcgggtcgccggggccgggtccgggtccgcttgccacgtgtaggcctggcggccccttctaaagcctctcgggggcaggagggcgatgcagcccccaagtcccccgtcagagagaagtcacccaagttccgcttccccagggtgtccctaagccccaaggcccggagtgggagtggggaccaggaagagggtggattgcgggtgcggctgcccagcgtggggttttcagagacaggggctccaggcccggccaggatggagggggctcaggctgcggctgtctgaagcccctagtcagatggggatcccttcttgccttcctttctctaccccctcgctgttgtgtgtgtgataactagcactaaccctaagagggccgggaggtgggtgactgaccagggctggcagggaggcctgctcctgtctctctggcaggagtgcctgtaccccaccaagccatgtgaataaaataatctggaagtagcc

SEQ ID NO: 8785 - DNA, 334 bp, Homo sapiens
gccctcgtgctggaatggttgtctggtatctgaactgagcctgctggctggaccaactgtcctcgaaaagacacagctggcttccctagtacagagaacagggcttgggccactttggagagacagaatctagtcctgggcaacttcacatccgtcctcctgtctcagggctggcagggggagcctggaattaccccctagtgatggaatgacagggtctggtggggactgaattccctggccctggggtcatagcttgggctgttccttctctgatacgggaagagaccccaatcagatttttcaaattaaagccagtcctgggaaatctcaa

SEQ ID NO: 8786 - DNA, 646 bp, Homo sapiens
aactgtgatagaggggatcgatccttcctcatgtcatcttcggtggcctggatccctgaatgcaactctgggtgtgtgtttttgtgggggctcgaagcagtgactatggcctcctttgttcccatttcagggttccacaaactgtcttgcatgtgtgtgtgtgtctggttaccccgaccttctgtgaaggtgggtcttcctgaattaatttatctattccaaatgccttaacgagactctgtttctgggagtctgattttccacttacacatttcttccacctttcctgctagttcccactcccctgtgaccactggggcctcagggaagataaagaaagctgggcctgtcgaaggatgacagggatgtgctgccaggttgctatagaaacccaggctctgcctcttgcaccttgagggggtgggaggggctggtgtcctccctccaggctgaaccccacttcctcggcaggaccccagtctcagcagcctcctgatttcataaccaggccggaccacgtgcaatagggtggaaaccaaactgctccatgccgggttatttaaaagaaaggcagagtttgtggtggcttttttttttttttttggattgtttgtaatttttttaaataaaagtattttggaaggag

SEQ ID NO: 8787 - DNA, 95 bp, Homo sapiens
cactctgtccccatctgggagggtggcattctgggacatgaggagcaaaggaagggggcaataaatgttgagccaagagcttcaaattactctag

SEQ ID NO: 8788 - DNA, 1559 bp, Homo sapiens
cccgagccgccccacccactccatcatctccaggtgccccacgcctgggggtggaggcacaacctctcccctaaccctgctccctggggctgcgcccctcaacaccctctcaacacccccctccctcaaccaccccgacaaccactacagaaccaacattgtgacgcccaggttgcaacaggatggaattcagggacggacccagcctggctaagggaaccatttcactgccggacttaggctggcaatgcccccttccccaaccccagacacaggggttggccacaatcccactgaatgcccttggttcacactccatttcccagtttctgttgacccccaccttccagtgttggacaggatggaggggggacacttgcttaggggctctcctgggccccacaccagtgcccaccccaaatctggtcgtctcctccccccatgcacagcacaagctaagggctgccctctgcccacacgctgcgttcactgccaatgctgtactcacctccatcaccctccaactttggggcccatgtcttccttgggccaaggtctcatgggggctagggccaagttgggggcccaggaggcggggagggaggaggaggagaagatgcgcagttacctcatgtcggtgcccgctggggaggggtccgggaagaaggggaaggggtgcctggcgggtacttttctatcttttatttccagattttttttgtatctaaacttgaagatttgtattatacaaggacagccaataaaggaagaatataatggtgcccctcgggaaacgagggtgtgtgtagggcgctggtgaggccctagaacctttcctcctgagtcatggactgaaacagagtcagaaggatgtccctgagtgataacctctgagtcatagcgtggtaacaggtaccactgactcagcacctgccaggcgggtattaaaggagccaaaattaatcaccccatttctattccttacagagttagaatcaaggaataaaaaacaaatattatgaactgctggctgggcacagtggctcacgcctgtaatcccagcactttgggaggtcgaggcaggcagatcacttaaggtcaggagttcgagaccagcctggccgccatggagaaacccagtctctaccaaaaattcaaaaattagccgggcgtggtggcaggcgcctgtaattccaggaggctgaggcacaagaatcgcttgaacccaggcagcagaggttgcagtgacctgaggtcacaccattgcactcctgcctgggcaacagaatgagactctgtctcaaaaaaaaaaaacaaaaaaaaaaaaactacttctaattagctcaatattaatattttaacaagttgggttggtaacagtatatctttgcccatgctggcaaattcttgttttgtcagcattttccataactctggccaaagtgtcacctgatgtggcaacgttttacagtcttgctattgtttcttgagtcctttaatctataagatgtatttttaaaaatatataacatataaattttgtttcgttatagctcttt

SEQ ID NO: 8789 - DNA, 506 bp, Homo sapiens
cagcctccatgggggattcagtccccagagcaggccgtaccctgctgtagtgcctcttatcccttccccgtctgccctgggtcagaggagcccccttgggcttcccagtcttgcctggctctcctccttggcccaggagctcaggatccctggggctggggaactcccaacttcgtgccctagatcctgcacctccccactcgaaagtgggtatccgaaaactaagccagggaagcggttaacttatctttgccaacatttgagggagccttgggccgctgcatgtcgttatgcagatcagactcatcagggggagccctcacctctgcctcaagcctcccgtggaaggcgagatggtcctggaggcagtcctcacctctgcctccctcgctcctccaacagctgccttctcccgggttccagcctctcagtgtgttggagaggtaggggtgcggggtgggggggagctgaatcttcaatcggaataaaagcagccctccccttcc

SEQ ID NO: 8790 - DNA, 1577 bp, Homo sapiens
ctgcggctgcggtctcaggctgcagcctagctcggtaaccatttgaagtgtgcctacacttctcccactgtgtgatggcgacaagattgaagctaggtctcaggggtctccagtcctccttcatcagggccaccccctgcagtattgagcaccagctggtccctctagggagagattgacaacagcccggaccctgcggcctgcctattccatctgaatgtcgcatcgtctgtttctcactaggggccgcctctgtcatctcactagacatttgaggaacctcctgcctgggccctctgcttctcacaggacagggacactgaactgcgtcagcctcagctcacccctccttagcccaaggtcttcctcatgcttgccacctactagtcatactggccttttagatccctgaagtgttgttcaaatccccggatcattgagtcccacccccagccctctgctgcggatcactccttaacttttccattggggctcaggtatcactacctcagggaagagtcctgcagccccagtcaagacacccctcccccacctcatgtcttcacagttttaaagcccatctgggagcagttacctgtgccagcccctctacctgtgttagcagatctggcaaccctgtaaggggggtgctagatggacccgatttgacagatggcaagactgaggcctggagaagtggaatcactggcctgaggtcacatgactagcacatggcaaggtcaggattcaagctaggtagtcagtatctcagccaggctgtctcctggctccctgaacattatggtgctgaccacaaactttcctgtccacttatacaaacttctagtgagtgtgtgtgattactagcttcatgaatacctgacccctccactctgaaggaggaacaggcctgtctggatcacttctctgtccctaactgagcccatctcatttagggaaactacagagcactgttgctttttttttttttagatggagtctcgttctgtcgtccaggctggagtgcggtggcgtgatctcagctcactccagcctccacttcccaggttcaagtgattctcctgcctcagccccccaagtaactgggattacaggcatgcaccaccatgcctggctaattttttgtatttttagtagagacggggctttgccatgttggccaggctggtctcgaactcctgaccttgagtaatccacccgcctcggcctcccaaagtgctgggattacaggtgtgagccactgagcccggccacagtgcagtatttctaaccagtgatcagggtaaagaggatgcgtgtccaccatcccagccctgatcagcctgtctgtgcatcccccatcccagccagggcttggagcagccttgctcaccactgtgtcccctgcattgtaacacatccaggcacaagaatagccgcccagtgactgccaagtgagtgaaccagcctgcttggagcctgcctctttcccaaactgctcattatcctgttaccccacccagcccacgtgtccaaatacactccagatgcaaaataaaaagctctacgacattggc

SEQ ID NO: 8791 - DNA, 257 bp, Homo sapiens
gcgagggctgtgccggtgcaggtctggtgggcggggccagggaaagggcagggccaagaccgggcttgggagaggggcgcagctaagactgggggcaggatggcggaaaggaaggggcgtggtggctagagggaagagaagaaacagaagcggctcagttcaccttgataaggtgcttccgagctgggatgagaggaaggaaacccttacattatgctatgaagagtagtaataatagcagctcttatttcctgagc

SEQ ID NO: 8792 - DNA, 253 bp, Homo sapiens
gcgagggctgtgccggtgcaggtctggtgggcggggccagggaaaggcggggtcagggcggggttcgcggaagaggcgggtataagaatggggggaagatgcgggaaaggaaggggcgtggtggctagagggaagagaagaaacagaagcggctcagttcaccttgataaggtgcttccgagctgggatgagaggaagggaaaccttacattatgctatgaagagtagtaataatagcagctcttatttcctg

SEQ ID NO: 8793 - DNA, 306 bp, Homo sapiens
ggtcccgccccgccccgccccgccccggcaggcccggccccaccccgccccgcccccgctgccttgcccatgggggctgtatttaaggacacccgtgccccaagcccacctggggccccattaaagatggagagaggactgcggatctctgtgtcattgggcgcctgcctggggtctccatccctgacgttcccccactcccactccctctctctccctctctgcctcctcctgcctgtctgcactattcctttgcccggcatcaaggcacaggggaccagtggggaacactactgtagttagatc

SEQ ID NO: 8794 - DNA, 279 bp, Homo sapiens
gggactctgcctccaacgtcaccaccatccacaccccggacacccagtgatgggggaggatggcacagtggtcaagagcacagactctagagactgtcagagctgaccccagctaaggcatggcaccgcttctgtcctttctaggacctcggggtccctctgggcccagtttccctatctgtaaattggggacagtaaatgtatggggtcgcagggtgttgagtgacaggaggctgcttagccacatgggaggtgctcagtaaaggagagcaattctta

SEQ ID NO: 8795 - DNA, 260 bp, Homo sapiens
ggcaagctggggcaaggggccgctcccattgcctccacccactcaccccctacagcctgaagcaaaccagcagcccagccttgcctctctgacccatgggctccttgagcctgcagctctgtaaccacagggctcctgtggggaggccttggcctgtgacagcccccaggcctgggggcacagatccccccagcaaggataacattcaaaggagctcacatttatggaatggatgaatcaataaattaattcactttaac

SEQ ID NO: 8796 - DNA, 225 bp, Homo sapiens
ctctcattggggagggcggaggtgctgacctggcctgggcctctggggccggcccctggctcagcccctccttccaggtcttgatgggagggaggagggcccagaagctggacaacttaagccactccttggcctcccccagccaggggcctgggcaggaaagatggggtggtggactgtttttgcctactttttgtttttgaaaaacatgcactccccactctg

SEQ ID NO: 8797 - DNA, 912 bp, Homo sapiens
cctttagccctgtccccactcacgtggcttctcagcgggctgcatggaatgtctggtagctcaccacacttctggcttccatttgtcttcactcaacgtcagggtgggggagtggtgctggccaatcacaggagagagcgtgagttcccagtatttattcctggctgcccttggctaaaggtcacagctcctgtcaccctgtcaggcagccctttccatgcccctgttcaggcctggggaggtaaaggctcaggctgttagtagccgcagagagccacactcaccttgtcaggagactcttctcaaactgtccttatgtgagtgcactgccatttcttgcagggaccctgactgacacaggggctactactgacactttacagggatggttctcccccgtgcagggccgctgtgcccactgcaggacatgcagcatccttcgccccactccactcactaaaggccagcgcaccccaggccccatagtattgctggttatggatttattgactttatgttccaaattcagctttttcagttggctgttttttgaaaggggataagctttgtcagtagagggcaccaaacaggcattataggaggaaaggcgcctccttcgtggttcttgttggttgtgcttctgcctctggacgccgcagtgcatgtggcttccccagcacccagctcctgaagcaccaggcggtcagcagctgcccttggcaccctccagccctcagaagttgcgtaggagacacagcgcctccactgaggcacctctctgggaataacgttccccagcaccccaaatggatttccagtcaattcagaagcattttaccagtgaagccctcattattccagttcactgttaaagccagtaattctctatattaaactttccctgttcaagtt

SEQ ID NO: 8798 - DNA, 359 bp, Homo sapiens
gttcctctgggagctgctcttgtgggttgatggagcgtccccaaagctcccagccctggggacggggaaggacatggagcctgagccagagaaccagctctgagtcctgaggagacacaggcctggggacagggagggatgggagtccctgctgaatatctggagaccctgacaggttgccctgggctctgggtgggccgggacaaaggcctctcatcaccacaggaagcgggggcttgcaaggaaagtgaatgggcctgtggcccacccggggtcaccaggaaaggatctgaataaagaggacccttcctctcattggctctttttctgctcacgggaacttagcagaaactcacctg

SEQ ID NO: 8799 - DNA, 1453 bp, Homo sapiens
tttttattatccacctgcagactggactggattcttctagctccttcaatcccattttctcctgtggcatcactaagtataagacctgctctcttcctgaagacctataagctggaggtggacaactcaatgtaaatttcaaggaaaaaccctcatgcctgagatgtgggccactcagagctaaccaaaatgttcaacaccataactagagacactcaaattgccaaccaggacaagaagttgatgacttcatgctgtggacagtttttcccaagatgtcccaagcctcatcgtgacgaggctcttatcccactccatttttccctgctcatgcctgcctctttaatttggtaagataatgctgtaactagaatttcacaatcagcgccttgtgcaggtaatttgacagagtgttggatgtgtcatgtcatcatgtcaaacccaaatatttgacctaagggatcctttattctgcccagtggctaactttaacaacatccctaatacaactgtttattcaaatgcacggtggtccctgttagagttagacctctagactcacctgttctcacgccctgttttaatttaacccagctatgggatgccagataacagaattgctgcctactagctgaacagggaggagtttgtgcagttgctgacacttcttgttgcacataaataaatacagtgggtactatagagactcagttgcaaaaattaacaaatatgctgcttgattaaaatgggtaggcttctcatgtggctcattctttaatctattctcttttatttggtttggttcatggggtctctgcctatggatcatacttcaaactcttggtgtgatcctcctgattgtcacaatattagttaccctggtgtgctgtattctctaaaacctttaaatgtttgcatgcagccattcgtcaaatgtcaaatattctctctttggctggaatgacaaaaactcaaataaatgtatgattaggaggacatcataacctatgaatgatggaagtccaaaatgatggtaactgacagtagtgttaatgccttatgtttagtcaaactctcatttaggtgacagcctggtgactccagaatggagccagtcatgctaaatgccatatactcacactgaaacatgaggaagcaggtagatcccagaacagacaaaattttcctaaaaacatgagagtccaggctgtctgagtcagcacagtaagaaagtcctttctgctttaactcttagaaaaaagtaatatgaagtattctgaaattaaccaatcagtttatttaaatcaatttatttatattcttctgttcctggattcccattttacaaaacccactgttctactgttgtattgcccagtaggagctatcactatattttgcagaatggaaactgccctgactcatgaatcacaaataaaagccaattgtatct

SEQ ID NO: 8800 - DNA, 67 bp, Homo sapiens
ccatctagctgcacccgacaagcacccagactctttcacataacaaataaaatagcagagttccctt

SEQ ID NO: 8801 - DNA, 160 bp, Homo sapiens
ggtgtcttctgggacctgccggcctcccgggccagctgccccacccctgcccatgcctgtcctgcacggctctgctgctcgggcccacagcgccgtcccatcacaagcccggggagggatcccgcctttgaaaataaagctgttatgggtgtcattcagg

SEQ ID NO: 8802 - DNA, 353 bp, Homo sapiens
cctcagccccaccacatcgcccatctcttccccgtcccccaggcccaggaccgcccctgtcagtccccccaattttgtattctggggggaggagccctctcttcctgtggccccaccttggcccccaccccctccactatctcctgccgcccccactctggctggcttctctcccctgccccaaacctctctcctctctcttttctgtgtcagtttctctccctctcctcacccctctatccattcctcccgccccagccacctccctgggctcttttttactccccttcagccccccggctgatgccatctctggttctggacaattatcaaatatatcagtggggagagag

SEQ ID NO: 8803 - DNA, 550 bp, Homo sapiens
ccacgggcggggctgtgcgggcgcccggactgaccgaagggacggggcccgccccaggccccagcagtctccgctcccgcagcgggcgcgggacaggacttgtgcgccggcgccccggacgccgcgattttgcctttggttccccgcgaagtccgaggcctggctctggagcccgcctgcgccccccagtggactcgcgagagggtgccgcgggcgagaagggcgcaggaaccgaggactccaggggctggggacttcgggggcggctctgggaagcggaaagcagtcagcggagaggaccccattctgggactgctcaggctccccaagacttgacgcagccccccacgcttctggaggtggggagggcctctggacagatgggtgtcccctggtgcccctccactcttctcttcctctcttttttggggggagaaacctcggaatttctatgagacctcccccagggagggggtcagttgggcccccatccctccccttgccacatcgcagcccctgttggaataaaaaaaagaacaaaaccccagaa

SEQ ID NO: 8804 - DNA, 3031 bp, Homo sapiens
tggcagcgggaatctggtgctgggggcagccggtgcagccccggggagccctggcctggtgacctcgccgctcttcttgaatcatgctgggctgcccctgctcagcaccccgcctggtgtgggcctggtctcagcagcggctgcggctgtggcagcctccatctccagcaagtctcctggcctctcctcctcatcctcttcatcctcatcctcctcctcctccacttgcagcgagacggcagcacagacccctggaggtccaggggggcccgaggcagggtccaaacctgagtgagggccagccatgcctcccctcccattcctctggtccctgccttggtcccttgcctgggaagagggcgaggaggccagtggtggggacgcagagggtcctcagagcaggagtgacaagggaggaaagaccaaaaaaacaaccaaccaaaaaaaaaaaaaaaaaggaaagaaactaaccaacaaaagagaaaaccaaaaataatcacaacagaaaccagctgccccaaaggaaccagaggtgaaaaacaaacaaaaaaaaaccaaaaacaaaccaaaaaaaaaaaaaacccacaaaatcaaacaaaccaaaaaaccagtcgcgagccagacctcagcgtgctcaccctcactgctacgacgccaaataaaaaccccagccaggggcggagaagcctccagcaggtcagacctcatgccaccgagccctggctgtgggaccaacccccaaccctgcctcccccgtgggggctacagaaggaaaaagagaagatgccagcttcctaatcccagcccccagccctgggccagcgaagacagggcacagcctgggcagatgggctggggcttagcaccacccaccaaatgttcttttccagaaggtgaaagagaaagggcctgaacaaccttacaccaaatattcagtagcttcatccaaaggatgtacagaatttttagcattgtgctcaacagaatgtgtccctaccatgtgtccccttctcccctggcccccagctctccccacctgggcagggggtcttgctttaacctcctccctccccccagcaggggagagttcaagggaaggcctgcggacaacttttcatcccctgttcctccctcttttcccctttgaagggtgggctaggccattttgccaagttctagctctcacaagtccctcctcaaccctgtcaccctcctctgctctggaactgactccctccccagcctatgggaaggtggaaatttcaggcaagaggggatgaagacattcagttgagggcattcagttgtctttttccatcctgtctgtttccctgaaaaaaaaaaaaattcatattccagtgcctatccgtgggatccttcacgttctttgacattaaccagaaaccaaaaagagaactcacctcgcttttcccaccctgtgcccctctggtactggcgaatgcctctccctccccccacatgcacgcacgcacacaccccagtggtggggttcctcgagatggcatccccatcagggtccatgtggtggggacagtgccacagcctgtggtccccatctgagagggcgcggtggtggccaccactcccacaagacctccacaactcttggctggaccctgtgtttgaccagccccggacacgtctccactgacgacggacagaggagagacaccactgggagccaccctgccctcctgctattgtggaggccaacaaagttttgaaccgaaaaccaaaaaaacagaaacaaacaaacaataaatttaaactagaaaaaaaatttatatatatatataaacatatatatatatatatatataaaagggaaagaagatgaggactcttcaagaataagatggaaccgcgaggcggagccaagcccctgcaccggtggtccaggcccttgttccccaaggcggatggaaggacggatgcttctttctcttcacaaatacctcatggacgttgtctttgggaaagccggagggggcggctggggcagggcctgtccctcggccagggcagatggaagcgggtgggcggggctgagagagggtatcagggacaggggtgaagagccccaaactcccctcccaaatcaactgaaaaagctttaaaaaaagacaggaaaaaaaggagtaagaaagcaaaaagaacagatgaaggaaaacttaacaacttttgggtggtttgattcctcctttgatttctttttcggttctcttttgtctgacctctctcctcccctccttcctctctcctcccctccttcctctctcctctcctccttcctgtctcctctctctccctttgctctcctctcttctctctcaatcttgttctttctgtgtctctcctcaaaccaaagtgttgcagtgaaggacacgagccattgaaatcagggtggggcctgacagccgtagtgtggcccctgccccttgttgggcaggagcagagagagaggagagccctgagaccgcagggctttggcctgggcagcttccactttctgccggacactctgaggagaggcagatggagctccaggcctcagcgttctcttttttccttgtctcccttctcccacccgggaaatgaaactgttgggctgggcgacggaggcagcagagactcggccattgcaggggcctctgggtgccttgtccgggcagtggtgaagtagccgcccctcccaccccggcacgatggggcctggcacctcgtctacccaacctcaccggaatgtaagcatctccgctgaacgactccctgcccttaccctacctctgagtttgtccatgtttatttcctgaagagagaagggactggcaagagggcttgggccccagcccaagggtggagagggggccaagggctcctgaccaaataggaaggacatttgagcagagcaaaatgaaaggaattacaaccaaaaaccccctccgagaagacaggcagcatggaaggcatggtggagatgactcaaacaaaaactatgattctagaccaa

SEQ ID NO: 8805 - DNA, 838 bp, Homo sapiens
tccaggactggcaggattgatcccacctccaagtctccgggccaccttctcctgggaggacgaccatctctacccctagaggactgtcactctagcatctttgaggactgcgacaggaccgggacagcaggccccttgacagcccctcccacaggatgtgggctctgaggcctaaaccatttccagctgagtttccttcccagactcctcctacccccaggtgtgcccccttagcctccggaggcgggggctgggcctgtatctcagaagggaggggcacagctacacactcaccaaaggcccccctgcacattgtatctctgatcttgggctgtctgcactgtcacaggtgcacacactcgctcatgctcacactgcccctgctgagatcttccctgggcctctgccctggcctgcttcccagcacacacttctttggcctaagggcttctctctcaggacctctaatttgaccacaaccaacctgggcttcagccacatcagtgggcactggagctggggtgcacatggggcctgctcaccttgcccacacatctccagccagccagggccctgcccagcttcaatttacagacctgactctcctcaccttcccccctgctgtccagagctgaacatagacttgcacttggatgtcacctggagtgtcacatgggagtgttatggcagcatcataccaaggcctactgttgcacatggggccaaaaccagtaaacagccaccttcttggaaagggaatgcaaaggctttgggggtgatggaaaagaccttttacaaatgataccaattaaactgccctggaaagggcataggtggg

SEQ ID NO: 8806 - DNA, 608 bp, Homo sapiens
gggccccaccaagcacccttccacttccatctgggagccccaagaggggctgggaaggggggccatagcccatcaagctcctgccctggctgggcccctagactagagggcagaggtaaatgagtccctgtccccacctccagtccctccctcaccagcctcacccctgtggtgggctttttaagaggattttaactggttgtggggagggaagagaaggacagggtgttggggggatgaggacctcctacccccttggccccctcccctcccccagacctccacctcctccagaccccctcccctcctgtgtcccttgtaaatagaaccagcccagcccgtctcctcttcccttccctggcccccgggtgtaaatagattgttataatttttttcttaaagaaaacgtcgattcgcaccgtccaacctggccccgcccctcctacagctgtaactcccctcctgtcctctgcccccaaggtctactccctcctcaccccaccctggagggccaggggagtggagagagctcctgatgtcttagtttccacagtaaggtttgcctgtgtacagacctccgttcaataaattattggcatgaaaacctg

SEQ ID NO: 8807 - DNA, 900 bp, Homo sapiens
gggctgtgggcaggggacctgtgtgccccgcaccccccatgcttcttttgctgccttaagccccctatgccctggaggtgagggcagctctcttgtctcttccctgcctcctcccttttccctccccacattttgtataaaactttaatttcttttttttaaaaatggtgggggtgggtgggtgcccagggctaggggctattccctgtctctgtgggtttctaagctctgggcaaagtggtggtagggggagggagggggaagttaagggggtcacctccattctggggaatttatatttgaattgaggctttggccttaacacccaggaacttttctattacaatcgcttaggaagtaaagccttgtctccctccctgttctctgcctcttgtacccctctgacccacccgctctgccccactcccagccctcctcagccccagccctgcctgccctgcccctccagggggccatgagtgcctaggtttctcataccccacaaggtcacagcaggggagggagggacaattttataatgaaccaaaaattccatgtgttggggggtggggggcggaggagggtgaggggtgccgcccatgggccacaaatctctacaagtgcctgctatccctctcccactccccaccccagcaccggtccaaccccttcatccccagctgctcctaggactggcccatgggcaggcgggtggggggatgggaagggggtgccctgaaaccaaactggaagccccctctgcctcccagctggggcctctggggtggggtggggggctgtggtcaagccttattctgtattggggactgagggtggggggagtagaggggccgctggagaatgtattcaaaacaataaaactttggacctttggatgca

SEQ ID NO: 8808 - DNA, 45 bp, Homo sapiens
gcatcctgctgccttcccacaacattaaactctccttcctcagtg

SEQ ID NO: 8809 - DNA, 131 bp, Homo sapiens
ggaagttccctgtcttccccgtccttttccaccagtctcgcctctggccttctctggccactcctgggagggactgcctcaccacccctgtcccgctgccagaaatacacccacaataaaaacctgaaaac

SEQ ID NO: 8810 - DNA, 297 bp, Homo sapiens
aagcctgttgttcccatctgcgccggcctccgtcatgaatgccttccgggccgggcggaaggggacgcgggctgtgccttacttaagtcgggggtggcaagggggcggggcgggggcccgaaagctgagaccctcgccacggggagggggacgcgcacacacaccggtcaccgagacggctggacctgcacgccaccgctgccttttgctgctgctgctgcggcgaccgccgcagggacggggactggccctcccttgcaggtcggtttggtttgttgtaaataaaagtatttaatt

SEQ ID NO: 8811 - DNA, 340 bp, Homo sapiens
gagctctgagcgcccactcttccaattaaacattctcagccaagaagacagtgagcacacctaccagacactcttcttctcccacctcactctcccactgtacccacccctaaatcattccagtgctctcaaaaagcatgtttttcaagatcattttgtttgttgctctctctagtgtcttcttctctcgtcagtcttagcctgtgccctccccttacccaggcttaggcttaattacctgaaagattccaggaaactgtagcttcctagctagtgtcatttaaccttaaatgcaatcaggaaagtagcaaacagaagtcaataaatatttttaaatgtc

SEQ ID NO: 8812 - DNA, 1922 bp, Homo sapiens
atgaatgaagttacttattctaccctgaactttgaagcccagcaacccacacaaccaacttcagcctccccatccctaacagccacagaaataatttattcagaagtaaaaaagcagtaatgaaacctgtcctgctcactgcagtgctgatgtatttcaagtctctcaccctcatcactaggagattcctttcccctgtaggggtagaggggtggggacagaaacaactttctcctactcttccttcctaataggcatctccaggctgcctggtcactgcccctctctcagtgtcaatagatgaaagtacattgggagtctgtaggaaacccaaccttcttgtcattgaaatttggcaaagctgactttgggaaagagggaccagaacttcccctcccttccccttttcccaacctggacttgttttaaacttgcctgttcagagcactcattccttcccacccccagtcctgtcctatcactctaattcggatttgccatagccttgaggttatgtccttttccattaagtacatgtgccaggaaacaagagagagagaaagtaaaggcagtaatgccttctcctatttctccaaagccttgtgtgaactcaccaaacacaagaaaatcaaatatataaccaatagtgaaatgccacacctttgtccactgtcagggttgtctacctgtaggatcagggtctaagcaccttggtgcttagctagaataccacctaatccttctggcaagcctgtcttcagagaacccactagaagcaactaggaaaatcacttgccaaaatccaaggcaattcctgatggaaaatgcaaaagcacatatatgttttaatatctttatgggctctgttcaaggcagtgctgagagggaggggttatagcttcaggagggaaccagcttctgataaacacaatctgctaggaacttgggaaaggaatcagagagctgcccttcagcgattatttaaattattgttaaagaatacacaatttggggtattgggatttttctccttttctctgagacattccaccattttaatttttgtaactgcttatttatgtgaaaagggttatttttacttagcttagctatgtcagccaatccgattgccttaggtgaaagaaaccaccgaaatccctcaggtcccttggtcaggagcctctcaagattttttttgtcagaggctccaaatagaaaataagaaaaggttttcttcattcatggctagagctagatttaactcagtttctaggcacctcagaccaatcatcaactaccattctattccatgtttgcacctgtgcattttctgtttgcccccattcactttgtcaggaaaccttggcctctgctaaggtgtatttggtccttgagaagtgggagcaccctacagggacactatcactcatgctggtggcattgtttacagctagaaagctgcactggtgctaatgccccttggggaaatggggctgtgaggaggaggattataacttaggcctagcctcttttaacagcctctgaaatttatcttttcttctatggggtctataaatgtatcttataataaaaaggaaggacaggaggaagacaggcaaatgtacttctcacccagtcttctacacagatggaatctctttggggctaagagaaaggttttattctatattgcttacctgatctcatgttaggcctaagaggctttctccaggaggattagcttggagttctctatactcaggtacctctttcagggttttctaaccctgacacggactgtgcatactttccctcatccatgctgtgctgtgttatttaatttttcctggctaagatcatgtctgaattatgtatgaaaattattctatgtttttataataaaaataatatatcagacatcg

SEQ ID NO: 8813 - DNA, 392 bp, Homo sapiens
gagatttatggaaaggtctcttacaaggactcttgaatacaagctcctgataacttcaagatcataccactggactaagaactttcaaaattttaatgaacaggctgataccttcatgaaattcaagacaaagaagaaaaatactcaatgttattggactaaataatcaaaaggataatgatttcataattttctatttgaaaatgtgctgattcttggaatgtttcattctccagatttatgaacattttttcttgagcaattggtaaagtatacttttgtaaacaaaaattgaaacatttccttttgctctctatctgagtgccccagaattgggaatctattcatgagtattcatatgtttatggtaataaagctatttgcacaagttc

SEQ ID NO: 8814 - DNA, 460 bp, Homo sapiens
acagttgctttgattcttcctcaaactacttacaatcacctacagtccaaaattgctttttcttcaaggagatttatggaaaagactctgacaaggactcttgaatacaagttcctgataacttcaagatcataccactggactaagaactttcaaaattttaatgaacaggctgataccttcatgaaattctagacaaagaagaaaaaaactccatgttattggactaaataatcaaaagcataatgttttcataattttctatttgaaaatgtgctgattctttgaatgttttattctccagatttatgaactttttttcttgagcaattggtaaagtatacttttgtaaacaaaaattgaaacatttgcttttgctctctatctgagtgccccagaattgggaaactattcatgagtattcatatgtttatggtaataaagttatctgcacaagttc

SEQ ID NO: 8815 - DNA, 668 bp, Homo sapiens
attctactagttcctccaattccattttctcccatggaatcacgaagagcaagacccactctgttccagaagccctataagctggaggtggacaactcgatgtaaatttcatgggaaaacccttgtacctgacatgtgagccactcagaactcaccaaaatgttcgacaccataacaacagctactcaaactgtaaaccaggataacaagttgatgacttcacactgtggacagtttttccaaagatgtcagaacaagactccccatcatgataaggctcccacccctcttaaccgtccttgctcatgcctgcctctttcacttggcaggataatgcagtcattagaatttcacatgtagtagcttctgagggtaacaacagagtgtcagatatgtcatctcaacctcaaacttttacgtaacatctcaggggaaatgtggctctctccatcttgcatacagggctcccaatagaaatgaacacagagatattgcctgtgtgtttgcagagaagatggtttctataaagagtaggaaagctgaaattatagtagagtctcctttaaatgcacattgtgtggatggctctcaccatttcctaagagatacagtgtaaaacgtgacagtaatactgattctagcagaataaaacatgtaccacatttgct

SEQ ID NO: 8816 - DNA, 323 bp, Homo sapiens
ctgcaacaactgagacactgagaaaaagaacaggctgataccttcatgaaattcaagacaaagaagaaaaaaactcaatgttattggactaaataatcaaaaggataatgttttcataattttttattggaaaatgtgctgattctttgaatgttttattctccagatttatgaactttttttcttcagcaattggtaaagtatacttttgtaaacaaaaattgaaatatttgcttttgctgtctatctgaatgccccagaattgtgaaactattcatgagtattcataggtttatggtaataaagttatttgcacatgttcc

SEQ ID NO: 8817 - DNA, 1111 bp, Homo sapiens
acagttgtttttattcttcctcaaagcatttgcaatcagctaccattcaaaattgcttcttcttcaagatttatggaaaatactctgacgagtactcttgaacacaagttcctgataactttaagatcacgccactggactgtctatgaacttgcaaacaggctgatacctttgtgaagttgcccaccaaaacacagaaggaaaaaaacatgaatttcattgaactaaataataatgaggataatgtttttaagatttttttttttttttttttgagatggaatctcgctctgtcgcccaggctggagtgcagtggcacgatctcaactcactgcaagctccgcctcctgggttcacaccattctcctgcctcagcctcctgagtagctgggactacaggcgcctgccacaacgcccggctaattttttgtatttttagtagagacggggtttcactgtggtctcaatctcctgacttcatggtccgcctgcctcagcctcccaaagttctgggattacaggtgtgagccaccgcgcccagcccgtttttaagattttttatttgaaaaattgccaattctttaagtgttttctttttcagatttatgaatttctttatcttttaagctatctataccttactgcaatttggtaaagcagacttttgtgaacaaaaattataacatttacttttgctccctacctgactgccacagaactgggcaactattcatgagtattcatatgtttatggtaattcagttatttgcacaagttcagtgagaatctgctgtctttataatgggatatagtttaaaacattggttatattaccaaggctttgattgggatgttatatttgagaaaatacagagaatgatagattaacggagtgtctaatctatcgtgtcaaccccaaatttttacgtatgagatcctttagtccacccaatggctgacagtaacagcatctttaacacaactctttgttcaaatgtactatggtctcttttagagtcagactcctagactcacttgttctcactgtctgttttaatttaacccaggcatgcaatgctagataataaaattgctccctattggctgatca

SEQ ID NO: 8818 - DNA, 448 bp, Homo sapiens
acagttgctttcattcttcctcaaagtatttaccatcagctacagtccaaaattgctttttgttcaaggagatttatgaaaagactctgacaaggactcttgaatacaagttcctgataacttcaagatcataccactggactaagaactttcaaaattttaatgaacaggctgatacttcatgaaattcaagacaaagaaaaaaacccaattttattggactaaatagtcaaaacaatgttttcataattttctatttgaaaatgtgctgattctttgaatgttttattctccagatttatgcactttttttcttcagcaattggtaaagtatacttttgtaaacaaaaattgaaacatttgcttttgctccctaagtgccccagaattgggaaactattcaggagtattcatatgtttatggtaataaagttatctgcacaagttc

SEQ ID NO: 8819 - DNA, 857 bp, Homo sapiens
gtggagtctatctggcattcagagaagagtcaggaaaacaattgtattcccagcctgtgtcccatgggcacaagcaaatcccaaattctcctcctgaaccctccaaatttgtctaagaacttcgaaaactttaacaaacaggctgatatcttcataatattcccagcctagaccaagcaggaagaacattgatttcattgaaataattgataataatgaagataatgtttttatgatttttatttgaaaatttgctgattctttaaatggtttgttttctacattgatggaatttttctcttttaatctatctacagcttatagcagttcaataaactatacttctgggaaccgtaattgaaacatttacttttgctttctacctgactgccccagaattgggcaactattcatgagaattgatatgtttatggtaatacacatatttgcacaagtacagtaacaatctgctttctttgtaacatgacacatttgaaatcattggttatattaccaatgctttgattcggatgttatattaaaaacatagatagaatgaaccaatatgaactgcaggcaaagtctgaagtcagccttggtttggcttcctattctcaagaggtttgtgaagatttaatctcagattccttataaaaacttagagaaaagaaaattttagaagacagcctacatggtccattgctactcttgctgcacttatgtaaacaatcagaccacatttgaagaaactccacctattttgcaaacaaacttattctactgaaattatcattggtaaaagtagagatgcccatagagggaaaaattatgtggaaaataaaaactgtagtatacct

SEQ ID NO: 8820 - DNA, 324 bp, Homo sapiens
tggctgccacaatagagacactgagaaaaagaacaggttgataccttcatgaaattcaagacaaagaagaaaaaaactcaatgttattggactaaataatcaaaaggataatgttttcataattttttattggaaaatgtgctgattcttggaatgttttattctccagatttatgaactttttttcttcagcaattggtaaagtatacttttgtaaacaaaaattgaaacatttgcttttgctctctatctgagtgccccagaattgggaaactattcatgagtattcataggtttatggtaataaagttatttgcacaagtt

SEQ ID NO: 8821 - DNA, 38 bp, Homo sapiens
cctcccaaagtgctaggattaaaacatgacccaccatg

SEQ ID NO: 8822 - DNA, 674 bp, Homo sapiens
attctactagttcctccaattccatcttctcccatggaacctcaaagagcaagacccactctgttccagaagccctataagtcagagttggacaactcaatgtaaatttcatgggaaaatccttgtacctgatgtctgagccactcagaactcaccaaaatgttcaacaccataacaacagctgctcaaactgtaaacaaggaaaacaagttgatgacttcacactgtggacagcttttcccaagatgtcagaataagactccccatcatgatgaggctctcacccctcttagctgtccttgcttgtgcctgcctctttcacttggcaggataatgcagtcattagaatttcacatgtagtataggagcttctgagggtaacaacagagtgtcagatatgtcatctcaacctcagacttttacataacatctcaggaggaaatgtggctctctccatcttgcatacagggctcccaatagaaatgaacacagagatattgcctgtgtgtttgcagagaagatggtttctataaagagtaggaaagctgaaattatagtagactcccctttaaatgcacattgtgtggatggctctcaccatttcctaagagatacattgtaaaacgtgacagtaagactgattctagcagaataaaacatgtactacatttgct

SEQ ID NO: 8823 - DNA, 454 bp, Homo sapiens
aaagttgctttgattcttcctcaaagtatttaaaatcagctacagtccaaaattgctttttcttcaaggagatttatggaaaagactatgaaaaggactcttgaatacaagttcctgataacttcaagatcataccactggactaagaactttcaaaattttgatgaacaggctgataccttcatgaaattcaagacaaagaagaaaagaactccatttcattggactaaataacaaaaggataatgttttcataattttttattggaaaatgtgctgattttttgaatgttttatcctccagatttatgaatttttttcttcagcaattggtaaagtatacttttgtaaacaaaaattgaaacatttgcttttgctctctgagtgccccagaattgggaatctattcatgaatattcatatgtttatggtaataaagttatttgcacaagttt

SEQ ID NO: 8824 - DNA, 557 bp, Homo sapiens
gcttctccacctggaaatttccctctcacctacttctctggccctgggtacccctcttctcatcacttcctgttcccaccactggactgggctggcccagcccctgtttttccaacattccccagtatccccagcttctgctgcgctggtttgcggctttgggaaataaaataccgttgtatatattctgccaggggtgttctagctttttgaggacagctcctgtatccttctcatccttgtctctccgcttgtcctcttgtgatgttaggacagagtgagagaagtcagctgtcacggggaaggtgagagagaggatgctaagcttcctactcactttctcctagccagcctggactttggagcgtggggtgggtgggacaatggctccccactctaagcactgcctcccctactccccgcatctttggggaatcggttccccatatgtcttccttactagactgtgagctcctcgagggcagggaccgtgccttatgtctgtgtgtgatcagtttctggcacataaatgcctcaataaagatttaattactttg

SEQ ID NO: 8825 - DNA, 1067 bp, Homo sapiens
ccagcgctgccccccttgctgctcctctctgtctcccctgctctgtgcctgcctttttctctgtccttgtttcctgcctgtcatgttcttctgaatagtaacaacaagagctgatactaatgaaacatttactatgtgccagatatggtcctgaatatttcatgagcatttcctcactgaatccttacaacaaacttatgaggcaagttctattacgttttttttttttcacgttataaataaagaagctgaaggtcaaggtgcttaagtaatcttttccaagtttccttagtaagggacagagccaggatttttttatttttattttttgagatagcgtctcactctgtcacccaggctggagtgcagtgacacgttcacagctcactgcagcctccacgtcctgtgcttaagcgatcctcccacctcagcctctcgagtagccgggaccacaggtgcgagcccctacacctggataatttttgtatttttagtagagacagggtttcacctggtcttaaactcttggattcaagcgatcctcccaccttggcctttcaagatgctgggattacagacatgagccaccgtgcctcgccacagccaggatttgaacaaacttggtattcaccaccacattctttgcctctattccaaaaagatgcttcatcagatccttcctgggagcctcacattcaagggtctgacttgtgagacccttgggaaaaaatgggcatgtttgaccatatttaacacagagtttcccaaagttttggattagaaagctcggccgggctcggtggctcactcctgtaatcccagcactttgggaggccgaggcaggcagatgacctgagtttgggagtttgagaccagcctgaccaacatggagaaagcccatctctactaaaaatacaaaattagctgagggtggtgacgcatgcctgtaatcccagctactcgggaggctgaggcagagaattgcttgaatccgggaggcggaggtggcggtgagccgagattgagccattgcactccagcctgggcaacaacagcaaaactccatc

SEQ ID NO: 8826 - DNA, 130 bp, Homo sapiens
tctcacttctgtcagatgctcccatccactattaatgcactaggtgggaggagagggcggcaatgacactgcacctctcctttcccaccgcattccctggagctccctaaataaaactttttttaacgtg

SEQ ID NO: 8827 - DNA, 80 bp, Homo sapiens
agtatgtgctatacacacacacacacacacacacacacacacacacacacgatgcatttaataaagatgagttggttctc

SEQ ID NO: 8828 - DNA, 152 bp, Homo sapiens
ggagtgggagggggcttgggagtccagactctgacaggggatgcctgggcttaatcctgggtgcttgaaggggatgtggactcttgacttccagctgggatgtgtgacttcttatcacctggattcagagagtctgggggacaggaatcctg

SEQ ID NO: 8829 - DNA, 392 bp, Homo sapiens
gcagagcccccatacggggagcttggcagaaggggtggggtgggaggagggggctgaggaaattggggttgtgacagtggtcatgggggatggggtactgccggtctgtgttgtcttagaagtagatgtgtgatggccagaataaaagccaaaatctgtatctgtgtgtgttggttcagagtgtgtgtgtgtgtgtgtgtattcccgcccgtgtgtgtgtttgtgtgtgtgtgtgtgtgtgtgtattccccctgggctccttcttggggaaccttggggtcttttgggaaagataacatttactgcgtgcttgtattcgatgaggtttccatgtatttacttacagaccccataatgtaaaggctctaataatagaattttgtttctcactc

SEQ ID NO: 8830 - DNA, 960 bp, Homo sapiens
ccctatccccaccccaggcctaggcctgggcctgggctggggtcccccccactgccagctgcaaggaaccagcaaagacatttaccagagtctgggatggtgggcttctccccccaccactaacacctcagacgcttgggcagggatgggggtgttggatgcctggatctctgtaagggccagaagtgagggcccagaggtctgggtcccccagggggcaggggccaaaggtccagaccccccaagtccagtgagggcagtagggattgggttgggggaagataactgggggaaggccagggcccctaggctacaaaaccaggtcttgtggggagggggtcagtttctgggaagggtggggggggcagggaaggggaacacagatttctttgggggtcctagaccccatgccagccattgtaagagttccacagagctctgggcacttctttgcaaagccatgtttgcacggtggggggatgggtggggggagggcgtggaaatagggattctgtgtctttgtgtcataactttgatgggggcagtgagggagacagccccaacccttttctccaatcccccttccccaggttcctgggctccccttctctctaccttctcccccaacgtctgtcccatccatatttgtctctctgtccacccactcctgggggggccttccccatctctcctccaggccccccggggagggggaaaggagtttggggaggattcgtggtcttcatggttttatatataatatattaaaaaatcaaaagtctgtatgaaaatatcagattgcacccccctctccccattcctggcttttgccccctttttcttgttaaaaaacaaaaaacaaaaaacaaaaaaccacacacacattttgtacggggtggggaggggaatggggagggggtttggcaatctcactaaccaccattaaactgaggagagaac

SEQ ID NO: 8831 - DNA, 361 bp, Homo sapiens
atgccatgtggagatagagccccagatgtttcagccatctcagcccaggcaccagacaagtgggtgaagaagccaccttggacatgtagccccagcagatgtgatatagagaagaaacaggaaacttggctatattagtttcctagggctgcctgtgataaattattacaaactttataaactaacacattgtgtgcctatatcaaaacatcatggaaggacaggcacagtggctcatgcctgtagtcctagcactttgggagggtgagaaaggaagatctcttgagctcaggagttcaagatcagcctgggcaacacagtgagacctcatctccactaaaaataaaaaaaaattggctgg

SEQ ID NO: 8832 - DNA, 310 bp, Homo sapiens
acctgaaatccccctctctgccctggctggatccgggggacccctttgcccttccctcggctcccagccctacagacttgctgtgtgacctcaggccagtgtgccgacctctctgggcctcagttttcccagctatgaaaacagctatctcacaaagttgtgtgaagcagaagagaaaagctggaggaaggccgtgggccaatgggagagctcttgttattattaatattgttgccgctgttgtgttgttgttattaattaatattcatattatttattttatacttacataaagattttgtaccagtgg

SEQ ID NO: 8833 - DNA, 447 bp, Homo sapiens
ggccaaggagaggaatgtcatgcaggggacctcctgggtccgcagtgtactgcgagggagcacagatgtccatcccccgctggggtggagagcggcagcaggcctgatggatgagggatcgtggcttcccggcccagagacatgaggtgtccagggccaggccccccaccctcagttggggctgttccgggggtgactgtgagcgatcccaccccaaacctgagatggggtagcccgtcctgtgtcctccacagggacaagcagtgggaggagtctgaatggtcaccaggaagcccgggctccatcttgacctcctttttcagggacaggagcaacaggcccctcttccctgactctaagcccttccctgtaaggtgaggcagggtctggagagctctttattggaacagatctggtggttcaaataaacacagtcatgcaagcctg

SEQ ID NO: 8834 - DNA, 555 bp, Homo sapiens
gacccacgaggaggaaccaggctactttccccagtactgaggtggtggacatcgtctctgccactcctgacccagccctgaacaaagcacctcaagtgcaaggaccaaagggggccctggcttggagtgggttggcttgctgatggctgctggaggggacgctggctaaagtgggtaggccttggcccacctgaggccccaggtgggaacatggtcacccccactctgcataccctcatcaaaaacactctcactatgctgctatggacgacctccagctctcagttacaagtgcaggcgactggaggcaggactcctgggtccctgggaaagagggtactaggggcccggatccaggattctgggaggcttcagttaccgctggccgagctgaagaactgggtatgaggctggggcggggctggaggtggcgccccctggtgggacaacaaagaggacaccatttttccagagctgcagagagcacctggtggggaggaagaagtgtaactcaccagcctctgctcttatctttgtaataaatgttaaagccag

SEQ ID NO: 8835 - DNA, 1350 bp, Homo sapiens
accgcccctccaggatgctggggacagggctcacacacctcattcttgctgcttcagcccctatcacatagctcactggaaaatgatgttaaagtaagaattgcactcctgtccctctggccttccatctctcccgcccttgtgccccacaacctggccaacagtactggaagaaactggacacagtcaccagcatccccggggagggcaaaacagccatgtcgtgccccgatgaagagcaattctgatcacagctgttactcactgagcaccagccaggcaccaggcaccccataacacggcttcctgtgctctccctccagagcctgtcgcagctctaggagggagctatacaatgatgtctttattagtgtcatcatgagaagcccaataagcagtatgccctaacagttagtaggccaggctctggagctaagctgcatgggttcaaatcccagctccaccattcagcctgcagagaccatgagcgagttacttaagccaggctctggagctaagctgcatgggttcaaatcccagctccagcattcagcctacagagaccatgggtgagttacttaagccaggctctggagctaagctgcatgggttcaaatcccagctccaccattcagcctgcagagactgtgggtgagttacttgagctctctgtgccaatattttctcacctataaggtggaggtgaaaataaactctataacatgacaagaactacttcacagtagttgcagtgaggattcaacgagatgaacatttagtacttgggacacagcagtggcccagtgtaaatgggctacttgtcataagccctaagtcacaggtcaacaaactgagaggcaaaagcacttggttgagcttgtgtatctagtgagtatggattcagggaccagattcccagccccacgaactgctaagcaaccccacctcctaaacacatgagtgccgattaacttcacagaaaaacacacaaggcaaagttcagcgaggtgaaattctccaagctataaagatcagggaagacttcctggaggaattcacccttgagcaaaatcctaaaggatcaatagtagctggcaaaaagaagcaggaggaagcgcattctaggtagaggagacagcctggacaaaggtctgagggaggaaggagcacaaggagtgcaggacactttcatgagtgcaggacactttcataactgcatgaacttcatagagatgggatcctttagcatgttctctgtgcacatgcttgaccatgttctttcacatgctttttgccacttgatctttccagcaactcagtgagagaagcaaaaaagtaagttgcatcctg

SEQ ID NO: 8836 - DNA, 192 bp, Homo sapiens
tgagagggaaagcctttagccatggcacatttttactgttgtcactattatgatgctatagtgaagattaaactagttaatatagaatataaatacttggaaaggcatctggcacatcgtatttgcttactaaatacattatttttatgataattgttagaattactaaaaataaatcttatagaaggaaga

SEQ ID NO: 8837 - DNA, 758 bp, Homo sapiens
aatatgttttactatctcagatgggtgctgaaatattttaataatcagagctatcatagacaaaacatttgttttatagagtcagtagttcagccaagtgattgggagaccacacagcagagaagcctcacaagagtggagacatatggactgcattcagaacattgaccattagctgatacatgcagacaagaggatcaggaaggatgagtctgatctggagtaaatcagaagtactaagatagaaatgctgaattctgttccactagaatataagatccaagagggcagggactttgttgactgccaaatctactctgccttttcagtgcctaatacgttgtaatttttcagtagtatttgaaattactgtcatatttgaaattcagtaatatttgacatttttatttatctctagaagtttctctaaaattgtactcagaagaattctgcaaggcttggaggatatataagttagtcatatggcctgattttcccatttttgcagatctcgtggacaagtgtttatcaaactgaaggttgcagcttgttagtgggttcagaaatcagtttctggctagcaactagaagttttgtatgttaacagtactttattgaggtgtaatctgcatgcagtaacatgcacaagtctcaagttcatggctttctgaattttgacaaatgtaatcatcaccaagatcaatgtatacaatatgtctattaaaccaaaaagttttcttgtgcccatttccagtcaa

SEQ ID NO: 8838 - DNA, 771 bp, Homo sapiens
aaatgagaggtgtggttcagccttcagttagagctcacatctttgtctccgttgggaagtccatgctgatgattgtgaaaagttcctttaaaactagaagcttcaaagaatcttgacaggaaagaagtctctcaaatgctgtgttttagacttggttaggacatgaattctttacaaacgtcatatttcacagatgcgagaaaactttgttctgtaaatatgatcagtgtttatatcagagtaccaggtgtcccggttctcaagatgtaacacagcagaaaagtcttgtcggagtctgcacaggagagaggccttcctttaacaaaagtatgattgacagaaaaaatggatgtcaactaaaatgtaacctctatgtaaggaggtgtttttcaccactctatctctaccatgtagaattgtgcttggctcataatagggcccagcaattactgaagaaagtgaagaaaatacctataattaggacaaatacttgaaaattctagtctgttttctactctaaatttatattaatttatattcaaaaggaatcctgcaagtagccttaataacgttagtttcagtaagtactgaaaagtatataatactgccatccatactaacacaaatttggaaaaaagacatgaatggctcccatccttcagccttagttctttgtacagtgtatcatcagttgtgtacagtatgatttttagtgtcagtttatagactgaacaatactgtttttatctaatgtgaccctgcaatttacat

SEQ ID NO: 8839 - DNA, 880 bp, Homo sapiens
agtcctcaaatgggagctgaaattttccagtcactagagttctttcagtagaaaaagaatttttaaaaattaaaatgtaatgttgctgcccaacttcaacattcataatggccaggagaccacacaacagagacatttaatgagaggggtttcacgagggattttgttagaactttaacatcagtcattgcacaggagctaaggcttataaaatatgagtatggtcaggaatttaataaaagtacagtgatgagcatgcctaaatccatgttctctagaatgtaagcttggtgaaagaagggactttgttcattgctagtctacaaaactaggacatttcataacgcaatgtaggtgctcagtactttttgctaaataactaaaagtatgtaaaggtaaaaggtttgaaatttttaagcgcattttttaaaacttaaaatgtatttggaggagaaatcctgcaagtaatcttaataaaatcatttcaagtaaatatttgaaatgtagaacaataagcattatgatgatctgaaataacattaatttgattgtaaccctattggggttagttcccaccctttgttccatcttgagcagagatgtgctgcatttcttaacgtttggtctctatacattataccatctgctgaagtttagctttgtgtgtgtgtatatgtacccatgtgtgcacttgaaatatcagtacaaactgataaacaatgtttctggttaatgttgcaaaaatggaacactgtattttacataattgattttctactcctgccctgtgaattaaggcagagttttactgtaatatttgcaagtatccaaaatggttactgatgacaaatactttttaataaatgtcaaaatcacaata

SEQ ID NO: 8840 - DNA, 826 bp, Homo sapiens
atgtagtaagtcagggttcaattagtaaaacagaagccacactgtattccagatgatagaggcttactcagcctgtgggagggctaggggagcaaaagacagggacactgccatcgataatgtcagcctgcagcactgaagtgtgccaggcaaggactgtggatttcaagaacttctgtgaagctcccatcaactgctgtatgctacaatggcaaagaggttacttttgacaaatgggtggtttgtggtagtggttgtagttagtggtcaaatttccattaaagggtgtgtccaggaaggaaattctaattgggatgatcatggtaaggtcttcagttcagccaacgtctttagatttttttttagtccccagtagaaaaatactctctgtatgaagaacattcaaaagtgtgctcaaaaatgaaacccatgctcttactatgaaagaacgttagtacccaggttttccatgagattctctacacaggcaagaagctccatagaagtggcatttgaagggtgtggcagaggcagtgctgtgtttatcacactggttccatttccttgcaaataagaagtctatttcccagtaacccttgcagttaagagtgtgcccatgtgattgagttctagccaatggagtgtgagcaaaagtgatataagccactttcaggtctagcctttacaaacatcctcaggcttctctatccctgccaaggtgaccttggaggctgcttattccagactgggttgatagaaggtcactacttcatctgtgttggatttctttttagagtaagaaataaaagttcattgtgtctcacca

SEQ ID NO: 8841 - DNA, 2052 bp, Homo sapiens
atgtacatagaggattccatctgggactcagagctttctatccatctgagagccaacacaggagaaaaaccataggaaagtgacatgtaggagggctataggagaaactgatgattttacattttctagtctgcataggaagggaacacctggacgtgtgataaataggttagcacttcagttacaaacttcagtctttaagagtctgttgtgcagcggagtaggctttaaagaaacagtgcagcagtggtttcagtaataatcctcacttccatcagaatctgcctgggagggagcttttacaatgtacaagtggtgagaatgtttccaaggtgctaattatggacatagattctttgtgtgggttgatagctaccaatgggacagtgtagaaacaagtttccacctttctaaaaccagtttggtacatatctttttaaagatcgctttataaaaacaaaaagataacattaacatttattgaaacaagtcactctgagaagaccaggaacaaagttctcttggcagatctgggtaatgtgtgtgtctcacatttttatcatgtttttatgactgttttatcttgcaggtaagctttacagctttcagaggagttgtagtacactacagaaatatgtcttctttccaggttcaaaaagcaaaatctgattggcattgcattgaattattaattaaataaatttattaattggcattgcattgaatttataggttaattttgaaagaatgtggcgtctttgaaatgctgattttttttcactttaaaaaaatgacttttttttttttaccactgatagtatttcatatggtccctcagtaatatttcttagagatggttaaaaataggttctgagtcatcttaagcatatttctaggaatttgttttattgctgtcatgaatataatggttttgctccagttcatttcatggtttaacatatcaaatattaggtatcttaaaaatcacaaatgctatttcaccctgcaggttagcagtattaaaatagaaacatcaaatcccccatcagtgggggcgggggggggggttgtagaaacagtctgatatggtttggctctgttccccacccaaatcccatctcaattttaatccccatgtgtcagaggagggccttggtgggagatgactggatcacgagggcagatttctcccttgctgttctcatgatagtgagttctcatgagagctgatggttttaaggtgtagcccttcctcgctgtctctctcctgtccccttgtgaagaaggtccttatttctcttttgcgttctgccatgactaagttttcggaggcctccccagccatgtggaactgtgtgtgagttaaacctctttcctttgcaaattacctagtctcaggtagttctttatagcagtgcaaaaatggacgtaataagtcttatgtacttattggtgagagagaaaatccgtgcattgttttcaaaagaattcattaacgtatcaattcaatttctataacctttgaagtggcagtaaatatgtagtaattgatacttgggagatagttgcccacttgggcaaaaacgcatgcagaaggcggagtttttaaatttaaaacatttttaaaatagcaaatgttaatattccagtttccattggtaggaaattttttaggtaagttcaggcatatgtatgcaatggaaagccactagaaatcttcaggcacacagataatgacaatgcaggttgctcatgaagtatttagtgaaccaggagagttttagaacaacaattatagcatgaccccattttgttagtatgtttttctgtgtgtatgtttagagcaacagagaaaaaaagatgtgggagaggacatataactacttatctctagtggtgggattctgaatgtataatacatatgttgtacttttatgtatttcactttgtaacaaagtatctttcagttttataataacagtagagctattttttataaattagcctgatggaacaatcccttatgattaaagattcatgttgtaacctcta

SEQ ID NO: 8842 - DNA, 758 bp, Homo sapiens
tttgtaaatcagctgggatttcttcctttttatttcattcttttaaaaaatttattttaaggtagtacatgtagttggaagaactactataaaaacaatatatgtgggaaaacttccagccctctgttaattgtgtgtctcaaatttgttctggaaaagaaagggggaaagtctatgaacgacttttcaacctggcaattccatatacaatgttaaacttgattcttatgacatattcctatgaaaataataaatactggcacttttccttgcagaaagcactcagacctgaatcagagaaaatcatatgccaaagccaactgccagtgttagacctctttttccataaagagtaaatggaatgctaacactagtgggcttattgagaaaatttaaaggttgctgtagtgtttagaacttaggctggaaaaccatattttagtgcatcattttactacatgatcttccaattagatagcttgtaatctgttccttacagcacttgctgttgttacatgtgaagattttataaattttaggaaagtgtctatgatatatagtgaaaagtgtgggaaaagaatatagaaataatattcacttctaaaaccattatgataaaatatttgtgtatggattagaatagaaagggattatggatgtatctattcaatttctcagtttatgttgggccttcctttttggaatgtacgctgttatgctatgataaatgatataatgagtaaaaattattcaaagcc

SEQ ID NO: 8843 - DNA, 100 bp, Homo sapiens
gcccaggaaagcccccctcactgtccctggtaccgctgccaacacccattgacctcctcgtttttgcccgccttctccaagtaaattttcccttttattt

SEQ ID NO: 8844 - DNA, 35 bp, Homo sapiens
atggaggacttggcgggcagcaggaggcaagggtt

SEQ ID NO: 8845 - DNA, 263 bp, Homo sapiens
gcctgcctcgcacctgctgagccgcactgctgcccctggcctcaccggcctcaggagacggtggggccgctgcatttcggggtggtcttgggaatcccaggccctaggggtcacatttgctcaggaagtgggtatcaaattgaggtgggggtgtcagaggaggcaaaggggtcccagctgcggtcaggactgtggtgggattcccgcctcggcagcgtcactgcccagtagctgctcaataaaggctgtgtgtgtggaatctg

SEQ ID NO: 8846 - DNA, 448 bp, Homo sapiens
gggtcacccaaccgccggccttagtgaccccatctatgctgctgacaagccaacctcccgtacggcgcccctcctgactccctgcctgggaccacacacccctgggatagaaagacccttagatgtcttttcacccaaccccaaactccctgtacagaagggaaacaaacgccaggcacggtggctcatgcctgtaatcccaacactttgggaggctgaggccggaggattgcttgagcccaggagttcaagaccagcctgggcaacatagtgagacctgccccctatctctacaaaaaataaaaaattagctgggcacggtggtgtgtgcctgtagtcccagctactggtgaggctgaggctggaggatcactggagttcgaggctgcagtgagctatgactgtgccactgcactccagcctggtcaacaaagcaagaccctttctc

SEQ ID NO: 8847 - DNA, 336 bp, Homo sapiens
gcgcctgcccacctgccaccgactgctggaacccagccagtgggagggcctggcccaccagagtcctgctccctcactcctcgccccgccccctgtcccagagtcccacctgggggctctctccacccttctcagagttccagtttcaaccagagttccaaccaatgggctccatcctctggattctggccaatgaaatatctccctggcagggtcctcttcttttcccagagctccaccccaaccaggagctctagttaatggagagctcccagcacactcggagcttgtgctttgtctccacgcaaagcgataaataaaagcattggtggcctt

SEQ ID NO: 8848 - DNA, 41 bp, Homo sapiens
gtggggcgggtggggccataaacggttcctggtgactcctg

SEQ ID NO: 8849 - DNA, 549 bp, Homo sapiens
caggatagaaggaggtttctgaggctgacagaaacaagcattcctgccttccctccagacctctccctctgttttttgctgcctttatctgcacccctcaccctgctggtggtggtccttgccaccggttctctgttctcctggaagtccagggaagaaggagggccccagccttaaatttagtaatctgccttagccttgggaggtctgggaagggctggaaatcactggggacaggaaaccacttccttttgccaaatcagatcccgtccaaagtgcctcccatgcctaccaccatcatcacatcccccagcaagccagccacctgcccagccgggcctgggatgggccaccacaccactggatattcctgggagtcactgctgacaccatctctcccagcagtcttggggtctgggtgggaaacattggtctctaccaggatccctgccccacctctccccaattaagtgccttcacacagcactggtttaatgtttataaacaaaatagagaaactttccttataaataaaagtagtttgcacag

SEQ ID NO: 8850 - DNA, 113 bp, Homo sapiens
tcccaacattttgggaggccaaggcgggaggactgcttgaggccagaagttggagaccagcctgggcaagtggacacctcatttttactaaaaataaaaaaaactagctgggc

SEQ ID NO: 8851 - DNA, 61 bp, Homo sapiens
tgaccccagctgccaaggaaacccccagtgtaataataaatcgtcctcccaggccaggctc

SEQ ID NO: 8852 - DNA, 415 bp, Homo sapiens
gaacggtgtctctgcccgcaggacgcctgcccccagcccccgcagccctctggccccctccatctcttgtccgttcccacccacccccctcctcggcccgagccttttcccggtgggtgtcaggatcactcccactagggactctgcgctaattacctgagcgaccaggactacatttcccaagaggctctgctccaggagtccaggaaagacgaggcaccttggccgcggggcctgctgggacttgtagttgcctagacagggcaccaccctgcacttccggacccgccgctggaggcgccgtgaggcgttggtgtctcctggatgctactagccccaacgccggggctttgcatggggcccaggggaggcctgagcttggatttacactgtaataaagactcctgtggaaaac

SEQ ID NO: 8853 - DNA, 1629 bp, Homo sapiens
gaggtctcggggccctggtcttggaggtgactgctgtctggactgcgaagtctctgtcttggcctattctccgcactgtcccatcctggaccggcccagctgacaccacccagtccttcgggggcgccggagagatcctgggctggagctgatcgaacctccctactaacctgcccagtggtaccttccactgggactctccgcctcctgcaggtggaacgttccaagaaggaccccgccctatcccaccccgcccctgccagcgcatttgttgagcactttggaaagacagcgtcttttatcagaccccacctccctaccgctaggtaggccagcaggacgtccacctcttttggcaaaacaaaattctgcacccggatttagccacctctcattctgtcacccgcaccctcactcacctgagtggacccttcccctaggacgctcatcctttgcaccgaacaccacctacctcctcctcattggtacagaccattgtaaagatgcacaaagttcctacggacttcccgacccgcccccttccatctacctcagtcttagggggaaaggtgggggtgaatcctggactgcgttagctccaatgagtcaccaccctgcggctcctgaccttaatccatcttagtacctgtcattgacatcctcccctccctgagtggatcgatccaacataacccccctcttcttccacctatggcgcaccccactggcatggctatgctgggtcttccagggaaacgcctcccagcccggcattctgtggtctgttccagcaggacgtggccttttgggaggaaaaaccggtcttgaccagggctagtccattctggctttcaggctcagtcacttggtcaccagtccccagtcctggacctactgctactgtccttttatccggtcctccctcgctgtcctcttcagttgcctttgctagggaccggcctgtccctttactacctaagtcatcgtcagttcgcccaacttccctccaaatctgcccctcacggtacgcagggatcgcccttccttcctgcctttggactggtccaggtcctcctccgccctccttcacgcaaaggcctcctccagggggactacctgtccctcagcccagaggtccccctgtccaagcggggtattccaccaggccatatgacctacccacccgacaactgaagggggcgtggatgagctctgtgactctgaatgctactttataaatcgactgtcagcgttttctaattaaaggagctctggggtaaagatcttaagaacgtgtctgagaaccataatgtgcgtctgcaaaatgtcattgaaattaggaaagaaggccggacacagtggctcacgcctgtaattccagcactttaagaggccaaagcaggaggactgctggaggccaggagttagagaccaacctaggcaacacagcaagaccgcatctctacgaaaaatgaaaatattagctaggcgtcataccaaacgcctgtagttccagctacttgggaggctgaggcaggaggatcccttgagcccaggagttcaaggctgcagtgagctgtgatcctgccactacactccagactgggtgaaagagcaagactccaactc

SEQ ID NO: 8854 - DNA, 970 bp, Homo sapiens
gagcttgctggatggaacctgaatttggacatggcctatgtacctaacgtggccttcttcccgcaccacccttgcctgcgctggcccagtggaaaccaccaggatcttgatgcaacttggcatttggttacccctgctgataagagcagccgttacctgccactgggaccagcaggtgaagcgttgcaacatagccccctccatcatccttcacctcctatcccccactccaaaccaggacgacctgcaaggtcccagccagcaggacaccgtgggcactctggcaaatgaaaaaatggaacctggtcttgagctgaatcaatgtgttattgttacccccacccccggtttacctgatcagtgttaacctttactgggacactcatctgttacactggaacaccttcttctttttgtcaatcggcacagaccactgtaaggaaatgcagtgtgttgcagtggccttttctccccctcaccttctaaggtcagctctagctgagcatcagtgctctcttaaggaggaaaaaaacggtgcggctgggagcggtggctcacgcctgtaatcctagcaccttgggaggccgaggcgggcggatcacttgaggtcaggagttccagaccagcctggccaacatggtgaaactccgtctctactaaaaatacaaaaattagccgggtgtggtggggtgcgcttgtaatcccagctactcgggaggctgaggcaggagaattgcttgaacccatgaggtggaggttgcggtgagccaagatggcaccattgcaccctagcctgggcaacagagcaagacaccgtcttaaaaccaaaagttaaccgggcgtggtggtgggtgcctgtaatcctagctacttgggaggctgaggcaggagaattgcttgaacttgggaggtggaggccaagattgtaccactgtattccagcccgggtgacagagcaagactgtgtctc

SEQ ID NO: 8855 - DNA, 1011 bp, Homo sapiens
accccgagtggcacagaatccccagttttcccctctcatcccacagtcccttctctcctggtctggtgtatgcaaattgtatggaaaaagggctgtgttaatattcataagaatacaagaacttaggaagagtgaggttggtgtgtcactggtcaacctttgtgctcccagatcccatcacagtttggcgattgtggagggcctcctgaaggaggagatgagtaaatatatttttttggagacagggtctcactgtgttgcccaggctggagtgcagtagtgcagtcgtggctcactgcagcctccacctcctgggctctccagcgatcttcccacatcagcctcccgagtagctgggaccacaaatgtgagccaccatgcctggctaatttttgtactttttgtagaaatggagtctcactatgtttcccaggctgatcttgaactcctgggctcaagagatcctcctgccttggcctcccaaagtgctcagattagagatgtgagccgccatgtctggccagataaattaagtcaaacatttggtttccagaaaataaagacaaatagagaaggttagatttttttttttccaacaagtggataaaagtctgtgactcgggggaaagtggaaggagaaatgcagccgatatagagtcattatgtttgcaaagcccctggtcatacaggccagggaacataagaccgcaattctaagtttctagataaacagcgatctccaagtcaagactgaggatgaagagggagaatgtcagaactcaagtgaagggcaatcagggcagactgcctggaggagtgatgccagaaggtttgggaagaaggtgtgggacaagaagaaagggtatttattcattcattcaacagaggtttatgtagggcactgtgctgggtggggctggggacacaacaatgactgaggcagcctggccttgccttcacagggctcaccatacacaagtaaataaaaaatatgtaatgtttggaattgct

SEQ ID NO: 8856 - DNA, 261 bp, Homo sapiens
tgcggccagggaagagtcaggtgtcagggcaggaattctattttcgggagatgtctattgccgagtagagtaatatatacccagagtatgtctatagcagagggggttatgggggcgggagggtagactgacatacagaagtctctatttatccgggtgggaagagggagtcacatcgctttggggatccattggtgtttggtttggggtgttttttaagttttttcttttatatcatccagaaataaagacacgtacact

SEQ ID NO: 8857 - DNA, 93 bp, Homo sapiens
gggccgcctgtctgttgacagaactcactcctctgtcctatgaagaccgctgccattggtgttgagaataataaagctctgtgtttttttcta

SEQ ID NO: 8858 - DNA, 715 bp, Homo sapiens
cccagtgtggccccgtggcctctcccgacattggtgctgaagacgcagggacaggaatgggaggggggagccccagaaatgcggttgctgaagaccccagtcaccacatccttctgcctgggtggcctctccaagccctggtggtgctgggggttgtatccccggccacctcctgtccaggtctccatccccctttggatgggaggcctctctgttacagccctccccatgctgtgccctgccatatacgtgggggactcagggtcctgactcaggggccctgccccctccacttggtactagctgtaagcggaacaccctgccccagggccggacttccagcccccagagccctctccctgtcactccctgaaacactattaatagctctgccgatagctggtgttgtcacaactgcctggaatccgaaggtggaggacaggcagccccgcgcccctgagactggagaccctccccagtgtggcatttcctgccaggggcggggggtggggcagctgtggggagacgggggtcttccttcaccagctcccctcgactcaagcccttgtcctcattatccggcccagaccaaagattccctcatccctgggggcagccctgccgctgtgtctcctttgtatcctaaatctttatttttctaggacatgttatgcctccattttcaattaaaataaagttatcggattacaccacc

SEQ ID NO: 8859 - DNA, 770 bp, Homo sapiens
accctagaactgtcttcgactccggggccccgttggaagactgagtgcccggggcacggcacagaagccgcgcccaccgcctgccagttcacaaccgctccgagcgtgggtctccgcccagctccagtcctgtgatccgggcccgccccctagcggccggggagggaggggccgggtccgcggccggcgaacggggctcgaagggtccttgtagccgggaatgctgctgctgctgctgctgctgctgctgctgctgctgctgctgctgctgctgctgctgctggggggatcacagaccatttctttctttcggccaggctgaggccctgacgtggatgggcaaactgcaggcctgggaaggcagcaagccgggccgtccgtgttccatcctccacgcacccccacctatcgttggttcgcaaagtgcaaagctttcttgtgcatgacgccctgctctggggagcgtctggcgcgatctctgcctgcttactcgggaaatttgcttttgccaaacccgctttttcggggatcccgcgcccccctcctcacttgcgctgctctcggagccccagccggctccgcccgcttcggcggtttggatatttattgacctcgtcctccgactcgctgacaggctacaggacccccaacaaccccaatccacgttttggatgcactgagaccccgacattcctcggtatttattgtctgtccccacctaggacccccacccccgaccctcgcgaataaaaggccctccatctgcccaa

SEQ ID NO: 8860 - DNA, 1237 bp, Homo sapiens
agccatggatatcgggcccccccaaccccatgcccccagcctcctagccataaccctccctgctgacctcacagatcaacgtattaacaagactaaccatgatggatggactgctccagtccccccacctgcacaaaatttgggggccccccagactggcccggacacgggcgatgtaatagcccttgtggcctcagccttgtcccccacccactgccaagtacaatgacctcttcctctgaaacatcagtgttaccctcatccctgtccccagcatgtgactggtcactcctggggagagactccccgcccctgccacaagagccccaggtctgcagtgtgcccctcagttgagtgggcagggccgggggtggtccagccctcgcccggcccccaccccagctgcccttgctattgtctgtgcttttgaagagtgttaaattatggaagcccctcaggttcctccctgtcccgcaggacctcttatttatactaaagttccctgttttctcagcgggtctgtccccttcggaggagatgatgtagaggacctgtgtgtgtactctgtggttctaggcagtccgctttccccagaggaggagtgcaggcctgctcccagcccagcgcctcccaccccttttcatagcaggaaaagccggagcccagggagggaacggacctgcgagtcacacaactggtgacccacaccagcggctggagcaggaccctcttggggagaagagcatcctgcccgcagccagggcccctcatcaaagtcctcggtgttttttaaattatcagaactgcccaggaccacgtttcccaggccctgcccagctgggactcctcggtccttgcctcctagtttctcaggcctggccctctcaaggcccaggcaccccaggccggttggaggccccgacttccactctggagaaccgtccaccctggaaagaagagctcagattcctcttggctctcggagccgcagggagtgtgtcttcccgcgccaccctccaccccccgaaatgtttctgtttctaatcccagcctgggcaggaatgtggctccccggccaggggccaaggagctattttggggtctcgtttgcccagggagggcttggctccaccactttcctcccccagcctttgggcagcaggtcacccctgttcaggctctgagggtgccccctcctggtcctgtcctcaccaccccttccccacctcctgggaaa

SEQ ID NO: 8861 - DNA, 158 bp, Homo sapiens
ggcccaccctctagccactttccccaagcaggtagatagcaaatttccccttagaggtagttagcatggattatattttcactatgtgcttcctgtccccagagggcagggatagaaaaggaaggcaactgcttcaaataaaattcctccacggcatt

SEQ ID NO: 8862 - DNA, 118 bp, Homo sapiens
cggggctcgagggggaaagggggtgggacagggactcggggctgggggacggggcggggcttgacctgcgggtgctttgccttaaaaagaaataaaagatgtgaacttgggcaagtta

SEQ ID NO: 8863 - DNA, 412 bp, Homo sapiens
gctaccactgcctccaggctactgccctctgcccctttgccacccaccgctgccgcggataaattattccctccccgacccagcccagtgccacctctatctgtgtacatactcccttcttccacccagatgggtcccctggggtagatgcattgtgggtggggggagaaagcttgtggctcctgtccgagggggtgtttggggtcccttggcccctccagtttccctctgtcctccttggcttggctttgctgctgcttgtagttgggggagaggtgcccccctcctccttgagaagggacctcctgaaaactcgctctttataaacgaggcaaaagcatttaattcccacccccccaccccccgctcccttctgctccttcaataaaccgaaagatgggttttttttttc

SEQ ID NO: 8864 - DNA, 598 bp, Homo sapiens
aatctactatctatgatcctgcctgcaacccctctccccagcttggcgcagtcgaggggggcgatgctctctgcccatcccagctgcaccctagctccctgctccagggatgtgagcacccactccctgtgctagttagtgcctgattctctggggggggcctcagtaatgggcccccccaacccctttctctggtacagtgctgtctgcctggctgcctcccttaaccctgacttctaagccatcaatttcatgttatttattattgccctatgtggggtggggagggaacctctcgggtctgcacatctccccttccctaacagttcctgttcttgacttgaagagaattgacccgtgggggactccccacctccccaacccagactttggagcgggtgggagttgtaagacaaatcaaaatacggatgacaaagaggatatagccgtgtataccccagggagaggaggcgccgagttctgatgggagaggtacaggttgggttctctgcctaccattgctgtctctgacttccagagctcaaccccctcctttctcccagtggtgacaagatatcaataaacttatttttaatac

SEQ ID NO: 8865 - DNA, 1060 bp, Homo sapiens
gcatcgtgagatgctcaccacccgcacccctgaccctcctggtccatcccacccaagtccctaaactctctcttccagtcacccagccctttggaatttctggcccccagaactccaccctggctggatcctgaaacagtggaggctgctgggagccaggccagccccgcccccttggacctgtcagccctcggagctctggcctgtgggcgttggcctgagggtccttggtgccgcgggaacccttcctgcacggccctgtagcgccctctgggccccggttcatggatcttttgtcctcgtggggcctgctggtgactggagccctgccccttcgacttctctgttccttgtggagttcttggatttttgaacctccaggattccacggtgctgtcccaagccagcccttaggagatactgaacaaggctggctgagaagtgcctactcaagaacttcaagatgggatgtcgacttaagaccagccttctccatcttcagcctcctgcagaaccacggtgtcatcgtggaccacgcctgttcattccttccctgacctcagtacccatccgtcaggagcggagtaggactctggagagcaccgtatcactggagggcaccgtgtcttcgcaggctcacctgtggatggagagccgtggggtgagctgacacctttcaatgccccctggttgttcttccccttgttcagcccattgcacccggtacctgcccccatccccaaatcaccgatgggtcctttcccccagcgagaagcatatctctcgaccacctcccgtccgaccccccaaatcgtgatagttgactaaaggacatttttttttcctcctgtgtttttcaacctccaacgttcaagtcaaggaaccgccgataagaagggggtttgagtacccggatgggaatggcaatggcctagcttttattttaggggcaaagagaagaagggcccccgtcagattttaagttgttcagtttttggcacagggtcgggaccctgagtattgagctctggtgaataaaaaggttttctagtcgtctttg

SEQ ID NO: 8866 - DNA, 330 bp, Homo sapiens
ggcctgtggtgtgtgctcccacccttttctctcctcccatctcctcctcttccctctcctcctcccccccaactcctgacctcagcttggtgtagtcctgctcctcttgggatggggctggggtaggcccgactgcaccctccccttctggtagtcataggcaggattgagtgacggttgggaagggggctcagaagccccctccccagcccggaactgacccctccttcctccctccctgtgcttggctgggcctgacccttcctgtcccagggcccaggtctgtgtgatatctgtatatattgcattttgttgattttaatagaaaac

SEQ ID NO: 8867 - DNA, 55 bp, Homo sapiens
ggccctgctgatccgcaccccattcctcccctcccatggccaaaaaccccactgt

SEQ ID NO: 8868 - DNA, 144 bp, Homo sapiens
actgttctggggtagcagagtcacagatcactctagaatctaatacttggtaattatactgcattgattttgttgttgttgtgacagagtttcactctgtcccccaggctggagtgcaaataagcaacttcagcaaagtctcag

SEQ ID NO: 8869 - DNA, 259 bp, Homo sapiens
aaaccccaggctccactggcagacggcagacaaggggagaagagacgaagcagctggacatcggagactacagttgaacttcggagagaagcaacttgacttcagagggatggctcaatgacatagctttggagaggagcccagctggggatggccagacttcaggggaagaatgccttcctgcttcatcccctttccagctccccttcccgctgagagccactttcatcggcaataaaatcccccacatttaccatct

SEQ ID NO: 8870 - DNA, 362 bp, Homo sapiens
ggtgagggctagagacagcccacgggccctccctccaagtgtgggagggagagatgctctgcctctgaacttcaaagtggaggtggagtgctggccacgtctccacctaacaaccctctttattctcttgttaaagttttgttcatgctttgatttttttttaaattttttagagacagggtctcactctgttgcccaggctggagtgcagtggcatgatcataactcactgcagcctcaaacttctggcctcaagtgatcctcctgcctcggcctcccaaaatgctgggattacagatgtgagccaccacacacaccatctgattaaaaaaaaaaaatactgattccttgtagcaacccaa

SEQ ID NO: 8871 - DNA, 2069 bp, Homo sapiens
tctgggggaccacccatactgaggagttgaaagaacaaggaagaagtaccaagtcaaccaagttctctcttgtcactgaataagactttggactctcttagggcccctgttgatagagatctggccctgaggtaaacgataggtgaggtcttgggtgggagggagttggggaagggaggtggatctctatgcccttttctctaccaggcctgccgtttcaccgccttctctactcaccttctcttcggaggcaggagagttggtaagaggattgggaaaattctagaacattcattcccctttatgcatgagcagggtcactgttacactcatccatgttcagcttttctcccccacgccttgctccctcctcggaatggtcagcgacctctgcaggccctggcatttggaagagctgggtggccctgccatattcttcctcccgccttcctctcgtgtaaccagcggggtaagttaagccaggaccttcgctgcaaacctggttttattgctccttcagtctccagcttccatcctccagttatctagccaggaggtcccaagagttagttttagggaaaaagaatgtctgcctagacctcaaagtctttgagttttagagtctgttagtaaaaatggcactttgattcccatttgggatgagccctctcaggaatcctgtggggaaggggggtgattatagggaaggacgcaggcattcctaggtccccagctctaattccatccatctacccaactgtcaccatctttgcaccaaactgtcaccatctttgcagcagaaggtcactactcacattatagtaagaggggaaaaaaatcttttaaaacttggctgttggccgggcacggtggctcacgcctgtaatcccagcactttgggaggctgaggcaggtcgatcacgaggtcaggcgtttaagaccagcttgaccaacatggtgaaaccccatctctacaaaaattagctgggcgtggtggcgcgcgcctgtaatcccagctactcaggaggctgaggcagatgaattgcttgaatccaggaggcagaggttgcaatgagccgagattgtgccacggcactccagcctgggcagcagagtgagactctctctcaaaaaaacaaaacttggctgttaatgtctgccctctgaattcagacacactatattagaccagaccaccatgtgtcattgtgtgtgtgtgtgtgtgtgtttgcgtgcgcatgtgtagaggagagagcagggtccctgagataatggtttccaaactgtatcgtagccgtccacaaagatgtaatccaaatctatttttctcacgtgtttaaaaaactgaaaagtgactactcagatatgttggaagtcacatcgaagactatcagaatattaccttgtgttcataggttaacttgtttttgtacacgtcttagttatttcaggcatctctttgcttaaaattgagtttcttgtaaatgtgactgatgagcgaggttagaagtggaagaaattcctgtgcatgttctataatctgacaccctgaaagcaagtttcctttcgtcattcacatgctcttgttctgccgtgactgttcaggtgtatggtagtaagtaaatgtattaacatggtgaacagtagtaatattctatcatagagtattagcccttgcaagttttcagggcgtcttttccgacttcagtttttgtgataaagaatgtgaacagttgttagatgttctcagtgattcaactttaaaacaaatttctcgtgatgattcatttcaaaatcctgagtgagtctgactgaaaaatacgagagaaaagagagtggtttccgtttgcagctacacagctgtgtgcatcgacgttctcctggggtgtgtgccaagcgaaacccaggggtgaattggattcttgaagagaccaaagcctgtaactgtccagcttctaatttcaaaacgggtccattagggcttcgttgtgttaacaagttgacaccatgactagtaaatgtaaacgtgtatgtataaaataaagtttagcaaattaagtgtcctgtta

SEQ ID NO: 8872 - DNA, 811 bp, Homo sapiens
catttcaagctgaccctgtgatctctgccctgtcttcgggcgacaggagccagaaaatcagggacatggctgatggctgcggatgctggaaccttggcccccaaactctggggccgatcagctgctgtttctcctgcggcagggcagtcgctgctggctctgggaagagagtgagggacagaggaaacgtttatcctggagtgcagaaagaatggttctctcaaaataaccagtggcctggccgacctgctctggccctggattccccatccatctcattgtctaaatatttagaaggcggagaagttcccagaggcttctgtacagtcaggtctgctctggtctgggtgctggctccaatctgcgtccacttaggaggcccaactgcccaccccaagtccccaggggatggccctccccctctaccaagccactccaagagccagcccctttctgctccacaaaaaccacagttattggaaaagctccctgccttcccttgccgctggtcccccaccaggcttgggagccctggcatcccaaaggggcaacgggaggaaggggaggctgctgcattgtgggtgatgacgtaggacatgtgcttggtacaaaaagggcctgagacattccacctagcttgactggctgcaagatgagaactgggggggtgcaggtggtggggagacagatggagaagctggcagatgaagggtgggggctgcggatcccagggactgccccagaacacaaacctaagtcctgtgcctgtccccagggtcctgaataaataaaagcctccttgcagagcctg

SEQ ID NO: 8873 - DNA, 869 bp, Homo sapiens
gtttggggatttgcttgggctcccccttcatggcctctgcacctccacactcccaaccactgacccttccacatctaccttccaaagaccatcgttttctctgcttccaaagacccccctcactctccccactcctaacagtcttggttgaaaaggctcccccaccaccaccgagaggaatggggaggagccctgtttgacccagttcagcttctagcttggaagcccttgggcaagacagttccccttctctgggcgtcactttcctcatctgtacagtaagtgtccatgtatgcaaaaggggtaattcggtttgaatttccccgttttagtttagaagcctagtctgtttgttcccctccaccgctctccctctcattcctgatgagccctctcattcctcctttccttgcccagctatggccccctctcattcacaaagtgccccctccatgtccctggacccttaagatatccccttggcaccctggtcagagactctgtgtctgactcaggtggtccctgcagagtgccctgggaagggaaggagcactgatttgggggttttgagggtcaagtaggggttggtaacacctggaaagaaggactctttcacttcgatccctggacaattatggaggattcggaggtagaagaggggaaggaagatggtttctatctcatgacccccactccctgtgagagggaatgggggaagcctgatgaccctcagctgttccaatctagtattttttttcttttttaaaattactgtatttattatgacgatggtgactccccagtgcaaaggggggccagattctgtgtgtttctctaacctctttgtaaataaatgcacagtgtaacat

SEQ ID NO: 8874 - DNA, 207 bp, Homo sapiens
ggtcctgtgccctcgtccagctgctgccctccacagcggttcttcacaggatcccagcaatgaactgttctagggaaagtggcttcctgcccaaactggatgggacacgtggggagtggggtggggggagctatttccaaggcccctccctgtttccccagcaattaaaacggactcatctctggccccatggccttgatctcagca

SEQ ID NO: 8875 - DNA, 826 bp, Homo sapiens
gggactcccagcctcgctggaggtgcagaggcctggcctctgtctgtttgccatggagcctggtggtgctaacggccctttccccaggaatccctccccaacggctgccttccccaagcatccagcctggggatgggcccctttcaggaatcacccccgaggatggcctcggggtttccccctgtgccctgacagccgctcctggtatcagagctgctttccagagggcagcacagccagggccgggtgtctttagggatcagtttttccaagactccagaaggtgccaggttctccccttgagctcctgctcccccatcccccatcctcccagacctgggcaggagctgtgctgggagaaagggtggcagccgggagcctcagagctgagccccggcctggctgcccctcccctccggccctctccactgctttccagacactaaccaaggcttccaggccagggattgcccaacactcctagggcagccctcccagcgccccatggggtcgcccatgggtagagacggctttcttgtgcccctccctggggcatggagggtggagtgggcctcgggtccccctgaactccctgtatatctgtataaataacgggattttcatggcgccgccccacccgcattatcactgtgtgatggtctcagtcagtctcctccctgtctccactctttccctctatttatttcactctcttgtttggttctaccctgcaccctcggtccccttccaggttcctgtttataagccccaacccctctgtccccatcttgtatgtgaaaacttgtctcaataaaccctttggagt

SEQ ID NO: 8876 - DNA, 625 bp, Homo sapiens
accccgggagggaccttccctgccctgctgggggtgctctttggacactggattatgaggaatggataaatggatgagctagggctctgggggtctgcctgcacactctggggagccaggggccccagcaccctccaggacaggagatctgggatgcctggctgctggagtacatgtgttcacaagggttactcctcaaaacccccagttctcactcatgtccccaactcaaggctagaaaacagcaagatggagaaataatgttctgctgcgtccccaccgtgacctgcctggcctcccctgtctcagggagcaggtcacaggtcaccatggggaattctagcccccactggggggatgttacaacaccatgctggttattttggcggctgtagttgtggggggatgtgtgtgtgcacgtgtgtgtgtgtgtgtgtgtgtgtgtgtgtgtgtgtgttctgtgacctcctgtccccatggtacgtcccaccctgtccccagatcccctattccctccacaataacagaaacactcccagggactctggggagaggctgaggacaaatacctgctgtcactccagaggacattttttttagcaataaaattgagtgtcaactattt

SEQ ID NO: 8877 - DNA, 281 bp, Homo sapiens
gggcaggcgagccccaccccggccccggcccctcctggactcgcctgctcgcttccccttcccaggcccgtggccaacccagcagtccttccctcagctgcctaggaggaagggacccagctgggtctgggccacaagggaggagactgcaccccactgcctctgggccctggctgtgggcagaggccaccgtgtgtgtcccgagtaaccgtgccgttgtcgtgtgatgccataagcgtctgtgcgtggagtccccaataaacctgtggtcctgcctggcc

SEQ ID NO: 8878 - DNA, 77 bp, Homo sapiens
gcgacacggccgtggggcctggcaggcgctggacagcgcccgaggactgggacattaaacctgacctcccctcctcc

SEQ ID NO: 8879 - DNA, 974 bp, Homo sapiens
gtgcctgcacccgcccggtggacgtcagggactcggggggcaggcccctcccacctcctgacaccctggccagcgcgggggactttctctgcaccatgtagcatactggactcccagccctgcctgtcccgggggcgggccggggcagccactccagccccagcccagcctggggtgcactgacggagatgcggactcctgggtccctggccaagaagccaggagagggacggctgatggactcagcatcggaaggtggcggtgaccgagggggtggggactgagccgcccgcctctgccgcccaccaccatctcaggaaaggctgttgtgctggtgcccgttccagctgcaggggtgacactgggaggggggggctctcctctcggtgctccttcactctgggcctggcctcaggcccctggtgcttccccccctcctcctgggagggggcccgtgaagagcaaatgagccaaacgtgaccactagcctcctggagccagagagtggggctcgtttgccggttgctccagcccggcgcccagccatcttccctgagccagccggcgggtggtgggcatgcctgcctcaccttcatcagggggtggccaggaggggcccagactgtgaatcctgtgctctgcccgtgaccgccccccgccccatcaatcccattgcataggtttagagagagcacgtgtgaccactggcattcatttggggggtgggagattttggctgaagccgccccagccttagtccccagggccaagcgctggggggaagacggggagtcagggagggggggaaatctcggaagagggaggagtctgggagtggggagggatggcccagcctgtaagatactgtatatgcgctgctgtagataccggaatgaattttctgtacatgtttggttaattttttttgtacatgatttttgtatgtttccttttcaataaaatcagattggaac

SEQ ID NO: 8880 - DNA, 429 bp, Homo sapiens
acccagcctccggctgtgacccccagcctcacacctgcctctggttcccgcctggtcctccagcttcaggaccccacctccaaaggcccctctgctcaatgcctacctccctagggccctgctgggacatgggggcctgagtgcccatccaagggctctcaaggacaccggcaaggcctccaggccctgagccccacttctgccttcacctctgcctgggacccgagctgggctcctgggccttggtccccagaagatggcggctagggcctcgccgccaggacagagaagggacggggtggctgggcagtcagggaaggagggtcgcccggatccgacattttggagagattccttcactctcctgtcccccctacctcccttctctaatttcttcttttttttaatgataaagtcttaaaaacacgg

SEQ ID NO: 8881 - DNA, 1423 bp, Homo sapiens
ggcctcgcgcagagactcgtccccaccgcccgcccggggctagggactcggctgcacctgctcttggaccctggtctccttttccccccagactcggcctcctctcctgggactcggcctcccttctccgccccctcccctggctttgattgccctgttctgtgtccccagtagctcagccttccctcttcctctcgggagcctccccggttcctcccctgcggtgaccccaactccagcccatcctgttggtgaccgtctatatccctggggaaatttccaccccagtcccctccccagggaaccacccccagtaaccatcctggggagtttaaggtctctctccttggtcacccagcctggctttgcccccaaagtctcccttcccctagtgaccccccccccacttcaccccatgtcccagagcctcagaacccaccctccctgggggaccctcgaaggaggctgtcagaggccgtctcagctcccagcccttccccccagccctcagggagctccgctcagccccggcggggaggagcgggtgggtgtgcgcgcaaggaggccgcacaccgttccttccaatccctccactcgggttcttgggaggacactcattctccaggctcggagacgaggggagaagtttggggtttcagtcccagggcttagccggaggaagcacattttgaacctgcaacttcagacattccagctcccccactcgccctccactacctctgagagcccagccacgccttggagggaggggcttgtgtgtgtatatagtgtgtttgggggaggggggacgcgggagggtgcatgtcttgggaaaagggggtgacagacaacttttgagagggcagcagactccctcagccatgagaaccagctttggggaggaggccgggaatcaaagcgagtccagttgatctcccctgacaatctggaaggttccttttgccctcagtgccagccaatccgggcaggaccctcgaagaggagaccgagggtcccagaggaccaatgctacaagccagcaaatgctgccacatctctgcctgatggggggtggggatgggtggggggatgggactgggccaagggatctgggtgggcatttttaactttggaggccttccatctgtcggtaggccatctgcattttcttactgttgatgtttcctgcccaaaggacacatttgggcagtgccacccactccttgggcccctaggatgacccaactacccccataactttctgcttcccacaggttttcagcattctatcgtcctgttgtgctcagccccaacatcccagacccgttacccactacccttctctcccccagctcatcatcagtcgctgtctcttttctgtgatttctgtaaaagttgccataaaactttgaaattctgcctg

SEQ ID NO: 8882 - DNA, 273 bp, Homo sapiens
gcacccatgcacccactcttcccagacctggggcgactcatggcgtgctcacctccagccgctggtggggggtgtcctgaaggacaggatgctctccccagacctccccagggtggtgaagctgtgccctggggccccagctaacccactcctctctctgtacgtcaatgtccctatttgaaagcagggatgatcccattccaccctgtccactctggatgagaattggccacctgatggttatttatacgtccagaagaacatcatttccca

SEQ ID NO: 8883 - DNA, 654 bp, Homo sapiens
gccccacccagccccccagtgcccgtcttcctgtcccatctgctcagagagaggtggggccgagacttgctggagagcttccctcctttcccatctggggagtgccgcgggccacagtgggcaggtggcaccgggggtcagcatgcaggggcgccagaggcccaggctgctggccggacagtcaccctctgttctcgctacatcccttgccccctgtccatttatttaagcccccataggtgcccttcacccccaaaaccagctgtacagaatctttgatacagacctatttgctaggggtgctgccggggatttggggtcagcatctggccccctatctcctgaccagctgagtcatgaggccggtttctctctctctcccacttttgtcccccagccaagctctaaagcacatgtagccgctgagacctgctgtttctgctgggggcaggctcctcttcccccagccccgggagcctcccccagcttcctgcagccccgacctctcaggttagaccctgggccctggagcttaggggattctccccaccccagccccacacctgctccttccctaatgctttgaggttttcttggttggaagctgcagctggcccaagaaagaaaataaaaaacaacacttttgcatgagtc

SEQ ID NO: 8884 - DNA, 532 bp, Homo sapiens
ggggcctgtgcctgcaaagttcttcagatcccagagggcctggagtggctgatctacactgctggtgactttctgcagtgaatgcatcaccctttacccaccctgctgcaggtggacatttgctgtcttcactgtgcagctatcacaggtggctctgctgtgaatgtgcctgcctgtcatttgaattgagcctgagcgtttctctgctgggattggagtcgctgctcactgggatatctggcattagtggatgctgctcgagagctttctaaagggcttttcccagggcttctgatggtcagcatcttccccaacacttaggattgtgagactttttaatgtttgtcgatccaatgacttgtggttttgttgtggttgtaatatccatttccctgatgattgagaagttaaaccctcacatgttaattgaaccttagatatcttcataatgtgtatttgtttaccccttttccttcatttatttgaatgtattcttatattctcttggcaattaaagttctgcagacacctt

SEQ ID NO: 8885 - DNA, 841 bp, Homo sapiens
cgtccaaaacactctggatcttatatggagaatgacattgattctcctgtccttgtacatgtacctgactggggtcattgtgtaagacttattattttatcctgaaaccttaaatatcaaacctctgcatctctgatcccttccttgttaaaagttaccagggttggccaggcacggtggttcatgcctgtaatcccagcactatgggaggccgagacgggcggatcacgaggtcaggagactgagaccatcctggctaacacggtgaaaccccatctctactaaaaatacaaaaaccaaaaaaaattagccaggcgcattggctcatgtctgtaatcccagcactttgggaggtcgggggggtgggggaggatcacggggtcaggagatcgagaccatcctggccaacatgatgaaaccctatctctactaaaaatacaaaaattagccgggcatggtggtgcacgcctatagtcccagctactcgggaggctgaggtaggagaatcgtttgaactcaggaggcagaggttgcaatgagccaagatcgcgccactgcactccagcctgggtgacagagcgagaccgtctcaaaaagaaagaagtgactagggttcagagaaccagggttcaaagcccagggatgcaaaggttgcagtgagttgagtcatgggatcccagacttttttaaatgtttgcaatgtttcccgtttacagaatgctacaagaataatgtacgtactacctaaaaggatgtctaaatgtttgttaataaaaataagaaatagctacagtgacagattttagagcaaaaattagtaataaaaataagaaataaaatt

SEQ ID NO: 8886 - DNA, 604 bp, Homo sapiens
ggaggtcctggaagctccagaccctctccacctggtcaacatggagcaagcgcttgtggagaaccaaagcccaaaagccccagatccccttaaagcagagagggagggcaggcgggagggagggcattggcatgcggcgctgtgcatggggtgagacccagagcggtatctttgccaggatgggggcgtctgcagaactagattaagaaggaagagtctgtggatggaaataggaagcgtgggagggtccagttgccacccccaaaaattccaatgattcttgacatcttttcacttcacgtagtcctaagtccctgtgacctgccagagtctcttccccagcttccccttgggtgaaaatagtctcttctcctgttgggtatcaaaaggttcagaacgtagtctctactcttcccctgcctgcatcaactgttgcaaatcccgtttctctctcccggtaaggggacaaattatactttattcaggtgatggttacatgaacagcccagacttcaccactacgcaatatatccatgtaacaaaaccgcacttgtactccctaaatctatagaaatacaaaatgaaataaaaaggatgcaaatca

SEQ ID NO: 8887 - DNA, 495 bp, Homo sapiens
atgagcctcagcttccagggcactgtgggcctgttggtctactagggccctgatgtccacctggccttcctgttcttcactcccttcagccacacgcttcatggccttgagttcaccttggctgtcctaacagggccaatcaccagtgaccagctagactgtgattttgatagcgtcattcagaagaaggcgtccaaggagctgaaggtggtgaaatttgtcctgcaggtccctcgggagatcctggagctggagcatgagtgtctgacaatcagaagcatcatgtccaatgtccagatggccagaatgaatgtgatagttcagaccaatgccttccactgctcctttatgactgcacttctagccagtagctctgcacaagttagctctgtagaagtaagaacttgggcttaaatcatgggctatctctccacagccaagtggagctctgagaatacaacaagtgctcaataaatgcttgctgattgactgatg

SEQ ID NO: 8888 - DNA, 203 bp, Homo sapiens
gccctcgccctcctagggcctgggtacagggcatgagttggacggaccccagggttattattgcctttgctttttagcaaatctgctgtggcaggctgtggattttgagagtcaggggaggggtgtgtgtgtgagggggtggcttactccggagtctgggattcatcccgtcatttctttcaataaataattattggatagct

SEQ ID NO: 8889 - DNA, 3454 bp, Homo sapiens
aatgagtcagttaggtagtctggaagagagaatccagcgttctcattggaaatggataaacagaaatgtgatcattgatttcagtgttcaagacagaagaagactgggtaacatctatcacacaggctttcaggacagacttgtaacctggcatgtacctattgactgtatcctcatgcattttcctcaagaatgtctgaagaaggtagtaatattccttttaaattttttccaaccattgcttgatatatcactattttatccattgacatgattcttgaagacccaggataaaggacatccggataggtgtgtttatgaaggatggggcctggaaaggcaacttttcctgattaatgtgaaaaataattcctatggacactccgtttgaagtatcaccttctcataactaaaagcagaaaagctaacaaaagcttctcagctgaggacactcaaggcatacatgatgacagtcttttttttttttgtatgttaggactttaacactttatctatggctactgttattagaacaatgtaaatgtatttgctgaaagagagcacaaaaatgggagaaaatgcaaacatgagcagaaaatattttcccactggtgtgtagcctgctacaaggagttgttgggttaaatgttcatggtcaactccaaggaatactgagatgaaatgtggtaaatcaactccacagaaccaccaaaaagaaaatgagggtaattcagcttattctgagacagacattcctggcaatgtaccatacaaaaaataagccaactctgacatttggattctaccatagactctgtcattttgtagccatttcagctgtcttttgattaatgttttcgtggcacacatatttccatccttttatgtttaatctgtttaaaacaagttcctagtagacaccatctggttgagtcagttttttttatggtgtattttgaacccattctgatagtctcttttaactggaagatttcaattacttacgttaatgtaattattaatatgttaggatttatcctcagtcagccagtttgttatgtcttttctattctactgttatcacatttgtaccacttaaagtggaatctaggcactttatcaccatttagatcctattaccttttctcatctaggatatagttatcttctacataatctttctgtatcttaaaacccatcaataaattattatatattttctacttttaatcactcagaagatttaaaaaactcatgagaagagtaatctgttatgtttttccagatatttaccatttctgttgctcttccttcattattttccaaatttcgttctgcaaatttccacttcctctgatagacgttttttagttcttttagagtggttctgataggtacagattctcttattttttgcttcctctgaggacatctttttctcaccttcattctcagtgatgttttttgcttgtagtatttttagttgacattgttttctgttcagcagtttccttttagcttccgtatttcctgatgagaaatctgcagtcattcaaattgttgtttccctgtatgtagtgtgtcatttttctgtcagatttcaaggtatttatctttagtttttagccatttcattatgttggggatgagtttccttgttttattccctttggaatttgctccaattcataaatttgcagttttatgtcttttaccaaacttagaggttttcagcctaatttctaaaaatactttttattagcctgattttcatctttataggaaatagtttaagtgatgacaagttccaatagcttatatgcccagaaggccttcaaaataagaattttgaaagaatacagaaaacaaacttttatatccttctcatgtcttctactgtaaaattcatatgctttgctactctaaacctagtttgaaatcaacagtcttgagaatagatgaaaattttgatgaatagtggaattcttttaaatggaaacctcttacatgtgattttccttgccatctagaaataaaccatagtatttatgttgaatcaatcaatattatattttgtttttttcctcctcttctgagactcttattgtggaaatgttagacttttatgttttcctaaatgtccctgatattctacttatttagaacatcttttcattttttccattattctgattgggtaattttaatttgtctattttcaaatttgctggagtgttcacctgttgttatctgtgtcgtcccactgagtgcattcaccaccttttaaattttggtcactgtatgtatcagttctaaaatttccattttgttctctatattttaaatttcttgccttatattctattttcctgcaaatgtgtcagcatttgcttgtttgagctttttttttttcaagacagggtctcaactctgttacccaggctggagtgcagtggtgcgatctcagctcactgcaacctctgcctcctggttcaagcgattattgtgcctcagcctccagagtagctgggattacaggcatgcaccaccacagcccagctaattttttgtatttttagtagagacagagttttgctatgttggccaggctggttttgaactcctggcctcaagtgatccacccacctcagcctcccaaagtgctgggattacaggccactacacctggcacatttgagtatttttttttttttttttttttttttgagatggagtctcgctctgtcatctaggctggagtgcagtggtgtgatctcagctcactgcagcctctgtctcccgggctcaagcgattctcttgcctcagcctcctgagtagctaggactacaggtgcatgccaacacgcccggctaatttttttttaaaaatatttttagtagagacagggtttcaccattttggccaggatggtcttgatctcctgacctcatgatccacccgcctcggccttccaaagtgctgggattacaggcatgagccaccgtgcctggcctcatttgagtatttttataatgtctcttttaaagtctttgtcagataatttcactgtacatgttattcagtgtttggtgtccactgagttgtcatttgccagacaagtggagatttttgcagctcatccttgtattctcagtagttccgatatgtaccctcgaaatgtgaatgttatcttatgagactctgttttatttgtatccaacagaagatgtttattatttatttggctttctgtgaactgaggtcttaatatcagctcattttaaaagtctttgcagtggtattcggatctatcctgtgtgtgcctatgagattgggtgcagtgtatcctgttagctccattctcagggcgtttgaatgtgaattaggaccagcgcaatgaatgctcaagttggggttgggcgttagaattcataaaagtctttatatgctcag

SEQ ID NO: 8890 - DNA, 513 bp, Homo sapiens
cacgaggggcacgcagcccccaccctgccctggctctctgtggggtctttttttgtgtctctacttcccctgtttgccttgtgggtctctgtctttttctcccagtggcaggcctctgtctttttgccccttcaactgttttcatctgcccttcatcaccgcctcacctgtgtctcccggttcctttctctctgctcctgacactgcttttccctctgactcctgatctcctgttctctgggcttcctggtcagtgtctgtccgtcttgtctccatatctgccccttccctgtctgctgagccctggccccctgtggatcccccacctcctgtttccggctctctctcctcatctccatctcccaggctctccacgcatcctgtgtccctgtctctgtagctccttactccccaagagccccccagtgctgacaggtgtgggaaaagtcagggcgaagacgccaggttcagcatgggaaaatgggactgtggaaataaagtatatgtgtggag

SEQ ID NO: 8891 - DNA, 860 bp, Homo sapiens
gtagaacctacctccctgcccagtcagcaggctaggaactaagccccgcctccttcacgacaggctgtcaattacggttattatacttttcactccaacttccaataactgacaggtgattatttttgctgcactgtgtgcttaagcaaagcagccaatcaaagcagctagcagttgttaagtcttccccgccccttcgatgaacagccaatcaaagcgatttagctctgcttctgttccatttcttagtcccaccctcaccataaacatccaagtgtggtttggctgaggagctgagggtgtctgccaatcacagctgctcagctctggcttctgtaaaccgccaggtagaagagttaaagctgcgccctcccgagactatatatcattgtctttttcagcccgctccgggcaaactgcccatcatgtgcaccaaggccgttagccctgcctcctggcaaacgtccagtgacagctgctgggttccatcaactttgggcagccggttgtcgctgcagggaaggaaccaataagaatttctaaaggaaacctgatcttgctatcaattgctgctgcttaaatggcaggccaactggtcagctgctgatcagggtgtctaggctgaaggagttggagaccttgtgctaggtaggtgaaccagaaaccaccctcgccaccaagactcgctcccaacctggctcccggcaacctcaggtgccttcctcgcccaggtctttcaccctttctacagaaactacctcggtctggatctccccaccaccagcagcctgtgcaatatttattggtctatcaatttctcccgtctcctgtcccaaagtaataaatcatgtttaataagt

SEQ ID NO: 8892 - DNA, 723 bp, Homo sapiens
ccccggtcctctccatctctctcctcggcagcagcgggaggcagaggaaggcggcagaagatgaagagctttcccatccaggggtgacttttttaagaacccacctcttgtgctccccatcccgcctcctgccgggtttcagggggacagtggaggatccaggtcttggggagctcaggacttgggctgtttgtagttttttgccttttagacaagaaaaaaaaatctttccactctttagtttttgattctgatgactcgtttttcttctactctgtggccccaatttttataaagtgtttttgagtgtcctatgggccggggcagggtccaagatcttttcccttccccaggcccctcggctccctcccagatcccacccccagccccactggttgccaaacactaaatctgccgacacccatctgccccacctcctgccatggccatgaaccgcgacccccactaaatttctagattggggatagggagaaagggaggcccaggaaggtctcccctgattttttttcatagtaatttttttccccagagtttgaattttttggtcttctcctggttttttggcaaattaggggggcccggggctcaagtgcgggaagggggctggcccgaggatcccatggctctcacaccatgtttttgtacagaactgatggttgaatctttgttctcttgaaataaacagaagaaaatgaaaccttt

SEQ ID NO: 8893 - DNA, 509 bp, Homo sapiens
acaggagcccaagccaaatctgctggcccacccaaggagcagtgccggacaactgtcggctcagagccctctgcctcaatgccctgccttggacaaggcttctggcctcggcgtctgtcaagcagaagggatgtttgtcacttgttctgcaacttgggccgggagtggtggctcatgcctgtaatccctgcactttgggaggctaaggtgggagggttgcttaaggccaggagttggagaccagcctgggcaacatagtgagaccccatctctacaattaaaaaaacaaattagttgggtgtggtggcgcacgcctgtggtcccagctacgcaggaggctgaggtgggaggatcccttgagctcaggaggtggaggcagcagtgagccaagatcatgcccttgcactccagcctgggcaacacagtgagaggccatctctttaaaaaaaaaaaaaaaagaaaaaagaaaaagaaaggctgatcgaggtggctcactcctgtaatcccag

SEQ ID NO: 8894 - DNA, 40 bp, Homo sapiens
ccctggatcctactctcttattaaaaagatttttgctgac

SEQ ID NO: 8895 - DNA, 147 bp, Homo sapiens
ggctgccccacatccccacctggcggagctctcctccgccttgctgagacttacgccctgttcccttcctgccctgtggcccacgggccggccagctgggtgccccagggacgtgataatgcagataaatacatttatatttttaag

SEQ ID NO: 8896 - DNA, 104 bp, Homo sapiens
gactccccttcgaggattgcacccgcccgtcctaagcctccccacaaggcgaggggagttacccctaaaacaaagctattaaagggacagaatacttcctgttt

SEQ ID NO: 8897 - DNA, 268 bp, Homo sapiens
acgtgagatggggctgcctcgagcaccaacaaagtaatttgggagcgactaggagctgagccttctacctcgacggtgcactgcagagagccaatcagacgtcgcagagccccgacgacactatgcttgcgcccacgccgagcaggcgtgcggaacttttagcaaaaggcggcaagcgggacttctggtcccaacatttcctcctttggcctgtggcttattccccgccagtgatctgtttcccccaataaagtctcaaatctttggg

SEQ ID NO: 8898 - DNA, 271 bp, Homo sapiens
tggattctaggatttacagagacagagaactgatgggggtggagagaagctccttgtgggaggagagggaactaccagcagagcccctcctaccgcagacacaggatcggagacaacctccaaccccacctgcctcctgaagtgctgctgacatgcaactgccttaactttgcctacctggcctccttatgatccccctccggcgtggtatggttggggggcttcttttgctgctggccacggcaaacaagctgcttgctgcttccttcag

SEQ ID NO: 8899 - DNA, 213 bp, Homo sapiens
gaaccaataccaaacgagcgcgcgaaccttgaaatgtcacgggcttctacggacaggagcccgcctgagcgcaaagctttctgggagttgtagttcttatcccgcgtggaatgttgggagattgagttttcgggaagtagcggatgggacggtgggagcatgggcttaggatgtgaatgccagggagcaataaaggtatccgtggtatcggca

SEQ ID NO: 8900 - DNA, 18 bp, Homo sapiens
agatttatcttgttgtct

SEQ ID NO: 8901 - DNA, 2171 bp, Homo sapiens
gagccagggagactttctgaagtagcctgatctttctagagccagcagtacgtggcttcagaggcctggcatcttctggagaagcttgtggtgttcctgaagcaaatgggtgcccgtatccagagtgattctagttgggagagttggagagaagggggacgtttctggaactgtctgaatattctagaactagcaaaacatcttttcctgatggctggcaggcagttctagaagccacagtgcccacctgctcttcccagcccatatctacagtacttccagatggctgcccccaggaatggggaactctccctctggtctactctagaagaggggttacttctcccctgggtcctccaaagactgaaggagcatatgattgctccagagcaagcattcaccaagtccccttctgtgtttctggagtgattctagagggagacttgttctagagaggaccaggtttgatgcctgtgaagaaccctgcagggcccttatggacaggatggggttctggaaatccagataactaaggtgaagaatctttttagttttttttttttttttttggagacagggtctcgctctgttgcccaggctggagtgcagtggcgtgatcttggctcactgcaacttccgcctcctgtgttcaagcgattctcctgtctcagcctcctgagtagatgggactacaggcacaggccattatgcctggctaatttttgtatttttagtagagacagggtttcaccatgttggccaggatggtctcgatctcctgaccttgtcatccacctgtcttggcctcccaaagtgctgggattactggcatgagccactgtgcccagcccggatattttttttttaattatttatttatttatttatttattgagacggagtcttgctctgtagcccaggccagagtgcagtggcgcgatctcagctcactgcaagctctgcctcccgggttcatgccattctgcctcagcctcctgagtagctgggactacaggcgcccgccaccacgcccggctaattttttttgtatttttagtagagacggggtttcatcgtgttaaccaggatggtctcgatctcctgacctcgtgatctgcccacctcggcctcccacagtgctgggattaccggcgtgagccaccatgcctggcccggataattttttttaatttttgtagagacgaggtcttgtgatattgcccaggctgttcttcaactcctgggctcaagcagtcctcccaccttggcctcccagaatgctgggtttatagatgtgagccagcacaccgggccaagtgaagaatctaatgaatgtgcaacctaattgtagcatctaatgaatgttccaccattgctggaaaaattgagatggaaaacaaaccatctctagttggccagcgtcttgctctgttcacagtctctggaaaagctggggtagttggtgagcagagcgggactctgtccaacaagccccacagcccctcaaagacttttttttgtttgttttgagcagacaggctaaaatgtgaacgtggggtgagggatcactgccaaaatggtacagcttctggagcagaactttccagggatccagggacacttttttttaaagctcataaactgccaagagctccatatattgggtgtgagttcaggttgcctctcacaatgaaggaagttggtctttgtctgcaggtgggctgctgagggtctgggatctgttttctggaagtgtgcaggtataaacacaccctctgtgcttgtgacaaactggcaggtaccgtgctcattgctaaccactgtctgtccctgaactcccagaaccactacatctggctttgggcaggtctgagataaaacgatctaaaggtaggcagaccctggacccagcctcagatccaggcaggagcacgaggtctggccaaggtggacggggttgtcgagatctcaggagccccttgctgttttttggagggtgaaagaagaaaccttaaacatagtcagctctgatcacatcccctgtctactcatccagaccccatgcctgtaggcttatcagggagttacagttacaattgttacagtactgttcccaactcagctgccacgggtgagagagcaggaggtatgaattaaaagtctacagcact

SEQ ID NO: 8902 - DNA, 363 bp, Homo sapiens
agctgcaggctgtgctccagatccaccgacccgtagcatctcgtcacgccagcactcgcctccctaccaatgactcacctgaagtgcaatacgaaataaaaggccagcgggcggcgtctgggtctctggcgcccccatgtggttgcgacactcccaaagccgtaagggccgacccaggcatcttggcccccagcccctcgtcgcgggttcaggtccgcccattactccttgtcgtgcggtcaaggatacaccttggccccgattccggatctctccgttctcaggccagacccctggtgctgccgttgatttttttttctctgtctttgctgcaattttgaaataaaatgccaaagaacacac

SEQ ID NO: 8903 - DNA, 158 bp, Homo sapiens
tttctctcatttctacttggggcccccttcctaggactctcccaccccaaactccaacctgtatcagatgcagcccccaagcccttagactctaagcccagttagcaaggtgccgggtcaccctgcaggttcccataaaaacgatttgcagccagaag

SEQ ID NO: 8904 - DNA, 191 bp, Homo sapiens
tccgcccaaaagcggcagccaatcggagcgcgaggacgtggtctggaggtaccgccggagatctgggaccactcagggcatcagggggcgtggtctggtccccattgcgggcccgggaggggaatggtttctatggccaaagtttggttttctcaacactgtctaaatttggattaaaactttgaactttt

SEQ ID NO: 8905 - DNA, 46 bp, Homo sapiens
aagctggctgttgaataactcaataaaataccatacccttgccagc

SEQ ID NO: 8906 - DNA, 1162 bp, Homo sapiens
gtccgccccaccacactccccgcctgtcctgcctctctgctccagagagaggatgcagaggggtgctgctcctaaacccccgctccagatctgcactgggtgtggccccgcagtgcccccacccagtccgccaaacactccaccccctccagctccagtttccaagttcctgcactccagaatccacaaagccgtgcctttctctggctccagaatatgcataatcagcgccctggagtcccctgggcctggaccgcttcccagaggccaggaatctgccattactctgcggtggtgccagaggttttaggaaacctggcatggtgctttcaggtctggggcttttagagccccccgtgtggcttacaaattctacagcatacagagcaggccacgctcaggcccggcatgcgggccaccaagttctggaaaccacgtggtgtccctgcgaatggggcgatcaagtccagagccggggcactttcagagtttgaaggtaactgagagcagatggtcctccatttcaactccagaagtggggctctgggagggatgttctagccctccctggcatgtcagagccaggctctgcctggaggatccctccatccggctcctgtcatcccctacactttggccaagcaagaggtggtagaaccacttggctgctcattccttctggaggacacacagtctcagtccagatgccttcctgtctttctggccctttctggaccagatcctactcttcctttctaaatctgagatctccctccagggaatccgcctgcagaggacagagctggctgtcttcccccacccctaacctggcttattcccaactgctctgcccactgtgaaaccactaggttctaggtcctggcttctagatctggaaccttaccacgttactgcatactgatccctttcccatgatccagaactgaggtcactgggttctagaacccccacatttacctcgaggctcttccatccccaaactgtgccctgccttcagctttggtgaaagggagggcccctcatgtgtgctgtgctgtgtctgcaccgcttggtttgcagttgagaggggagggcaggaggggtgtgattggagtgtgtccggagatgagatgaaaaaaatacatctatatttaagaatccc

SEQ ID NO: 8907 - DNA, 87 bp, Homo sapiens
agaccctccccgcagccttccaagtccatcccgactcctggagccctgacaccccgatcctcccacaataaaggcttctcaatccgc

SEQ ID NO: 8908 - DNA, 16 bp, Homo sapiens
aggcttctcaatccgc

SEQ ID NO: 8909 - DNA, 158 bp, Homo sapiens
ctgcgggggtcccaaggaccaccccttgacctgtgatgacccccgcttccaggactcctcttcctcaaaggcccctccccccagccttccaagtccatcccgtctcccggggccctaggacaccccgatcctcccacaataaaggcttctcaatccgc

SEQ ID NO: 8910 - DNA, 17 bp, Homo sapiens
aggcttctcaatccgca

SEQ ID NO: 8911 - DNA, 16 bp, Homo sapiens
aggcttctcaatccgc

SEQ ID NO: 8912 - DNA, 223 bp, Homo sapiens
gacccatgcccaggaaaataacagagctggatgctgagagacctcagggatggcccagctgatctaaggaccccagtttgggaactcatcaaataatcacaaaatcacaattctctgattttgagctcaatctctgcaggatgggtgaaaccacatggggttttggaggttgaataggagttctcctggagcaacttgagggtaataatgatgatgatataat

SEQ ID NO: 8913 - DNA, 2644 bp, Homo sapiens
ggaacagttgaggtctgcaggacctcacacctccctagagggagggagggagggcagggtggagggcaaggctggggggaggggattgggtttaggaagagctaggttaagtcgtaacgagtggggaaacactgagtcttgttgggtcttgggttgtgtggtttggtagctcctgtgggtacctcctgaagcagcagcgaatggcaatgggttgtgttgtgttaatgaagactcaattggttcatattactctgagttgtgcaaagctcatggagccttttggggtagtgttgagataggtttggtcgtatcattttgtgagtttcctaggtcagtgttgggtttggttgggttgtgagtctgggatagtgtggtccagctgcattgtgtaggattctgtggtttggtgggtcccctagggccatgttgggtcaagttagatggtcccccatggcattgttgagatcgaatgtgtgtggtgttaagtttcgttgagacatggtggaaattgtgtagctctgtgattcttccaggggcatgttattttaggttctgtgaacttgcgagtcatgtagaaatgtgaagagtccagtggtagaatttgagctttctaggtcacattgggttaagtttgtatgaccaaatgaatcttgtagggttctgttgggcttaactgtgtagaggtgtgtggctggacatttttcgtggccacagcgagttgagttgtgttgaattgtacaaccatatgagccttgtaaggccagttcagttgggtcatgccactgtttgagtctcatagggccatgctgaattgagttccattgagttgtgtcactatgtgagtcctacaggaagttgggttgagttggactgtgcgaacgagttccatagggccacatcgggctgttttgcatttagtggtagcaccaggacccaaaggaaatagcagtggggaagcatcatgtatctgggagcatgcagtggcgagggctctgggaggtgtgccgagctggctccccagctcgctgtagggggcgggactggattctgtatccatgggattgggtgttcatccagaggcgactgggtaaattaggaagaggtggatgctcctcctgtttaccccacatccacttcattgtgctgttcactcccattctcccctacagttttatgctcagacatggaggtcagagccacaagggaaaggggagagggggagaaaactgtactctgtccagacatgatagagggacagagccaaaaggatagagaaagagacccagaaaaaggaagaggtggaaacccagagagacagagacccaaagggagagaaacagagactcagggagagggagacaatgacctggagggtggggtatggcagagacgcagaagagaggaacagaaatccagagtggggagacagagaccaagagcaggggatagaagccgggcgaagtggcccatgcctgtaatctcagcactctgggagaccgaggaagggggattgattgaggccaggagttcaagaccagcctgggcaacatggtgagaccccatctctacaaaaaatacaaaaattagctgagtgtggtggcacatgcctgtgatcccagctactcaggaagctgaggcagaaagatcccttgaccctgagaggtagaggctgcattgagccatgattgcaccactgcactccagcctgggcaacagagggagcccccgtctcaacaaacaaacaaaaagagccagtgggggagggagggacagagacccagagggcagcgtcagacacccagagttggagacagaacaacagagtctcagggaaagagaaccacaatagaaaaaggcagaaaaggccgggcgcggtggctcatgcctgtaaccccagcactttgggaggccgaggtgggcaaattacgaggtcaggagatccagaccatcctggctaacacggtgaaaccccgtctctactaaaaatacaaaaaaattagccgggtgcggtggcgggcacctgtagtcccagctactcgggaggctgaggcaggagaatggcatgaacctgggaggcggagcttgcagtgagccgagattgcgccactgcactccagcctgggcagcagagcaacactctgtctcaaaaaaaaaaagaaaagaaaagaaaaagccagaaaaagttggtgcccctgaacccaagagtgatgtacagtctattccatagaatcacagaacaatcctgaaccaggcctgtcacctaccctccctgcagctcaggaaggctgtcagacaggctgggggcctcactctgttttccaggggagaaacctgagtctcagagcaggggagtggcttcccaaggtctcacagcttgtccccaggggccaggcaggctgtctgtctgcttcacatgtccccatcagcctgctgggacacacgggtcctcctgagtcccgtagcctcatttcttacagacggggaaactgaggctcagagcagcaggtgttacccaaggtcacaaggccgaacattttcagaaatctttcagaactcaaagggcatttagaggaagaaggctgaaatcactaacacatatagggcttcctttggtatcaaagtactttacttgggttaatttatt

SEQ ID NO: 8914 - DNA, 236 bp, Homo sapiens
tctcttggaagccggcctgtctccgccttcagacctagggagaggtcttaacctctgttctcagactctggaaaaggcttctcaacggcttggcctgacctcagctcctcgcattccctccacatctcaagacaccaacccagggatgcaggacagacacacagacactcagtgagggtcaaatatctttaaataaagtgccaggaacaataaatactgtacaggaagagagtgca

SEQ ID NO: 8915 - DNA, 95 bp, Homo sapiens
cccagtcgctcgactgcgacgcaggtgtacctccccctgccttccaacccctttccacgagctatatttatttctccgaataaacgtgctccccg

SEQ ID NO: 8916 - DNA, 486 bp, Homo sapiens
cttcattaatttggcttcacataacatatcccttagaacagatccaatagacaactcttaatatcagcttgcaactgttgatctccctggatccagaaccacttttatttccaagaggaggggcattctttgggggtgttcatggggcctggacttgcaatcccttcctgggtcccatcttacctggtgaccaccatcattgttttccccatcctcttcctcaacacacatacatgcacaacacatatacaatactagtgatgtctaccagtcctgctacttctggggtgcctgtctcctggaatggagctggaggagcaatgctgttggtgaataaatcagtctactggaactccaaggactggatgtaagcagatctttttttcctatagatgtctcagatgttcagttttcctgtcacaaggcttccagtctgtattagttcattttcacactgctaataaagacatacctgaaactgggaac

SEQ ID NO: 8917 - DNA, 724 bp, Homo sapiens
agggggaccccaaaactggctcaccccccagaacaccctcctcccagggagggtcctccagctcacctcatgcttcttatttggggagagggctgtgatgtaaaggggttgacctcagaggcctaagcaactggggccatcccccccattagaggggcccccaaaacttggttggagagctgaacaggctgggactgaggaaaggataaaccccgatattgggacctcacagtgggtgtctgaaaggacagatcactccggagtatcagggattgtggggacaggagtgagacaaccccccaggtacagcactggcttttcttttcagcccctgacaggccacccccactcctctgcatgtcttggagagcgctagttacacattggcttgtcccctttactttttcccagccacccctccccctgaaatttctgcccctctctaccaccctcactccatgacctgtgagatcacaaagtgaagatgaaccctttctgtgcaggagcagagccaggtgggccctggacattttttttttttttaatataacgagatatttataagtgggtgctagggtcttgactttatctccgctgcacaagcagtgtgttgaactttctaatctcatccctctcctaagtgagccctgagctagacggtttccttcctcccctctcaaagtttgtttgtttgtgttctgacagaggataaagctattttacc

SEQ ID NO: 8918 - DNA, 54 bp, Homo sapiens
gcgcgctgcccgtccccatcttaataaagaccatgccctgcgctccggactgcg

SEQ ID NO: 8919 - DNA, 1118 bp, Homo sapiens
ccatgtgcctcccactgaatggcagtttccaggacctccattccactcatctctggcctgagtgacagtgtcaaggaaccctgctcctctctgtcctgcctcaggcctaagaagcactctcccttgttcccagtgctgtcaaatcctctttccttcccaattgcctctcaggggtagtgaagctgcagactgacagtttcaaggatacccaaattcccctaaaggttccctctccacccgttctgcctcagtggtttcaaatctctcctttcagggctttatttgaatggacagttcgacctcttactctctcttgtggttttgaggcacccacaccccccgctttcctttatctccagggactctcaggctaacctttgagatcactcagctcccatctcctttcagaaaaattcaaggtcctcctctagaagtttcaaatctctcccaactctgttctgcatcttccagattggtttaaccaattactcgtccccgccattccagggattgattctcaccagcgtttctgatggaaaatggcggtttcaagtccccgattccgtgcccacttcacatctcccctaccagcagattctgcgaaagcaccaaatttctcaagaccctcttctccctagcttagcataatgtctggggaaacaaccaaaatcgcaattttaacaatatgcctctctacccccgtgcactttttctgacatggttttcaggtctaaatagtggctgctccagtccatgaactcaaaggtttgaagctaccaccattgaactcccccatggtggtttcatgatgccccctccccaattcctcgcactttattctcctgggtggtttcgaactaccctgtttctcagtggccatttgttgtgtccctcaggggcttaatgactcaaaatctgggatccttcccctctcagacacccctctttcagcttagaatttggggaacctatagagaagtcacagaatcccatgaaagggaatggggcaggagccaggggtgttttttcccagtgcagggttgtgtctttgtgtctctgtctctgtgactgtaaatcctgccctgccccactcccaataaaagctttggtgtataggc

SEQ ID NO: 8920 - DNA, 83 bp, Homo sapiens
tcagggtgtctccttgtgcttctgagatgtggagaagaggctgctggcttccctaaaagttgaaataaaagatttttgccttt

SEQ ID NO: 8921 - DNA, 38 bp, Homo sapiens
gtgtgtgcgggagaccaaataaaccggcttgggtgcgc

SEQ ID NO: 8922 - DNA, 281 bp, Homo sapiens
cccaggcaagagagaagcaaccaccacaagctctcgggactagctgccttcgcaccttgctgtgtgacctgaggccctcactgagcctcaatttcctcatctgggtctcccaggacacatcacatacccacccttacttcctggcctcttctgggctactgccactgtgtgccttctgccaacgcctcctgtccccacctaagcctggtgggggtgaggggctccgggtcactgctgtatataactcccctcccccagaaaaataaatgtcactgccaacg

SEQ ID NO: 8923 - DNA, 75 bp, Homo sapiens
gccctcgctcctcatggtgtgcctccaacccccctgttccccaccacctcaaccaataaactggttcctgctatg

SEQ ID NO: 8924 - DNA, 21 bp, Homo sapiens
atggcctctcatgctagcatg

SEQ ID NO: 8925 - DNA, 259 bp, Homo sapiens
ctacctagcagtgggtgatggacacagacatggggctgttagcgtctctctgtttattcgctcacaataatacacagcccctggatggggagggggtaggaggggctacaacagggtggggtgggaggggaggagacatccacttccctggcccctctcccctctgtgcttgggggggaaagggagggagggggactccccctaaccccccagaatgtaaacagcagcagatgaacaaaaataaaaatacaaaaggccg

SEQ ID NO: 8926 - DNA, 43 bp, Homo sapiens
gccccgcccagctcccctccacaataaacgctgtttctccttg

SEQ ID NO: 8927 - DNA, 877 bp, Homo sapiens
agtccagggagggagcgccccgggccgcgtccgccccgtcccacactacgcccccgccccactcccggggcctgctaatctgaggccgatccgggaccggcctccttgcgtctcccattcccaagattgtcccgcctctgccaatccccgccgtccttccagcccacgacctgccgcgccgaggagcggcatctgtcccgtttcccgattgggtctgtcgtctctctccgcctagcgacagattccttctattaagggattggctcgctgagttctaagctctaaatgggtcaactcctttgttttccgcctagcgacaagggatttgctcgcacggcattggctccatcccctagtcgctggacagctctttttttgattggctcaaatcctgtaaagggcttgaccagtctctacatagtcaccgtccgcttttcctgagttctccctcccaattggctccagcttcctgggggcgtggccaagccctcctcttcccagaattggcccggggccttcaatttacgttctttacactacggggactggggtcgtctttgcccacgtcccgacaacttgttccctgaccccctcagggatggccccaaactgtccctgcctctggcaccccctttcattggttccatccatccccacaacagcctgccaatcgaagcccgtccctgcatccaggatggtaccagctcccgcccctcgccccccacctccacaggtgccttaaagggccctcgtccacccaaggtggggggcaggggccctcactctccggccctggtgtgggggagagagtgaggggttgggggatcggcagttgggaggggcgctctgagattaaagagttttacctctgagataa

SEQ ID NO: 8928 - DNA, 1414 bp, Homo sapiens
gcgacagcagccctggggcccgcaggtccctagggagttcatgaggggaatgcgccctgttgtctgtagtttggggttgtggcaagatacttgtttgtttgtttctttctttcacatgactgcccttgacatgatcgctgtgtgctttgcgtttttccatttaggagggtattctgggccttctgcccaggcagcagcctcatgggtgtggcttctgtggctttcatttgagtatctttggccccttttcacctactgcgaccacccacctcatcctggctcagcctggtgatggagaagtgctgatggtcttggtcccagccagggtcgtgggggcagccactctctccaaagcatagtcataggtgtcatgaaaaaataccaaatgtaagagaacctccaagtcagggcgcagtggctcacccctgtaatctcagcactttgggtggccaaggcgggcagatgacttgaggtcaggagttcgagaccagcctggccaacatggtgaaaccccgtctctactaaaaatacaaaaattagtcaggtgtggtggacgcctgtgatctcaatctcagctactcgggaggctgaggcaggagaatcacttgaacccaggaggtgttgcagtgaaccaagatcacaccactgcactccagcctaggcaacagagactctgtctcaaaaaaaaaaaaaaaaaaaaagaaactcccaggagacagcagcctagttttcgagtgtgagcttgtgcttgtgaaagctaaccatgctaaccaccaaggcaaagcagcacagtgtgaatagaacagagcgggatcaagaatttcacagaagacaggtcagctgaggggcctgcacacacagggtgttgaggaaccacagatgggcgccgagaggcctgccttttgcctggcccaggctcacccccaccttgggcctcacctcctccaggaagccttcccagctacccgaagctcaggtggccttcttgcaggtccccgtagcaccctgagcctgtaccttgggtggcacttgttatgctatcctgtgctagccgtttgtgcctcgtctcgctgttagattgtgagttcccatgggcagagacccactgtcgttccccgtgtgtccccagcccggtccctgtcacatttgttaaatgaaagaacaatgaagcccagtgtaacgtcagtccacagaaatagccacagcttccagtggtggccgtagacttggctcggaacttagtggcaccagagtaactctagtcagttacagtaaaatccactgtgtgtggaaggcagaagctagcggttgtatcccaagcatcttttgtatttgtctttatactttgctgaattctctgaaatacctattactgtatgttgcttttctaaataaatgtattgtgaaaccaaaa

SEQ ID NO: 8929 - DNA, 16 bp, Homo sapiens
agtattttcggaaaaa

SEQ ID NO: 8930 - DNA, 973 bp, Homo sapiens
agaggtctccatggcaacaggacaccagcaagtgtgtgggagtcgcactggtgtgacggccagaactggactcagatttcagccccatccccaatgaagagcttgagtttgaagattatactttttttgagacagggtctgactctgtcctccaggccagagtccagtggtgcaatctcagctcactgtagcctcaacctgccaggttgaagtgagcctcccatttcagcctcccaagtagctgggactacaattgtgagccaccatgccaggctcattgttatatttttagtagagacagggttttgccatgtttccctggctggtctcagactcctgggctcaagcaatctgcccgcctctgcctcccaaagtgctgggattacagacgtgagccaccacagctggctgaagattatactttcaattcagagcgagtttgaagatgacactttgaggcatcgtgtctatggttcattactacagaagcttctctggatgtgtaaagcacaggaaaccaggcagaggaggcacagggtgctctccagaacgagaagccagctcctggagttgtttgctgcaactgccattccccgttgatgaccatgctcttccttcagaagagggagagtgagaggaccaagtccaagtggttcccatttgaacatttaaaaaaaaaaaaaaggctgggcatggtggctcacgcctgtaatctcaacactttgggaggctgaagtgggtggatcacaagtcaggagttcaagaccagcctgggcaagatggtgaaaccccatctctactaaaaatacaaaaattagccgggcatggtggcgggcgcctaaaatcccagctactcgggagactaggcagagaattggttgaacccgggaggtggaggttgcagtgagccgagatcgtcccactgcactccagcctgggcaacagagtgagactctgtttctaaataaataaa

SEQ ID NO: 8931 - DNA, 318 bp, Homo sapiens
aactttccatttgcagtgtgcaacagaaaaaaaaaaatgaagtaatgtgactcaaggcctgctgtttaatcacagataagcttctagaacaagccctggaatgtgcattcctgccactggtttcaggatactcatcagtcctgattagcctcccggagggccccagtttccctcccgtgaatgtgaagttccccatcttggtggcctgcccttcagccagtgtcctagcaaagctggatggggttgggccggcccacaggggggacccctcctacccttgacacctctgtgctttggtaataaattgttttaccagag

SEQ ID NO: 8932 - DNA, 60 bp, Homo sapiens
gacggtggtttgggggtaaggagaaaggaaaataaatttaataaaattggtgacaaatcc

SEQ ID NO: 8933 - DNA, 584 bp, Homo sapiens
ctcttgtcaccgcctgagacctcgcgagactttcggtcccccccgccccttccccccaggttagcaattgggaatggctgggagggggtgtccccaagacactgggcttcaaatctccccccaagccctccctcctacgatcaagacaccttttgtccagacagctcccttagcgttgcctggaaaagccacagagctccctgcgggggtgcagaaccctgcaggcagccccaggctttgcagaaaccacacacactgttgctggatcttgagtcccattagctgtgagatgcctgtgagagccttcccgcacccgtcagaagctcagagccttcttggaccctttaaagatgtccctctccccagccctccgcctcaccgccccccacccccgaccccgtccttagaatcttctggaggagcctccctccccccccacccccccccactgctcctggagttctcatcggattccccaagggcactgccagcttcgctccactcagcccccttgcagaccccaccccctgcctgctctctttccctacaactaggtcagcccccagccccgctacggcggccgc

SEQ ID NO: 8934 - DNA, 75 bp, Homo sapiens
cgcccaagtgaagcgcatgcgcagcgggtggtcgcggaggtcctgctacccagtaaaaatccactatttccattg

SEQ ID NO: 8935 - DNA, 166 bp, Homo sapiens
ccccaaggcgtggaagccagacttgaccccaagacctctgaactctggggactctgagtcttccagcatccttcaaggtcaccgaatgaccagagatcaaagtaccttgcctcagggccgggcagatgagatattaaagttaataaaggtcagtccattaagaacc

SEQ ID NO: 8936 - DNA, 171 bp, Homo sapiens
ccatggctgaccatcggcgcccacagcgcagtccctgcgcatccccctccggctgcgcacactgcatgcctgggaaaggccagcacttcatggaccctggggaggccccgccccctccccacacccctgctccccactgccgctgctgcctcaataaatctgctgatttgc

SEQ ID NO: 8937 - DNA, 123 bp, Homo sapiens
gaagcctcctccctcccgagacaagatcatctgcctggcctctcaccaccaccatcccacccctgccctgccccacttccccagggtctcccttctgactcagtaaagatcaccgctgcctcc

SEQ ID NO: 8938 - DNA, 503 bp, Homo sapiens
gtctggcctaggcccgggatcggaccaggctccctcaggaccccatcctttcctgcccggaccgtgaattcatctccttgaagccataacgtccgagctgctggtgcggggcagccctggccctaggcttcctaaccctggaagcgagaggatgagaggaggccggcccagctccttctttcagggtgggggtcattcagcctccactgtgtctgtcttttcttccctggggctccccctcgaggcgaggggccatgcatgtctgggggacccctgccccccaaaaccctctgtctgtctctgtctctttgctgtttgtccaagactcagtgtcccgacccttgttctcgccgtgaatgtcaatgggccaatcctctctgtcctttcagacacacacacacctgtgtccaccccttctgttcgccacacccctgcgtctggccggtccccccactgctgctgctatcaacgccagaataaacacactctgtgggtctcactcc

SEQ ID NO: 8939 - DNA, 138 bp, Homo sapiens
tggctggcctggacggaccagccccgtccacagaactcttgagcctgctggcctcttgacctctgacccctgactgtcattctctccccgggccagggactctgttcaaactgcgccctgccctcatctcccaaggcc

SEQ ID NO: 8940 - DNA, 391 bp, Homo sapiens
gctgcattcaggaagtgcgggacatggtaggggaggcaaaaagccttgggcactaccctccctgtggagctgttcggtgtccgtcgagctagccacaccctgacaccatgttcaagggtaccggaagagaagggtgtctgcccccaacctcccctgtgggtgtcactggccagatgtcatgagggaagcaggccttgtgagtggacactgaccatgagtccctggggggagtgatcccccaggcatcgtgtgccatgttgcacttctgcccaggcagcagggtgggtgggtaccatgggtgcccacccctccaccacatggggccccaaagcactgcaggccaagcagggcaaccccacacccttgacataaaagcatcttgaagctttta

SEQ ID NO: 8941 - DNA, 46 bp, Homo sapiens
acgcccagccctgtcccctacccccagtaaaatcaaatgtgcatcc

SEQ ID NO: 8942 - DNA, 654 bp, Homo sapiens
ctctgggggacccctggtctgtgggggcatcctgcagggcattgtgtcctggggtgacgtcccttgtgacaacaccaccaagcctggtgtctataccaaagtctgccactacttggagtggatcagggaaaccatgaagaggaactgactattctagcctatctcctgtgcccctgactgagcagaagcccccacagctggccagcagccccgcctgacatggaacagaacggagccatcccccaagaccctgtccaaggcccagatgttagccaaggacttgtcccacctgaggacaaagctggcgctcaaggtcacctgtttaatgccaagataacaaagcgctgatccaagttgctctgtaggaatttctgtgacttttttctggggtcaaagagaaaccccgagacactgtacactgttccttttcacccaccaccccgatccctaggtgaggagaagcggcttgaagcagggctccattcattcaacacacatgaccacccgtgtgatcttgaacaagaggcccaatctcacttcgccttggtttccttatctgtaaaatgagaccatcttattgctgacttcaaagggctgttgtgaggattaaatgagatgattcgtctgaactgattaaaatcgtgtctggcactg

SEQ ID NO: 8943 - DNA, 582 bp, Homo sapiens
ctctggggactgggaacccatgaaattgacccccaaatacatcctgcggaaggaattcaggaatatctgttcccagcccctcctccctcaggcccaggagtccaggcccccagcccctcctccctcaaaccaagggtacagatccccagcccctcctccctcagacccaggagtccagaccccccagcccctcctccctcagacccaggagtccagcccctcctccctcagacccaggagtccagaccccccagcccctcctccctcagacccaggagtccagcccctcctccctcagacccaggagtccagaccccccagcccctcctccctcagacccaggggtccaggcccccaacccctcctccctcagactcagaggtccaggcccccaacccctccttccccagacccagaggtccaggtcccagcccctcctccctcagacccagcggtccaatgccacctagactctccctgtacacagtgcccccttgtggcacgttgacccaaccttaccagttggtttttcattttttgtccctttcccctagatccagaaataaagtctaagagaagcgc

SEQ ID NO: 8944 - DNA, 326 bp, Homo sapiens
gtcatcccaggactcagcacaccggcatccccacctgctgcagggacagccctgacactcctttcagaccctcattccttcccagagatgttgagaatgttcatctctccagcccctgaccccatgtctcctggactcagggtctgcttcccccacattgggctgaccgtgtctctctagttgaaccctgggaacaatttccaaaactgtccagggcgggggttgcgtctcaatctccctggggcactttcatcctcaagctcagggcccatcccttctctgcagctctgacccaaatttagtcccagaaataaactgagaagtgg

SEQ ID NO: 8945 - DNA, 532 bp, Homo sapiens
ccctgacatgtgacatctacctcccgacctaccaccccactggctggttccagaacgtctctcacctagaccttgcctcccctcctctcctgcccagctctgaccctgatgcttaataaacgcagcgacgtgagggtcctgattctccctggttttaccccagctccatccttgcatcactggggaggacgtgatgagtgaggacttgggtcctcggtcttacccccaccactaagagaatacaggaaaatcccttctaggcatctcctctccccaacccttccacacgtttgatttcttcctgcagaggcccagccacgtgtctggaatcccagctccgctgcttactgtcggtgtccccttgggatgtacctttcttcactgcagatttctcacctgtaagatgaagataaggatgatacagtctccataaggcagtggctgttggaaagatttaaggtttcacacctatgacatacatggaatagcacctgggccaccatgcactcaataaagaatgaattttattatg

SEQ ID NO: 8946 - DNA, 1062 bp, Homo sapiens
cgccacactgagttaattaactgtgtgcttccaacagaaaatgcacaggagtgaggacgccgatgacctatgaagtcaaatttgactttacctttcctcaaagatatatttaaaccaacctcatgccctgttgataaaccaatcaaattggtaaagacctaaaaccaaaacaaataaagaaacacaaaaccctcagtgctggagaagagtcagtgagaccagcactctcaaacactggaactggacgttcgtacagtctttacggaagacacttggtcaacgtacaccgagacccttattcaccacctttgacccagtaactctaatcttaggaagaacctactgaaacaaaaaaaatccaaaatgtagaacaagacttgaatttaccatgatattatttatcacagaaatgaagtgaaaccatcaaacatgttccaaaagtaccagatggcttaaataatagtctggcttggcacaacgatgttttttttctttgagacagagtctctgttgcttgggctgcaatgcagtgatgcaatcttggctcactgcaacctccgcctcctgggttcaagtgattctcgtgcttcagcctcccaagtacctgggactacaggtgtgcaccaccacaccaggctaattttttgtgtatttttactagagacagggtttcaccatgttggccagcatggtcttgaacgcctgacctcagatgatccacccaccttggcctcccaaagtgctgggattacaggcatgagccaccacggccagcccacaatgatattacaaacctattaaaaatgatacttagacagaattgtcagtattattcaagaacatttaggctataggatgttaaatgacaaaaggaaggacaaaaatatatatgtatgtgaccctacccataaaaaatgaaatattcacagaatcagatctgaaaacacatgtcccagactgcatactggggtcgtcatgaggtgtctccttccttctgtgtacttttccttgaatgtgcacttttataacatgaaaaataaaggtggggaaaaaagtctgaag

SEQ ID NO: 8947 - DNA, 178 bp, Homo sapiens
tggtgcactccagggcatcacatcctggggctcagacccctgtgggaggtccgacaaacctggcgtctataccaacatctgccgctacctggactggatcaagaagatcataggcagcaagggctgattctaggataagcactagatctcccttaataaactcacaactctctggttc

SEQ ID NO: 8948 - DNA, 597 bp, Homo sapiens
gcccgcgcgccacgggggcaccttggaagaccaagagaggccgaagggcacggggtagggggttctcgtagggtcccagcctcaatggttcccgccctggacctccagctgccctgactcccctctggacactaagactccgcccctgaggctccgccccctcacgaggtcaagcaagacacagtcgcgccccctcggaacggagcagggacacgcccttcagagcccgtctctatgacgtcaccgacagccatcacctccttcttggaacagcacagcctgtggctccgccccaaggaaccacttacacaaaatagctccgcccctcggaactttgcccagtgggacttcccctcgggactccaccccttgtggccccgcctccttcaccagagatctcgcccctcgtgatgtcaggggcgcagtagctccgcccacgtggagctcgggcggtgtagagctcagccccttgtggccccgtcctgggcgtgtgctgggtttgaatcctggcggagacctggggggaaattgagggagggtctggatacctttagagccaatgcaacggatgatttttcagtaaacgcgggaaacctc

SEQ ID NO: 8949 - DNA, 2056 bp, Homo sapiens
tccagatgctacgctccagctgatccagatgttatgctcctgctgatccagatgcccagaggctccatcgtccatcctcttcctccccagtcggctgaactctccccttgtctgcactgttcaaacctctgccgccctccacacctctaaacatctcccctctcacctcattcccccacctatccccattctctgcctgtactgaagctgaaatgcaggaagtggtggcaaaggtttattccagagaagccaggaagccggtcatcacccagcctctgagagcagttactggggtcacccaacctgacttcctctgccactccctgctgtgtgactttgggcaagccaagtgccctctctgaacctcagtttcctcatctgcaaaatgggaacaatgacgtgcctacctcttagacatgttgtgaggagactatgatataacatgtgtatgtaaatcttcatggtgattgtcatgtaaggcttaacacagtgggtggtgagttctgactaaaggttacctgttgtcgtgatctgaccacgtcccggtgaaagcgtgtgtccagggaagaagtgcacagggtagcccccagtcccaaccttccatccccaacccttagggatgatggaagaatcattttcctcaccctagttccaagtcccaggaaacaccttttaaccacttccttctcatctcccactgtttcccacttctggttccacccaacaccagttcctccgagctaggctggccctgagtcattagcaccttctctgccttcatgaggccactgaactcaagggacctcaccttgcttctatcccagcctctaagaccagagggccgagggggtagtgaagattgggaaacccttgccacctcaactgcccagcttgtgccaagaaacctccctctgacatttaggggaaaatctttggtttgtctgttattaattggctgtgagattttcgtcctgaaaacttgggaggaggaattgtttgattctccctgaaattgggggagggaaggggagttaatacacagaatccaggtaaggctaatagaagcttcagtgtccgctgggtgtggtggctcacgcctgtaatcctagcactttgggaggccgaggaaagcagatcatctgaggtcaggtgttcgagaccagtctggccaaaatggtgaaatcccatctctactgaaaatacaaaaactagccaggcatggtggcaggcacctataatcccatctacttgggaggctgaggcagaagaatcacttgaacccggggggcagaggttgcagtgagccaagattgcaccattgcactccatccagcctggacaaaagagcaaaactccatctcaaaaaaagaagaagtttgagtgtctcagcttatcctgaactttgaagcagtaacataagctagctgaatataggcacaacagaaatttcccattaagcacggggtttttgtttgtttgtttgtcctttcagttaccaatttatggagcatctattatgtgccaggcccagtgctgggtgctggggacatacgtaggggtgatcacaaggtcccccaccctgcagagcccacaggaggttgatgtacaaggtctgagcacacagctcccttccgtggcctctttcccattctgcccccattagcacacgcaggaaatgtcagacaggcgtatcagctgggtttgtcatccaaagaccagaagcgaggtcggtggaaacttgaaaactcgattcattattaaaggcaactcacccgtccctttagtcactccacaatgtttatcgagccacgtcttatgccaggcctcaaagatgaatcagaccaggcactaccctcaaggagctgctagttaggtcagggagacaggccagtcttacattcctgtcattcaggtctccactcaaaagtcacctcctccgggaggccttcctgaattgcccaggctataggagtccacttttggtcatccagtcccgatgctctgttttttgtttgtttgtttttttttttaatagcacctattatacctgaaatta

SEQ ID NO: 8950 - DNA, 312 bp, Homo sapiens
actggacccacccaccacagcccatcaccctccatttccacttggtgtttggttcctgttcactctgttaataagaaaccctaagccaagaccctctacgaacattctttgggcctcctggactacaggagatgctgtcacttaataatcaacctggggttcgaaatcagtgagacctggattcaaattctgccttgaaatattgtgactctgggaatgacaacacctggtttgttctctgttgtatccccagccccaaagacagctcctggccatatatcaaggtttcaataaatatttgctaaatgagtg

SEQ ID NO: 8951 - DNA, 361 bp, Homo sapiens
ttctgggggccccctggtgtgtgggggagtccttcaaggtctggtgtcctgggggtctgtggggccctgtggacaagatggcatccctggagtctacacctatatttgcaagtatgtggactggatccggatgatcatgaggaacaactgacctgtttcctccacctccacccccaccccttaacttgggtacccctctggccctcagagcaccaatatctcctccatcacttcccctagctccactcttgttggcctgggaacttcttggaactttaactcctgccagcccttctaagacccacgagcggggtgagagaagtgtgcaatagtctggaataaatataaatgaaggaggggc

SEQ ID NO: 8952 - DNA, 380 bp, Homo sapiens
aagttgagaaatgtaccggcttccatcctgtcaccatgacttcctcacatggtctgcttagcccttctctgctccttattcccagtgttccatttgaaccagtgatccatgtcctgaaaaatgctcaatctcagctaacattccatgtttcagaagcattcaggcactgccaggcttgcagtctcccagatgttgcatccctgaaacatctcaacaacctgaatgtcccaacccagacaatggcccaggtctctcaacttcatcagtgtggcttctatgagcccagatcaccacctgaacgttctgtctgtggcacattcttaaatatttccatcagcccatctcaacaatatatgtcctataaatggaccatccttgac

SEQ ID NO: 8953 - DNA, 110 bp, Homo sapiens
tggtcttcacggtgggatggacctcgtcagctgcccaggccctcctctctctactcaggacccaggagtccaggccccagcccctcctccctcagacccaggagtccagg

SEQ ID NO: 8954 - DNA, 82 bp, Homo sapiens
cgacttcgggcctcccgccgggatctgatgccgcggggtgggggctgcctgtaaatgacactgtgaataaacccgttacctt

SEQ ID NO: 8955 - DNA, 56 bp, Homo sapiens
gcccctcccagagatggcaataaaactgactctcaacatctatctctgttaactta

SEQ ID NO: 8956 - DNA, 44 bp, Homo sapiens
ctgcagcctgcctggggcagaataaaggaacggctttttttagc

SEQ ID NO: 8957 - DNA, 156 bp, Homo sapiens
gcagaaggcaagagcggcaagatgagttttgagcgttgtattccaaaggcctcatctggagcctcgggaaagtctggtcccacatctgcccgcccttccagcccttccccagcccctcctcttgtttcttcattcattcaacaaaatttggctgga

SEQ ID NO: 8958 - DNA, 291 bp, Homo sapiens
gcccaaatgtgtcccccaacttcatctggaagttaaagtgaggccactgaagaggaggaggagggtctagaggcctgaaatcctggttcctaggggaatgagggggctcagttctggactgtgggtttgtggggggaggctgactcctggtcctaggctggaaggaggaagaatagggcccatgggagggagctgagaagactcaagtccccgtctgcctggcaggttgttagaaaaatggactatccattagagcaactttctggggcctaataaaactgatgtgaaact

SEQ ID NO: 8959 - DNA, 1077 bp, Homo sapiens
gggtctcttaggctttaggactgggacttcggctagggaggaaggtagagtaagaggttgaagataacagagtgcaaagtttccttctctccctctctctctctctttctctctctctctctctttctctctcttttaaaaaaacatctggccagggcacagtggctcacgcctgtaatcccagcactttgggaggttgaggtgggcagatcgcctgaggtcgggagttcgagaccagcctggccaacttggtgaaaccccgtctctactaaaaatacaaaaattagctgggcatggtggcaggcgcctgtaatcctacctacttgggaagctgaggcaggagaatcacttgaacctgggagacggaggttgcagtgagccaagatcacaccattgcacgccagcctgggcaacaaagcgagactccatctcaaaaaaaaaatcctccaaatgggttgggtgtctgtaatcccagcactttgggaggctaaggtgggtggattgcttgagcccaggagttcgagaccagcctgggcaacatggtgaaaccccatctctacaaaaaatacaaaacatagctgggcttggtggtgtgtgcctgtagtcccagctgtcagacatttaaaccagagcaactccatctggaataggagctgaataaaatgaggctgagacctactgggctgcattctcagacagtggaggcattctaagtcacaggatgagacaggaggtccgtacaagatacaggtcataaagactttgctgataaaacagattgcagtaaagaagccaaccaaatcccaccaaaaccaagttggccacgagagtgacctctggtcgtcctcactgctacactcctgacagcaccatgacagtttacaaatgccatggcaacatcaggaagttacccgatatgtcccaaaagggggaggaatgaataatccaccccttgtttagcaaataagcaagaaataaccataaaagtgggcaaccagcagctctaggcgctgctcttgtctatggagtagccattcttttgttcctttactttcttaataaacttgctttcacctt

SEQ ID NO: 8960 - DNA, 1381 bp, Homo sapiens
ttctcatagaacaagaaccctctagagccccatgctatgcagtaggtcaccagggctccctcctcctgtctaaccaaaacttggaccaatgtctcccctttccccggctaccagggacccatccctgcctctagcttctactacccaccattctcctctcgacctctctgaggttgactattttagattccacatagagatgaggtcatgtggtacttgcctctctgtgtgtggctcattttacacaaaaaaatatcccctaggttcatccatgttctctcaaatgacagaatcaagcactgaatatttttttttctttgagagatggagtttcgctctgttgcccaggctggagtgcagtggttcaatctctgctcactgcaacctccacctcctgggttcaaacgattctcctgcctcagcttcccaagtagctggtactacaggcgtgtgtcaccacgcccagctaatttttgtattttttagtagagacggggtttcactataagtgggccaggctagtctcaaactcctgacctcaagtgatctgcctgccttggcctcccaaagtgctgggatttcaggcatgagccaccgcacccagcttgcattgaatattttcaaggagctaaaagaagattttaaatggtctcacaaaaacagataaatatttgcacagatgggtgtgctaatcattgtgccttgatggttccacgatgtatccgggtgtggaaatctcactgggtctctctcaaggccactcggctactcaggacagggctggaatttaaagcctgtccgattctgaggtctcttctctcatctagcactgagtcaagcaatcagcaggctgggcaccccttagccataagttttcaggaaataaattccttgagggcattgacttttacaaaagagggagcagcaatggcctagagtctcaggaacaagacaggtgcactgaggagatgaaggccgggaccccctgcccaacctgtatggcgggtctgtacttattttgtttacccccaatttaaaacgtttttttttattgcaggttgtttgtttgatatggtttggctgtgtccccacccaaatcttatctagaattgtaatcagaattataatccccatgtgttgggggagggacctggtgggaggtgataggatcatgggggtggttcccccatgctgttctgatagtgagtgagttatcacgagatctgatggttttgtaagtggtggtttcccctgctcttctctcttgcctgccaccatgtaagatgtgcctggttccccttccgccatgattgtaagtttcctgaggcctcccccgccatgtggaactgtgagtcaattacacctctttcatttataaatt

SEQ ID NO: 8961 - DNA, 282 bp, Homo sapiens
gaaactgcagagactcaggcctgtttgagggctcacgacccctgcagcaaagaagcccgagactgattcctttagaattaacagccctccatgctgtgcaacaggacatcagaacttattcctcttgtcaaactgaaaatgcgtgcctgatgaccaaactctccctttctccatccaatcggtccacactccccgcccccggcctctggtacccaccattctcttctctacttctctgaggtcgactattttaggttccaaatatagtgagatcgtagagtg

SEQ ID NO: 8962 - DNA, 476 bp, Homo sapiens
ggctggccccatctcagaagatgagcaggagctccactacgctgtcctacacttccacaaggtgcaacctcaggaaccaaaggtcaccgacactgagtactcagaaatcaagatacacaagtgaggaattgtccaaagccataaccttgattggagagaacatggtacctctcagtgtattggttactagggctgccacagcaatgtaccacaaaccgagtgacataaacacagaactttattttcgtatagtttcagatgttagaggtctgagaacaaggtgttatcagggttggtcccttctaaggcctctcttgttggcttgtagatggctgtctcctccttgtgtcttcacatggtctttcctctgagtgtgtttgtgtcctaatcttctcttcttataaagacactagtcatattggattagggcctccccatgacctaatttaaataaattaactatttaaagaccctcc

SEQ ID NO: 8963 - DNA, 298 bp, Homo sapiens
ggatttgcccagagttcagtcctggctggaggagccacagcctgtctgggggaaaggacaagtcagggaccacttgctgaagcacgaagagcccttgtggcaatgttaacattaactgatgtttaagtgctccaagcagatggaattagagaggtgggctcaaatctaggccctggcactgtcatcaagcaattcactgcatccctctgtgcctcagtttcccattctgtaaatcagagatcatgcatgctacctcaaaggttgttgtgaacattaaagaaatcaacacatggaaatc

SEQ ID NO: 8964 - DNA, 315 bp, Homo sapiens
gtccagccacgcggatgccgcctcaagggtcttcaggggaggccagaggagagctgctgggccccgagccacgaacttgctgggtggttctctgggcctcagtttccctcctctgcaaaacgagggggtcagcccaagattcttcagtctggactatattgggactgggacttctgggtctccagggagggtatttattggtcagggtgtgggatctgaggagtggagggaaagggtcctgctttctcctcgttcttatttaatctccatttctactgtgtgatcaggatgtaataaagaattttatttattttc

SEQ ID NO: 8965 - DNA, 168 bp, Homo sapiens
ggagggagctgggggacactttcgagctcccagctccagcttcgtctcaccttgagttaggctgagccacaggcatttcctgcttattttaggattacccactcatcagaaaaaaaaaaaaaagcctttgtgtcccctgatttggggagaataaacagatatgagttt

SEQ ID NO: 8966 - DNA, 1235 bp, Homo sapiens
atcttctgataccagaaaggtgggaaaatctttagtaggaatcctccagccattatatcccagagagctcatttagggctgaaacactgtggaggcagtggttgtggaggacatttctgtgagaagtcaaacctgttaaacaccattgaaatcatgttgggtagaaatgcagctgttatgaggaagtctttacctggagatgatatctcaattggtatcaaaagaattcttacaggaatatttatgaaagattgtgatggtgcttttagcgctaaattgtgcctcgtgtgccaaagaaacatagacaactgtagaggcaatggatatggaaaacatttttcgtaaaatatgggagaatttgtagaaaagaaaaactcttgaaagtaagaaatgatggcaactcaccaaattaactcatgtatcatacttttatgtcttgagagtcttggagggacgtgtttaatgaaatcttgaaccccaggaatagtattatgtaatgaaaacctatgaatataacaaatatggaagtaaaattgtgttagttttttatgagtgttgcaccaaactaacacaaatttaatggcttaaaacaacacaaaatcattatcttacagttctggaggactgaagtccaaatgcatctcacggggctacatcaagctgttgacagggctgcttttctttttggaggctctaggggagcgtctttctttgcccttccagcttctagaagctgcccaaattctgtggtttggggcctcctttcaaaaccagcaatggccaatcagtcttacatcactcaaacacttgagtgttctgtctccctcttccatgtttgaggacccttgtgattacactgtgaaaacccagataagccaggataatctccctatcttattatgaggcaagtatgttaagattttattctataatcagagaatcttatgctatgattgttatatgtgagcattatagatgctcttgaaatgttaaaatcacatcagcactggaaaataactcctaaatgtccaaaaagaacatgagatttatggtgcttgaaatgttgctaaacgtaaatttgtatctattctgaaattatataaattaacctacctggccaggcacagtggctcacacctgtaatctcagcactttgggaggccaaggcaggaagatcacttgagcccgcaagtttgagaccaccctgggcaacatagcgagactacctctacaaa

SEQ ID NO: 8967 - DNA, 1382 bp, Homo sapiens
taaacagtttgctgtttgatcatatagcctccagcggaatgctgagtttgtcatgtcccatgggcctttggctccctgcactaatatgtatagtagggtttacaagatatgaaatatattttacttttttatatcttataaacctcactacccctcccacaatattgtttttcatttactatcttgatcatagagtttggctggggaggggggcagttttagaggcttccacttggtgttcctcagaatgatatctcttactccgggggccaaggtaggggttagcttttgttctctttgtagtttagattgtatctcttgccttgttcaagttcacaaatctttttgtgtatacacatatgtacatgaaaatgatgttcatgctttttattattttacccttcattatttcattttttatagttctcatagctatgtctttcagttcactaatcttttttccacagtgtttaatctgtcattaatcccatccaaagtatgttttctctcagaaattgtaatttttaacctctaataatttgacatgggtttttccctgttatatctttcatatctttatttatcatggttttacttttaacctatttatgctttcatatttaaagtgggtgtttagtgggcaacatacagttgggccttccttttttatccagttaacaatctctgtctttttactggggtatttagatcatttacgttcaatgtattgatgtttttaggtttaaattactaacttactatttgttgtttattctatgtcttctttgttctccttttcttctttttctgctttcccttagagtagctgagtgtgtttatattacatattgtctcctttgttggcttattaactgtaaatccttgtcatttgattccttgagattttatagcatacatcattgtgagggattgcatatttatgtcctctccaaatttacatgttgaagtcctaatccctaagggatggcattaggaagtgtgacctttggaaggtaattacatcttgaaagtggaaccctcatgatgagattatgtgtcttatgagacaacacagaagagagtttgttttctctttctctgctctttgccatgtgaagacagaatgagatgaccatgcataaaccaggaaatggactctcactggacactagacctgccaacaccttgattgtgttttagagtccagttctagagactcctcagcctctggaacgtgagaaatgaatgtttgttaaggcagtcagtcagtctatggtgtattttttctagtagcctgaactgactgaaagaaaatcatgaacttatcattctaacttcaaggacattatatcacttactgtataataaaataatcttacagt

SEQ ID NO: 8968 - DNA, 512 bp, Homo sapiens
gaagaaaactcagatctatgtggaaaagggttgagcaaaaatttgtagttcattatgtggccgaaaagcatacactgagagaacatgtataaggctgagatagcctgataaactcatcctattaaaatgtatgctgtgatacacaggcaaatttgatgttaacctaagcacatacacagcaattgctcgactgtgtcaattaaatgagtaaaggaagcccaagtacttttaagtggaggaaatgaagtactgtgaatttttaaaacagatgagataattggtgtcgggagtgttgcagtgactgaaaagcttcataaggggcagttggtgggaaagggctaatactgtaatggtggaatgtgggacacatatgtgtcaattcagtttccttagaccagtgccagtgtggaggattaattgaaaaccaggaccataaactttcagaactttgtattatgcagagggatctgtgaaactagtcaatttgtttcattaaacaaatattttaaaat

SEQ ID NO: 8969 - DNA, 1545 bp, Homo sapiens
tcattttgggaaagcctcttgccagatgtaggcccttaagatatctgcaaagaagagtaatttcatgaatgcagactacatggttgtttatttagtgatcagttacttcatgttttgtgtcagagaaaacatgtacaaaacatttgagaaaatattttaggacattatgtctaaaaattgtatactgagaaaaatcctatgaatgtggcagactataaaagcctttggtgggaagataaaccccctcagaagtgatcatagatcatgaataaactactaattcgtggaaatgtaataattataggaacgtctttgcccaaaaataaaacttcaacagattgagagagttcacactggagaaatactttcctctggcaaacccctgtggcagggttttcagtaaaatgttttgcctcatcgtgtgctaggaaataatgcagaaaaaacttatgaaaacattcaatgtagaagacttttaggaaaatatcagagaatttaatgaaggaaagaagccttggcaaaatgatggatgagagctttctgtcacaattctaaccttaacagataatatgcctcatgtgcatttgggaacaggatagcttgagccatattcctagttgccttgtcactgattttatacattttaaattgtgacttcctctaatcacgaactaaaatttaatattgtatataataccggagtattttatgcctgcctcattttattatatgattagctcctgcatttctttggttctaagtttgtgttatttcagaataactaaagtacttcagaatgaaactggatacagtatattcagttcataagtgtaattgaccatacttgaatatgtttaagtttataagtaacatcaggtgttatgaaattaatataaataagatgtttttgtaagtttttattttgaaataagtttagattcacaaaatcttaccaaaatattccagagttcttgcccttaacccagcttcttccaaagataacaacttacataagcatagttcattaccaaatacaggaaagtgaaattgttacaatactgttaactacagaatttatttggaaatcaccagttttaacatgcatgcatttttgtttgttttttatatgtagctttaagaaatcttaacacatatattgattcatgtcaccaccaccgtaatcgagattcagaatgttgcatcaatgcaaactccctcatgctccttgtttatagtcacaacctctcctcagccctaacccttggcaatcagaaatcttttcatctttagttttgtcattagtagcatgttataaaaatggaatcatacagcatgtacccttttggtattggctatttcaactaaagcagattaacctgaaatccatccaagttgttctgcatatcattgttctgtttttattggccactaataatctatgatacgaatataccactatttgtttattcacccactgaaggacattagttttgttcccggtttttcttactgttacaaataaaaatcctatgaacatttgtacac

SEQ ID NO: 8970 - DNA, 2515 bp, Homo sapiens
actcatgcagaagaaaaccctactagtgccgtgactatggaaatgccttttgtggcaactcagacttcattaaacatcagtgtgtttctagccaattggaacataaacatggtgctgcctgttgacagatgtgtgtctgtcctcaggaggtgaaataatttgccctagagatcaatttgatgaatacagtaaataaggtagtgcctttagtggtcttttacctcatattttctgtcaatgaaaatacgttgaataaactatattaatgtggagatgttttgagcaataatttctgctcatatgtctgaaaagtatacagagataaattctgtgaatacaaagactaagaaaagtcttctgtggaaagatagactttattatcaggtttcatcatagatttcaacgtaagtgagcttattgttgatagaaacatgatgaccatgacaaagtctttactcagaaatatgacctcagtgagtgtcaaagtttacactggaaaataactttaaggtgacagtattgatggcaggatttcagcgacgcactctgcttcatcatttgtcaggagatcacatagaaagtaaaattgttccgaacatgctatcaaataaatgtggaacacctttagcaaactatcaacagctcatgaaggcatgaaatgtggtgaaaatgatgaatatttgagtgctttttcttaataagtataaccttaaacatcagctaatacacctggtgtgcattttcagtcaggataccttaatcctcatttctagttgccttgccaatgattccataatatactgtctcattactgtttatttttactgttgtgtaaaattgtggtataatgagaaatacatttggtctttgttcctggttcctggcatagagctcctaaaacgcttagaatttcatgagtgataagagttttttggttttgttttgtttttgctgttgttgttattcatagcactgcccttttaattacacctgattatactactgaagtgacttatggttgctcccctagacagcctcagaatggggctgttctctaggaagatcaagtaactagaggatggagactttgtgccccatttctcccacctcctggaaggggaggggtgctggagattagattagacaatgagattaagagaactccaaatagcccaagagggtggtgcacccccaacttcataggggtagaggctcctgagattaggagaaccctttttaggctttactctatgtacctcttcatttgagtgttcatttgcgtcctttataaccagtaaaacaaagtacgctgttttcttgagttttgtgagccctgtagcaaattatcaaacctgagtagggcagtgggaactcggaatttatcaccattcagaactgcaggttgtccttgtgagtggcatctgatgtgggggaagtcttggactgagccccttaacttgtggagtctgcactaatttagactgcactaactaacttgcactgcactaacttggactgcactaacttgtggagtctgcactaacttggagaagttagtgtcagaattgaattatagaacacccagttgttcagaattgaattgtagaacacccaattggtgtgggagaattagagaatttatttgtgtcagaaaatactccagaacaaccaccccatattatgattagctcttttcctttctttggctctgagcttaattgtacattaagcaaacttaagtagaaaagaaactgaatatgttaaatatattaacaacatatttggacttgcttaactaagattatagagatgatcagtttataaaaccaccttcaacttaaataaatttgaactcgaaattgcaaaagcagtctagaggctttgctagtatccttcaaccaatttctagtaaaaatatcctatataaccataattatcaaaaccagaaaaacaacattggtaggatactataaagtactaatcttattttggatttgacgaatttttacatgtttttttcttttttagtttgtactctaagaagttgtattacatgtacagattcgtgtaaccactgcaaccacataaaactaatgaacacaaagtccctcatgctacctttttatgcttacactccatccaaacctaactctgccaaccacttttctcctatcagtataatttcatcatttcatgaatatgataaaaataaaattgtttttgtaaatggtttttataaattttatataaataagttatatgaatttttattgatagagagtatgtaagcttttggcatttttgtcactcagcaaattactcctaaggtttatatgagttgatgaatagttgttttattatttttttttaccaccatgtatctaaccagatgaaagttgtttatatttgagagtagtatacatatttgatgtagtagtttatccattcacctatgagatatatttgcactgttttcctggttttaagtgctataaataaagatgctgtgaaatct

SEQ ID NO: 8971 - DNA, 295 bp, Homo sapiens
caatgcagtggacatgttcatgcctttgggaagaaaatctgccttgtacaacatcagagatttcacagtatagattttctacatgtgtactgagtatgaaaaatcatatttcaaaatccagtgttattcactaggatgaatgctatcaatgtcagaaaggcttcaacatgaattcaggctctgaattctttgatgtaccaatgtatagaaaattactcatctgagagagagtctgtggattgggggtaacctttcatttgtcaaccttcattaaaactatgacaacgtccacatg

SEQ ID NO: 8972 - DNA, 417 bp, Homo sapiens
acgttgtcctagtttctggaatcaccgaataattcctacttactgatataccttgtatatttaccccttctcttgaaatccctgtggaattgtaatctccagtattggaggtggggcccattgggaggtgattgaatcatggaagtggatttctcaaactgagaaagatgtagcgtcatccccttggtgctgtcctggcaatagtgacttctcttgaggtctggctgtttagaagtgcatagcacttccctgtcgcttgccctcattctcaccatgtgaaataccgacacccgctttgccttccaccatgattttaaccttcctgaggcttccctagagggtgatcagatgccagcaccatgttttcatttaagccttcagaaatatgagccaattaaactcttttctttatacatt

SEQ ID NO: 8973 - DNA, 636 bp, Homo sapiens
tgtggcagagtgttcagttagcattaaagccttgtaagacatacaataatttatactggagaaaaactttgcaagtataatgaatgtagcagagcctttagtttttgttcaaggcttaataaccgttagctagaccatagaggacagaaactttactaatgtactgaatgtggcaaggtcttaaggtaaaatctgagaccaggattcttcaaagaattcttgctggtgagaaacctaacaaatgtaatgaatgtggcaaggtcttctggcacaattctcacattgtacaatattgcaaaaattcatgcttgagagaaacaaaaacactgagagtgggaaaccattatgacttcaaacattcatcaacatcagagaatccatactaaagagcatttataataattatatgtgatagagattttccgcaggccaaagtctcactaggcatcaaaaacttttttgatgaaaccatacaaatgtaacgtgcatgcttaagcttttacccaggcatcaaaaccggaacatcacagggtttatactggagagtaactacacaaagataatgtaataagcctttcagtgtaatattcatgattttgtcgtgagagatccactcaataaaaaccaggcaaatgt

SEQ ID NO: 8974 - DNA, 718 bp, Homo sapiens
aaatgtgaagcatgtgacaaagtttccatttggaaatcacaccttaaagacataggagaatttatactggagagaaagcttacaaatgtaaggtttctgacaagacttgggagtgattcacacctggaacaacatactggacttcacactggagagaaaccttacaagtgtaatgagtgtggcaaagcctttggcaagcagtcaacacttattcaccatcaggcaattcatggtgtagggaaacttgactaatgtaatgattgtcacaaagtcttcagtaatgctacaacgattacaaatcattggagaatccataatgaagagagatcttacaagtgtaataaatgtggcaaatttttcagagatcgttcacatattgcaggtcatcggtgaactcatactggagagaaaccttacaaatgtcatgactgtgccaaggtcttcagtcaagcttcatcctatgcaaaacataggagaatttatacaggagagaaacctcacaagtgtgatgattgtggcaaagcctttgcttcacgttcacacgtcattagacatcagagaatctatactggacagaaatcttacaaatgtcatcagtgtggcaaggtcttcagtccaagatcactccatgcagaacatcagaaaattcatttttgagataaccgttcccaatgaaatgagtatagcaaaccatcaagcattaattgacattggagtc

SEQ ID NO: 8975 - DNA, 1376 bp, Homo sapiens
tgtaatgattgtcacaaagtcttcagtaacgctacaaccattgcaaatcattggagaatctataatgaataaagatctaacaagtgtaataaatgtggcaaatttttcagacatcattcatacattgcagttcattgacacactcatactggagagaaaccttacaaatgtcatgactgtggcaaggtcttcagtcaagcttcatcctatgcaaaacataggagaattcatacaggagagaaacctcacatgtgtgatgattgtggcaaagcctttacttcatgttcacacctcattagacatcagagaatccctactggacagaaatcttacaaatgtcagaagtgtggcaaggtcttgagtccgaggtcactccttgcagaacatcagaaaattcatttttgagataactgttcccaatgcagtgagtatagcaaaccatcaagcattaattgacactagagtcagtccagcattgacttgagtttgtgttgacttaacattgagttcaacccttaattgacattcaagtgtttatgttaagaggattgggccaggtgtggtttctcacacctgtaattccagcacggttggaggccaaggcacataggtcacttgaggtcagaagtttgaaaccagcatggccaacagatgtcagccacttttcccagcctgttttttgattcttattttctatttttcttttttgagatagtactttttaaagagatagtacttttttgatatagtactttataaaagggagatcaggccaggcacggaggctcatgtaagtaatcccagcactttgggaggccgagacgggcccatgacaaggtcaggagatcgagaccgtcctggctaacacggtgaaaccccatctctactaaaaatataaaatattagccaggcgtggtggcaggtgcctgtagtcctagctgcttgggaggctgaggcaggagaatggtgtgaatcctggagacggagcttgcagggagccaacatcgtgccactgcactccggcctgggcgacagtgagaatctgtctcaaaaaaaaaaaaaaaaaaaggatatcaaagctggatggtggctcatccctgcaatcacaacactttggtagactgatgtgagtggatcacctaaggtcagaagttcaagagcaccctggctaacatggtgaaaccccatctctactaaaaatacaaaagttagccggggggtggtggtgtgcacctttagttccagctacttgagaggctgaggcacaagagtcgcttaaacctgggaggtagaggttgccgtgaggcaaaatcgtgccactgccctcagcctgggcagtagagtcagtctccatctcaaagaaaccagcaaacaaa

SEQ ID NO: 8976 - DNA, 2279 bp, Homo sapiens
aagtgtaatgagtgtggcaagaccttcagtcagatgtcaaaccttgtataccatcatagacttcatagtggagagaaaccttaaaagtgtaatgagtgtggcaacaccttccatcacaattcaacccttgtaagtcacaaagccattcatactggagagaaactttacaagtgtaatgaatgtggcaaggtttttaatcaaaaaacaacccttgcacgtcatcatagaattcatactgcagagaaactttacaaataggaagaatgtgacaaagttttcggttgcaaatcaaaccttgaaacacataagaaaatgcatgctgaagagaaaccacacagatgtaaggtttatgacaagatttttgaatataattcatacctggcaaaacatattagaattcaaactggagagaaaccttacaaatgtgatgagtgtggcaacacctttggtcaaaattcataccttgtaattcaaaaggcaattcgtattggagagaaaccctacaagtgtaatgaatgtggcatagtttttaatcaacagtcacaccttgcaagtcatcatagtcttcatactgcagagaaatcttacaaatgtgaagactgtgacaaagttgtcagtcacaaatcacagcttgaaagacaggagaattcatactggagaaaaaacatacaaatgtaaggtttgtaacaaggcttttgggagtgattcacacctggcacaccatactagaattcacactggagagaaaccttacaagtgcaatgagtgtggcaaagcctttagtgggcagtcaccacttattcaccatcaagcaatccatagtatagggaaacttgactaatataatgattgtcacaaagttttcagtaatgctacaaccattgcaaatcattggagaatccataatgagagatcttacaagtgtaataaatgtgacagatttttcagatatcgttcatatattgctattcatcatcgaactcatgctggagagaaaccttataaatgtcatgattgtggcaaggtcttcagtcaagtttcatcctatgcaaaacataggaggattcatacaggagagaaactcacaagtgtgatgattgtggcaaagcgtttacttcacattcacacctcaatagacatcagagaatccatgctggacagaaatcttacaaatgtcatcagtgtggtaaggtcttcagtccgagatcactccttgcagaccatcagacaattccttttggagacagttgtttcaaatgccattagtatagcaagccatcaagcattaattgacattacagttaaatgagcactgacctgagtttgagttgacttaacattgagtttaagcattaattgacattaaactgtttatgttaagaggactgggctgggcactgtggctcacgcctgcaatgccagcactttgagaggccaagactggtaggtcactggaggttaagagtttgagaacagcctggccaacagacgggagccacttttcccagcctgtgttttcatttctattctttctttcttttttcttttttttgtttttgtttttgagatggagtctcttgctctgtcatccaggttggagtgcagtggcatgatcttgactcactacaacctccgcctcccaggttcaagcgatcctcctgcctcagtctcctgactagctgggactacaggtgcatgccaccacacctggataattttttgtatttttagtagagactgggtttcgctgtgttagcctggatggtctcgattttctgatcttatgattcacccacctctacctcccgaagtgctgagattatgggcgtgagccaccgtgactggcctgttttttgtttctttaacaaaaagttatggggatttctatgagtattgtgttgaatctaaatcacattcggttatataatcattgagcaatactaatttttccaatcagtatggattgtatgtgtatttatatgtttttaatcattttgatcaatgtttgtagatttcaaggtacaaacttctcacctttatatgtttattcctaaatatttcttactttaagctctttagcaaatggaagtggtttttaattttattttaaaattatttaatgttaatgtatggaaattcaactaatttttggtgctattattctattctgcaaatacactgaatatgtttattagttccagttgtattttggttgactgtgattttcttcacagatcatgtcatctacaaacaaataaaatttgacttctttctttctg

SEQ ID NO: 8977 - DNA, 4423 bp, Homo sapiens
catcagagtcaaatcagcattgacctgagtttgagttgacttaacattgatttcaagcattaatcgacattaaactgtttatgttaagaggattgggccaggcgtggtgtctcacacctgtaatcccagcactttgagaggccaagacaggtaggtcacttgaggtcatgaatttgagaccagcctggccaacagacgggagccacttttcccagcctgtatgttcttttatttatttatttatttttaagatggaatcttgctctgtcgcccacgttggagtgcagtgatgtgatctcggttcactgcaacattcacctcccaggttcatgcaattctcctgcctcagtctcctgagtagctgggactacaggtgcgtgccaccatgcccgggtaattttttgtatttttagtagagactgggtttcaccgtgttagctaggatggtctcgatcttctgtccttaaaatccacctgcctccacctgccaaagtgctgagattacaggcgtgagccaccacacctggcctgttttttgtttctttaacaaaaagttatagaaatttctctgggtattgtgttgaatctacatcacattcagttataatcatttagcaatattattccattcaatatggcttgtatctcttatttgcacatgtttttatcactttgatcaatgtttgtagatttgaaggtagaaacttctcaacttttttcatttattcctaagtatttcttactttaagttctttagcaaatgaaagtgtttttttaattttctttttaaattgtttattgttaatgtatggaaattcaactaatttttggtgctgttattctattcttcaaatccactgcatatgttttttagttccagttgcattttggttgactctttgtgattttctacacagaagatcatgtcatctacaaagaaatagttttacttctttctttctgatttggatgagtttgatttcttttgctatttcattgctctagctaggacagccagtattgattgaatagaaggggtgagagcattcttgcatcatgtgagatcctacaggaaaagcattccattttccctgactggttatttctgctgtggtcatttcatggatggtctttgtattgttgaggtaaatttccttctctttctattttgtttaggatttccatgatgactggatgttgaattttgtgaaatgctttttctccatgtattgagatgatgtggttttcatctttcattatgttcaagtggtatatcacattgatttgcttgactatgttgaaccattttgcatcccagaaataagtggcacttgcatatcaacaatcctttttataacctcttgaatacagttcgctagtacaaggggtcttcaggaagttcatggaaaaatacatattatgagaaaattgtgcatgatatcacattttttgcaccaagataaactgatacaaatccgttataacatgtctgaacagggtttggtttgaggcactcagatgggtaagacatgagtttgaaaagagactcaatcaaggcaatgtaaattctgctaaaactgaaacaagaagaaacatcaaatttgcgatgagaccagatgctgtggctcaggcctgtaatcccataattttcagaggctgagacagttgggtcacgtgggccccggtactcaagaccagcctgggcagaatggtgaaaccaccttctctacaaaaaatacataaattagctgggcattgtggcacatgtctgctggttcagcttctgtggagtctgcagtgggaggatggcttgagcctaggagttcgaggctgcagggagccatgatcatgccattgtactccagcatgggtgacagagacagatagtgtatcgaaaaatgaatctggtaaagtttgggtagagggacaatgaaatcattgatgctttatgaaaaggttatggggacgattcccaaaataaatcaccagtttgtaaatggaaaacttattttaagttgggacaagatgatgttgaaagtgatgcacaggacaggtgtggtggctcacacctgtaatcccagcactttgggaggccgaggcaagagcatcacgaggtcaggagatcgagaaaatcctggctaacacggtgaaaccccatctctactaaaaatacaaaaaattagccaggcgtggttgtgggcgcctgtagtcccagctactcaggaggctgaggcaggagaatggcatgaaccgaggaggtggagcttgccatgagcagagatcatgctactgcactccagcctgggtgacagagcgagactccatctcaaaaaaaaaaaaaaaaaaaaaaaaaagaaagtgatgcacagagtggcaggcagaccatccacataagttttataggtacaactgtcaaagacgacactggagaagagccaagctggatctataaggaattgcatatgagatggcacacatattcatgctgtctgaagattcagtcacgttaccatatcaagctgaaaatgtcaccactatctggagagttggacatgttttattgagaatgtattttttttctctggatctgttatgaacacctttgttggcttggttcagtaataaatatgtgagacttttcatttaaaaaaagtcaaatgacttaattctgtattttaaattctgttttgtttgttttgtttttttgagatggagtcttctgaaaattttctcatcttctctaacccggttcatgacagacccttggactttactgttgtggaaaaatctatataaaacagtatcagtgtgtcaaagcattatggctgtcacaagcttgtgaaaggaaaataaaaattactaagccaaagagaaaagtcaatctgggaactgcgtcagacaaacctgccttccattttattcctaaacaagatagttacaaagattttttaaaaagctacatatgcccctcccaaaccgggaacctcaagatctccaccctaaaatagttctgttgaatttcaccctggcgatgtaaactgagagcttatcttcacagatgtgggaaagagcccatccctctgcacacctgagtcaaatgtctatctgattgcttcccttgccctatttatgtaaaaatacagggtccctgagccagcctaaggcataagtgacttatccctcctccctgctcacatataaattgtgtatttagtgaaaggctgatcaaagattcaaagaatgttatttgttatctacctgtgacccagaaggtccccaattccagttattccacctttccagaccggaccaatgtatatatgtactgattgctgtctcgtgtgtctgtaaaatgtgtgaaaccaaactgcagcctcaacaccatggacacacgtcatcaggacctcctgaggttcgtgttaattggccttagactctccctgtccccagacccaggacgcatgtgtttcctttttcttcatttctattaaagatgggtctcattctgttggccaggcatgagagcggtgacaggatcagccctcactgaagcttcaatctcctgggttcaagggatcctcccacctcagcctccaaagttgctaggaccatagccaggtgccaccgcaccgggcaaatttttgtgttcctagtagagatgggctttcaccatgttgcccgagctggtcttgaattccagggctcaagcgatccagccgtattggcctcccaaggtgctgggattacagccatgagccaccatgaccaacgtgtttcttaatttaaaaaaaaaaaaatagaccaggtgctctggctcatgcctgtaatcccagcactttgggaggccaaggtgggcagatcacctgagatcaagtatttgagaacagcctggctaacatggcgaatcctcgttttgaccaaaatatagaaattagcctggtgtggtggcgagtgcctgtaatcccagctattcaggagggtgaggcagaagaatggcttgaattcgggaggcggaggttgcagtgagctgagatcctgcaactgcactctggctgggcaagagcgagactccatctctaaaataaaattaaagtaatataaaaaactgcttctcatgaaagctttggtataatcttacgaggtaacatcattgttttgcaactacggtatgtgttcaaaatgttcttctttgaccccacatttcattagatatatttttaagccattttaaaattgtttttctctgaaatttattgtgtttagtttacattgaggactgcatgctttctagtctgtatcatacattggaaacattttctagtacctgataaatgattttaggttgtttcgatgtgtacttgataaagatatcaaggaactttttctttatgctaacattaaaatttagttgaagtagcctatt

SEQ ID NO: 8978 - DNA, 2150 bp, Homo sapiens
gtgtggtgaggtcattaggtacaattcactcctttcacatcagttaatttcattcttgacagaatccttacaaatgtagtgacagtggccaatccctcatgagttgaagcattaatagatatgagaggccataagcaagagacatcatgtaaacatatgtggcagagggtctatccaggcctcgcaggttactaggcatcaagatttatatctttgatgaaacgaaacaaatgtaatatgcatcctgaggccattacccagtgaccgatggtaagtgaggattcctaggaggaataacagtctctggtttccctgtttgcctttgatattatacactgtagaatactcacaagtccaaatatgctaaaaattatatatttttaactcacatacgaaaaggttgcaggatatttgtaggcagtcagttaccttcaccttatgaaatgtttcactgagttatttgaggttttttggaaagcctactattgcgtttcaatgtgaactttgaaatcttattgtgcatccttacacaccttccatggtgctttcttggaaagatcattgggatggaaggatcattgattgggtgaagatcattgattaggtgaaggattatttctatccaatttgtgaagaaggaggactttgcttttaaaattaagtatcatctgaattagcatttgggagtggcgaaaaacaatgtaaaactatgatgtcactcaccattctgataatgttcagggtgcctttctcctaccaggagagtactgtggcttagaggaaagaaatggtctatcaactgaacatgaaatggagcaggccaagaccttaggacattgggatttttgtgggaggagagtaataggtaattagacactgattgtgtggtagaaatactgcaggggaaaaggtcgccctcttatgcatcaaagagcaatacctgttgtttagcaaagagtgatgaaaaattgatcttgttttgaaattgaagagagaggccaggcgcggtggctcacacctgtaatcccagcactttgggaggctgaggcaggtggatcacctgaggtcgggagttcgagaccagcctgaccaacatggagaaaccccaattgtactaaaaatacaaaattagccgggcgtggtggcaggtgcctgtaatcccagctacttgggaggctgaggcaggagagtgcttgaacccaggaggcggaggttgtggtgagccaagatcatgccactgcactccagcctgggcaacaagaacaaaactccatctaaagaagaaaaagaaaaactgaagagagagtagttgtcagagtgaagagtttaatcaacagaagtagagtaacatattctttagtagaactcacattatctgcttgaagcacattttgctaatgttttattcagaatgtatcatagatataatgttttaactaataaaatagaatggtttttctctatgaatgaatcacattctttctgccaacatagttttatcctgtctcagtaggatactccataacacaatagcagtacaccactaggctcttaaacgatcaagaacaatttttttcatggtgaaatcaaataacgcagttttggaaacctataaccgcattttgtgcttgaattacgtgccccacactgtggcttaggatacttattggggtataatgaaaatcttactgaaagttaatttcacattcttacaccccaaaatctgcattgccattgatgcatatgcaccacattattatatttccacatcagtttcttgtgtgccaaataagacccatgctttgcatcttggtttccatgaagtgaaaatacatagtaagaatgcgagaaatataaatcaggccaggcacggtggctcacacctgtaatcccagtactttgggaggccaaggcaagcagatcacctgaagtcaggagagaccagcctggccagcatagtgaaaccccatctctactaaaaatacaaacttagctgggcttagtggtgcatgcctgtagtctcagctacttgggaggctgaggcaggagaattgcttgaatccaagaggcagaggttctattaatggagatcattccattacactccagcctgggcaccaggaacgaaactcgttctcaaaaaacaaaac

SEQ ID NO: 8979 - DNA, 1154 bp, Homo sapiens
aaaccttacaaaggacgccgggcgtggtggctcacgcctgtaatcccagcactttgggaggccgaggcggggggatcacctgaggtctcgagttcgagaccaggctggccaacacggtgaaacgctgtctctactaaaaatacaaaaattagctgggtgtggtggtgcacgcctgtaatcccagctactcgggaggctgaggcaggagaatcacttgaacctgggaggcggaggttgcagtgagcgagatcatgccattgcactccagcctgggcaacaggagtgaaactccatctccaaaaaaaaaaaaaaaaaaaaagtaaccttacaaaggagtgcggccagtttttcagccacaaattctttcacaacatcagagaattcattcttgagacaattcttacaaatacagtgactgtggcaaactcctgatgagtttaagcattaacagacatcagagttcaaatcctgtgaatatactatgtatgacagaagctttatccaggtctcagagctcaatacgcatcaaaagatacatctttgatgaagtcacacaaacgtaacatgcatgctgagactattactcctggaccacaactgtaggtgaggattcataggaagagtagaactcagtctctagtttcctcataaccctctgatattatatacttcagcataatcagaagtccaaatgtgttaaaactcattacatgatacatatcaaaggttgtaggatgtttggaaatggccaattactttcagcttataaaatgttttgttgaagtatttaagatttattgaaaaggctactatttataacttccaaccagaactttgcaatgtgctgattttatacatgattatacgcctaacatggtgttgttcgggaaagaatcaaaggatggaagggctcactcacttcattaggtgaggattatttctctccaagctcctgaagaaaaaagactctgccttttaaaattaaatatagtctgaattagagagcacttggaaagggcagaggatgatgaactatgatgtcactcatcatccttattgcactgcaggtgcccttcttctgacagaagagcactgtgggtatgggaagaaattctctactggccgggcacagtggctcacgcctgtaatgccag

SEQ ID NO: 8980 - DNA, 2192 bp, Homo sapiens
tagtgtaatgagtgtggcaagaccttccatcacaattcaaccctgtaagtcataaggcaattcatactggagagaaaccttacaagcataatgaatgtggcaaggtttttaatcaaaaagcaacctttgcacatcaccatagacttcatactggagagaaaccttacaaatgggaggaatgtgacaaaagttttcagttgtaaatcaaaccttaaaacacataagaaaattcacattgaagagaaaccatacagaggtaaggtttgtgacaaggtttttgcatataatgcatatctggcaaaacatactagaattcacactggagagaaactcattataagtgtaatgagtgtggcaagaccgttggtcaaaattcacaccttgtaattaaaaggtcaaaattcacaccttgtaattcatagtggagagaaaccttacaagcacaatgaatgtgacatggtttttaatcaacaatcacaccttgcaagtcatcatagacttcatactgcatagaaatcttacaaacgtgaacaatgtgacaaagttttcattcacaaatccagcttcaaatacataggagaattcacactggagaaaagccatagaaatgtaaggtttgtgacaaggctttcgggaatgattcacacgtggcaccccatactagaattcacactggagagaaaccttacaagtgcaatgagtgtggcaaaccctttagtgggcagtcaccacttattcaccatcaagcaatccatggtatagggaaacttgactaatgtaatgattgtcacaaagttttcagtaatgctacaaccattgcacatcattggagaatccacagtgaagagatcttacaagtgtaataaatgtggcaaatttttcagacatcgttcatgccttgcatttcactggtgaactcatgctggagagaaaccttataaatgtcatgattgaggcaaggtcttcagtcaagcttcatcctatgcaaaacataggaggattcatacaggagagaaacctcacaagtgtgatgattgtggcaaagcgtttacttcacattcacacctcattagacatcagagaatccatgctggacagaaatcttacaaatgtcatcagtgtggaagggtcttcagtccaaggtcactccttgcagaccatcagacaattccttttggagacagttgtttcaaatgcagtgagtatagcaaaccatcaagcattaattgacattagagtcaaatcagccttgacctgagtttgttgatttaacattgatttcaagcattaattgccattaaactgtttatgttaagaggattgcactgggggccatggctcatgcctgtaattccagcactttgagaggcaaagacaggtaggtcactggagctcacgagtttgagaacagcctagccaacagatgggagctacttttcccagcctttattttctttttcttgttttttttttgagatggagtcttgctctgtcgcccaggttggagtgcagtggcacgatctcagctcactgcaacctcctcctcccaggttcaagcaattctcctgcctcagtctcccaagtagctgacactacagttgtgtgccaccacacctgggtaattttttgtgtttttagtagagactgggtttcaccgtgttagccagaatggtctctatcttctgactttatgatccacccgactccacctcccaaagtgctgagattacaggagtgagccactgtgcctggcctgttttttgtttctttaacaaaaagttatagagacttctatgagtattgtaccgaatctaaatcacaattgagtatataatcattgagcgatattcatttttccaatcagtatgggatttatatctatttatacatgtttttaatcattttgatcaatgtttatagatttcaaggtacaaacctcactttttatgtttattcctaaatatttcttactttaagttctttagcaaatggaattggtttttaattttcttttaaaattatttattgttaatgtatggaaattcaactaatttttggtgctgttattctattctgcaaataaactgaatgtgtttgttagttccagttgcattttggctgactctttgtgattttctttacagaaggtcatgtcatctacaaacaaataaaatttgacttctttctttctg

SEQ ID NO: 8981 - DNA, 1768 bp, Homo sapiens
tgagagtggcaaatcctttaattatagctaactcttaaggaaatatcagataatccatttaggatagaaacaatataaatgtgaggtatgtgacaaggtctttaatcagaattgattccttgtatgccataatagatgtcacactggtaagaaaccttacagttgttatgagtgtggcaagaccttcagtcagacgtcatcctttacatgctatcgtagacttcatactggagggaaaccttacaagtgtagtgagcataacaagacctttggttgaaattcagcccttgtaattcataaggcaattcatactggagagaatccttgcaagtgtaatgaatgtggcaaggtttttaatcagaaagcacaccttgcacgtcatcatagacttcatactagagagaagccttacaaatgtgaagaatgtgaaaaagttttcagtcgcaaatcacatcttgaaagacaaaacttaaaagaggtggcgttgcccttgtttttgagaatgccctactgtgtaagtggtagtgttctttcttttttttttttttttaagacggagtctcacctgagcgagcctctgcactggccttatttattattgttattaattttttgtttttgagacggagtttcactcttattgcccaggctggagtgcaatggtgcaatcttggctcactgcaccctctgtctgttgggctcaagcgtttctcttgcctcagcctcccaagtagctgggactacaggtgcatgccaccacgcctggttaatttttgtatttatagtggagatggggtttctccatattggtcaggctggtcttgaacccttgacctcaggtcatccacccgcctcggccttccaaaacgctggatttacaggcttgagccacgcgtccggcctgaagtggtattttttagaaagtaactaaaccttttttcagtttaatgacccagggatgtatttctgaaggacttgggagcgatccttttaaggcaaacaagggagatagtacctgtatcttagtaggaaattaaataattcaaacatcaaatgtttcaaattaaaagctaccgacctttaaataattctgagccttgagaggaacgtggtcatgcaacaagagtccagtggcatgcaggcacaaggttttttcttttttgttttttgtttttttttgagacagtctcgctctgtcgcccaagctgaagtgcagtggtgcgatctcagctcactgcaagctccgcctcctgggttcacgtcattttcctgtctcagcctccccagtagctgggactccaggcacccaccaccactcccggctaattttttgtatttttagtacagacagggtttcactgtgttagccaggatggtcttgatctcctgaccttgtgatccacccacctcagcctcccaaagtgctgggattacaggcatgaatgaccgcgcccagccgcaggcgcaacttttttgagttttcctggccaggcgcagtggctcaagcctgtaatcccagcattttgggaggccgaggtgggcggatcacttgaggtcaggagttagaaaccagcctggccaacgtggtgaaaccccgtctccagtaaacatacaaagccattacagggcatggtggggcacgcctgtattcccagctacttgggaggctgaggcaggagaactgcttgatccggggaggtggaagttgcagtgggccaagatcatgccactgcaccccagcctgggcaacagagcaagactccgtacc

SEQ ID NO: 8982 - DNA, 438 bp, Homo sapiens
tgattgtcacaaagtcttcagtaatgctacaaccattgcaaatcattacagaatccatattgaagagagatctacaagtgtaataaatgtggcaaatttttcagacgtcattcataacttgtagttcatcagtgaactcatactggagagaaaccttacaaatatcatgactgtgacaaggtcttcagtcaagcttcatcctatgcaaaacatagaattcatacaggagagaaacctcacaagtgtgatgattgtggcaaagcctttacttcatgttcacacctcattagacatcagagaattcatactggacagatgccttacaaatgtaagggtggcaaggtcttcactctgtggtcattccatgcagaacatcagaaaattcatttttgagataattgttccaaataaaatgaatataaaaaatcataaaacttt

SEQ ID NO: 8983 - DNA, 497 bp, Homo sapiens
tatggcaaggtcttcagtcaaagtttaaatcctgtgagtcatcaaagaatttatatcagagagaaaccatacaagtataataaatgtggcaaggttttcagtcacaattcactcctacacagcatcagagaatttcattcttgagagaatccttacgagtacagcaaacccttcatcacaagttcaagcattcattgacatcagagtccatgctaaagagaaatcatatacacctaactgtgtggcagaggcttcatttaggtctcacaactcactagacatcaaaatgtgtaaacatctttgtatattttgtgcatgttgaagctattaaccaaggatcaaaactgtaacacatccaaggatttatgtgaggaataattcagtctagttgtgctgataaacttttcatattacacattgtagaacaaatgcaagcccaaatatgttaaaactcacacaacatgatatatattaaaggttgcaggatgtttgaagtc

SEQ ID NO: 8984 - DNA, 913 bp, Homo sapiens
tggagagaaaccttacaaatgaaggtggtaacttttgcagttagaattcattcctttgacaacgtcagagaatttatgcctgagagattccttgaaaatgcaatgactggctgggtgcagtggctcatgcctgtaatcccaacactttgggagtccgaggcaggtggatcacctgaggtcaggagttcaagaccagcctgaccaacatggcgaaaccccatttctactaaaagtacacaattagctaggcctggtggcgtgcgcctgtaatcccagctatataggaggctgaggcaggagaatcacttgaacccaggaggcggaggttgcagtgagccaagatcgtgccaatgcactccatcctgggcaaaaagagcaaaactccatcttaaaggaaaaaaaaaaaatgcaatgactgtggcaaactcctcatgagttcaagtattaatagacatccaagagtccataataatgagaaatcacataaatgtactgtgtgtgacagaggctttattcaggcctcacagctttgcaggcattaaaatctacgtatttgatggaaccacacaaatgtaatgtgtaagagcatcctgaagctcttactctaagactgtaactgtaggtgaggattcatacaaagagtgactcagtctctagttctttgattcacttttaaaatgataaactgcacaataattacacgttccaatatggtaaaacttaagacattatatatttcaaaggtcaaaggacatttggaaatggctacttaccttcaggttataaaatcttttattccattgtttgaggtttctcaaaaaggctactgtttgtgactttcaacctgaactatggatctgtggctattttgcatccttaagcacctttcgtggtgcctatctgggaaagaacc

SEQ ID NO: 8985 - DNA, 1587 bp, Homo sapiens
catcaggggctccattgtgaaaagaaaccatataaaacgaaaatgtggtaaagcctttagctatggcttatgtctcacttgataccagaatatacatctttgagataaaccacacaaagataacatgtatggcaaggcttatccaaagttcaagccttgtggaacatcatagaattcttactgtagagaagccttacaaatataatgaatgtgaacagctttataaaaatatttaccctattatggttataacagaagacattcaggatggaaaccatacaaatgtggcaagtcctttaagcaatgttctgacttcaggatacaccattcatattggagagaagcattacaagtgaaggtggtaaattattttaaatttctcaatggaaattcatccttatatgcaagcattttgtcatacaaaaattcaggctagagggaactaagtcttttttccttcttgaagattaagtgattgatgttaaattcacagacaattttaaaaagtcacaaactcatggtgtgtgtcagaggagcaaggacatctgtggaaagatgtaacttcagtgttaaaaattttttattcagttatttcatatttttaaaagtatgaaatctgttgctgttaaatcttcatggcatgcttttcatttatcatgattgtctcaaggaatggatgtaagatggaagggactacttccttaggtgtggcttctttatattactgaaacctggaaaaagcaagaacactaattttttctttttttggagacagagtcttgctctgtcacccaggctggagtgcagtggcaccatctcagctcactgcaacctctgtctcccgggttcaagcaattctcctgcctcagcctcacgagtagctgggattacaggcatgcgccatcatgcctggctagttttttgtttttttgtttttgtatttttagtagagacagagtttcgccatgttggccaggctgatcttgaactcctgacctcaggtgatccacctgccttggcctcccaaagtgctgggattacaggcatgagccaccgtgcccagccaagaacactaatatacaatatactataagagcatgggggtttgtgccagaagagaggtaaaactattgtctaacatatatgctttatgtggtcaggaccccttagaattgttgatgtgactggggacctttgtcgattataggagagattggttacagtacaagatgaccatgaaacaagaagagtagggtgggacattgagagattttcatggaagtgaaatggtcggttactagagactgcatatgtggtagaaagaaatggagggggaatgatagtcaccctctcttgaaaggtagttactgttgcatatcacagattattgaacatagataggtcttatttttggaaactgaagagagaatggttaccatagaggacagttccatcaaaagaaccagagtagtgttcttataggggattcacatttggcccctgagattgcatttgataccattttatttagaatatattatacttcttatgtcttaattagtaaaatataatcatttttagtaaccc

SEQ ID NO: 8986 - DNA, 61 bp, Homo sapiens
tgtaactctacagtgggtgtgctatgttcttattaccctgattaaatgtgtgatgtgactc

SEQ ID NO: 8987 - DNA, 446 bp, Homo sapiens
atggtcctatctgctggctctcccctgagatctggacagaggaagatgggagggtgctcatcacccccccagcataatgatcagcctccttcctagagacagactcatgcagattgagatcaaaagtccctctgcttgggatcaaattaatgtttgacagagctggccaggcgtggtggctcatgtatgtaatcctagcacttcgagaggccgaggcaggtggatcacgaggtcaggagtttgagattagcctggccaagatggtgaaaccctgtctctactaaaaataaaaaaaaattagccaggcatggtggcgggcacctgtagtcccagctactcaggaggctgaggcaggagaatcgcttgaacccgggaggtggaggttgcagtgagccgagatcgcgccactgcactccagcctgggcgacagagtgggactccatctc

SEQ ID NO: 8988 - DNA, 135 bp, Homo sapiens
caagaagacagccctggccactaaaggaggggggatcgtgctggccaaggttatcggaaatctggagatgcagatactgtgtttccttgctcttcgtccatatcaataaaattaagtttctcgtcttaaaaagaa

SEQ ID NO: 8989 - DNA, 1010 bp, Homo sapiens
tcctccagctcctcctccctcagacccaggattcccgggccccagtacctcctccctcagacccaggactccaggcccccagcccctccttcctggacccaggactccaggcccccagcccctccttcctgatccagcagtccaggccccagccccttcttcctggacccaggagttgaagcctccatcgactccccctcaactttgagactgtagagtcaggtccctaagtccaccccaggggctggaaacctggagttcagggcccagactttggggtccgggagctgatggcccctctctcccggctccgcccgcagactctggctcctccgactacacccgggggaacctagtccgcctggggctggccgggctggtcctcatctccctgggcgcgctggtcacttttgactggcgcagtcagaaccgcgctcctgctggtatccgcccctgagccccaggagcactgcagcccgagacttccaacctgagtggcggagaagctgggaccctgggctggactgtcctttcctgcagccccacagtcctgctggctgagctccgcggaacggtccttagaccccgctgtgccctgtgctgtagcttctttccaggcctttcccaaggagtagctgaaaggaagacgcgattagtggttaagacttccaagccagaagacagagggttcgaatcccagcactgccgtctactcactgtagtagtagcagctacagaaaggtagtagtgagacgtgaagccagctggacttcctgggttgaatggggacctggagaacttttctgtcttacaagaggattgtaaaatggaccaatcagcactctgtaagatggaccaatcagcgctctgtaaaatggaccaatcagcaggacatgggcggggacaataagggaataaaagctggcgagcgcggcaccccaccagagtctgcttccacgctgtgggagctttgttctcttgctctacacaataaatcttgctgctgctaa

SEQ ID NO: 8990 - DNA, 27 bp, Homo sapiens
cgcatgcccaataaactgaccccacac

SEQ ID NO: 8991 - DNA, 77 bp, Homo sapiens
ctcctgagggggtacaggagaggccgctgctgccagccgtcatataaaactatttattcataaatattttccaaaat

SEQ ID NO: 8992 - DNA, 196 bp, Homo sapiens
cccccgcagcccacgtcccgctttcagaccccaggcccattgtaagcctaggtcacaacatctgtaaactaggagaactggagaagactccacgcccttccagctttggtatctggagatttccagggcccctcgccgccacgtcctgactctcgggtgatcttccttgtatcaataaatacagccgaggttgctg

SEQ ID NO: 8993 - DNA, 629 bp, Homo sapiens
gctgtcacgacgctccctctgccagctggtcccgggaattctgtgaaccaggctgctgtctcctccccagaaagagtccttaccttggagagggtcctggagagaatttcctcttccccagctaaataccctgcctgcaactgaagcagacccgggggtgtcctccctgccctctgcccagaggccacctccactcctacaaaatcaaagtattgtccagacaagagtcactggcccctgctccagcttctgggtatccagagagcactgcacttccccaaaacggaaggggcccctgggcagtgggttttgggcaaattccctttctttgcatccacaatgtggggtcggagcttgggggcaggtcctgggagtgggaagcctcttccttgtgtctttcgctccacttttagctcatcgcaccaatattgcagacttggaaggaagcataagcttcccatttcacaaaggggaaactgaggtgcgggtgcgcgggcctggggacggccgtcccatggcttccatctgagccacctcgggaccccagcgctcctggcgccctcttctcatcgcttggcctatgacaggtcaccgtgtgtaaatctttcccaataaagtgttgcacaaag

SEQ ID NO: 8994 - DNA, 815 bp, Homo sapiens
cccggggggtacgcagaccccacactcagcagaaggagactcaggactgctgaaggcacgggagctgcccccagtggacaccagtgaaccccagtcagcctggacccctaacacagaccatgaggagacgctgggaacttgtgggactcacctgactcaaagatgactaatatcgtcccattttggaaataaagcaacagacttctcaacaatcaatgagttaataacaaaaaaacaaaaaacaaaaacagacgtaaaggccgggtgtggtactcaggaggctgagtggggaggattccttgaacacaagaagttaaggctgctgaggctgcagtgagctatgactgtgccactgcactccagcctgtgtgacagagcgagaccttgtctctaaaaaaaaaaacagtgaatgttttaaactgaatgataatgtaaatattatacatcgaacttatgacatgggaaaattaagaagcataaataggccgggcgcggtggctcacgcctataatctcagcactttgggaggctgatgcgggcggatcatgaggtcaggagatcgagaccatcctggctaacacggtgaaaccccgtctctactaaaaatacaaaaaaattagccgggcgtggtggcgagtgcctatagtcccagctactcaggaggctgaggcaggagaatggcatgagcccgggaggcagagcttgcagtgagctgagatcgcaccactgcactccagcctgggcgacagagtgagattccgtctcgaaaaaaaaaaaaaaagaaagaaaaaaaataaaaaagaagcataaccagg

SEQ ID NO: 8995 - DNA, 2360 bp, Homo sapiens
acagcggagaggacaatgcacccttcagcgtggtggagcctcagggacagatctgatgatcccagaaggctctggaggacaatctaggacctccagaggggggtgagatttcaggccacacactgtggaaggtaatcatgtctgatcacaaattttgggtctccaccttacttccaatctatgttgtgaatgcccagttgagacccacggaaaagagctcatgggtgagtgtgaagtgcttctctgtcttaagttcccagagatccttgcctcttggaggccagcaaacactaactcttgaggaattcatgacaatatcatctgattcctccttcccagcttgtatggcagtctcccaccctcatgtgttcaatctgatgatcccaggaggttctggaacaaaatctacagcctatgctttctggactatctgtcgatcattcctgaagagagggatcaatgttgaggtattcatttcacatgatgaaaatgacaatatcaaatgtcagaggtagtagggctcacgtagaaatccaatacatccatggtaggactgcaaattacttgaatcaatttggggaaaatatcagaagtacccagtgaaaaagaagaaacatggccgggcacggtggctcatgcctgtaatcccagcactttgggaggctgaggcgggcggacacgagttcaggaattcgagtccagcttggccaacatagtgaaaccccgtctctactaaaaatacaaaacattagctgggcgtggtggcaggtgcctgtaatttcagctactcaggaggctgaggcaggagaattgcttgaacctgggagacggaagcaagttggcgccagttggtgcagtgagccaaggtggcgccattgcactccggcccaggtgacagtacgagacttcatctaaaaaaaaaagaaaaaaaaaaagaagagacacacagctatgaacacaaagcacagaacctagaggaaaatgtgttcatatggtgaggtttcattcacaacaacatggacaggactgctgctcatattacacaacagccataaaacccaaaaatacatctaaaacaaaggaaacatatgtggttcaattccaccaagggatactacgaggccgtgcagaggcacagacaaaatctacaaagagcaatgcaaaccaaccttccatcatgatgttgagtaaagaaacaagagtataaaaagaaggtgtgcacatgaagctcaaaaagaggcagcatttattttctagggaggcaaactcaaaatagaccccataaataaaggaaatagattatgtaatccaaaatagtgcttgcacatcaggaaatactggagggttctgttcaacatggaaactccaaggaccactggacgcgggcactggaacgctgactttcatttggtgaccctcaatccacttcgagttattggtaaatcacataattttaatttgatacggaataatcatacatgtttcttgggagcatgtggtaatctgattcatccatgcaatgtgtaacgatccaataaaggttcccaggacattcatcaccctgaacatttgttattatggttattattttgagacagagtcttgcactgtcgcccagctggcgtgcagtggcaggatcttggctcactgcaaactctgcctcccgggttcaagcagttttcctgtctcagcctcctgagtagctaggattacaggcatgcaccatcacacctcgctaatttttgtatttttattacagacggggtttcaccatgttgctctggctggtctcgaactcctgacctaaggtgatccaccagcgtcggctttccatagtgctgggattacaggtgtgagccactatgcctggccaacttttataatttctgtgctgggaacattccaaatcttcatttctcactcatgtggaaaatacaataatctgttgctaactatggtcaccctactgagctctcaggccctggaacttactccttctctccacctgtatttctgcacccgtccaccaacctctctccatccctgtcctccacactcccttgccagcctctgttgacaaccattctactctctgccatcacaaggcccacttttgtagcttccgcgtgagtgagaacatgctcctctttctgggcctggcttatttcactgaacataatgtcttccagattcatctgtgttgctgaacatggtacaatttccttctttttatgcctgaatattatttcattgtgtatatagaccacatgttccttatccattcatccattgatggacataggttgattccatatcttggctattgtgaatactgctgcaataaacatggcaatgcagac

SEQ ID NO: 8996 - DNA, 189 bp, Homo sapiens
ggagatgcttgccgtgatgacgctgggcacagagggtcaggtcctgtcaagaggagctgggtgtcctgggtggacatttgaagaattatattcattccaacttgaagaattattcaacacctttaacaatgtatatgtgaagtactttattctttcatattttaaaaataaaagataattatccatgag

SEQ ID NO: 8997 - DNA, 862 bp, Homo sapiens
cccggagggtacgcagactccacactcagtagaaggagactcaggactgctgaaggcacgggagctgcccccagtggacaccaatgaaccccagtcagcctggacccctaacaaagaccatgaggagatgctgggaactttgggactcacttgattctgcagtcgaaataactaatatccctacattttttaattaaagcaacagacttctcaataatcaatgagttaaccgagaaaactaaaatcagaagtaagaatgtgctttaaactgaatcacaatataaatattacacatcacacaatgaaattgaaaaagtacaaaccacaaatgaaaaaagtagaaacgaaaaaaaaaaactaggaaatgaatgacgttggctttcgtataaggaatttagaaaaagaataaccaattattccaaatgaaggtgtaagaaagggaataagaagaagaagagttgctcatgaggaaaaaccaaaacttgaaaattcaacaaagccaatgaagctcattcttgaaaatattaattacagtcataaatcctaactacattgagcaagagaaagaaagagcaggcacgcatttccatatgggagtgagccagcagacagcccagcagatcctacacacattttcacaaactaaccccagaacaggctgcaaacctataccaatatactagaaaatgcagattaaatggatgaaatattcaaaactggagtttacataatgaacgtaagagtaatcagagaatctgactcattttaaatgtgtgtgtatgtgtgtgtatatatatgtgtgtgtgtgtgtgtgtgtgtgtgtgtgaaaaacattgactgtaataaaaatgttcccatcgta

SEQ ID NO: 8998 - DNA, 380 bp, Homo sapiens
cccacgggggacccagatctcatactcaacagaaggagactcagagactccagaaggcacaggagctgcccccagtggacaccaatgaaccccagccagcctggacccctaacaaagaccaccaggacatcctgggaactctgggactcactagattctgcagtcaaagatgactaatatccttgcatttttgaaatgaagccacagacttctcaataaatcaatgagctgagaaaactgaaacagaaattagagcatggtataaatttggaatgataatgtaaatattacacattaaatgatgaaatcggaaaactacaaatgagcgaatgaattagaaaagaataaaacctacgtaattaatgaccttggcaatgaca

SEQ ID NO: 8999 - DNA, 344 bp, Homo sapiens
acagaagagagaacaatgcaccattgaatgctggagccttggaagcgaatctgatggtcctaggaggttcgggaagaccatctgaggcctatgccatctggactgtctgctggcaatttctttttttctttcttttcttttctttcttttttttttttttttttttttttttgagatggagtcttgctctgtcaccaggctggaatgcagtggcgcaatctgggctcactgcaacctccgcctctcgggttcaagtgattctcctgcctcagcctctggcaatttctagagggaggaatgggtgtttgagtgcagagacactggtctggggtgatccatggagg

SEQ ID NO: 9000 - DNA, 163 bp, Homo sapiens
gaaagacaaaaaggggaaggagaacacagaaatcctagggacacaaattcagggtgaggaaaacaaagcaagggctgggcacagtggctcacacgtgtaatctcagcactttgggaggccgaggcaggtggatcacctgatgtcaggagttcaagaccagcct

SEQ ID NO: 9001 - DNA, 150 bp, Homo sapiens
tgatctgaggaggttctggaagactggggcagcagttggggaagtgtctgctgagaatatcaaggggaagaagcatgggtcaggtgcaggaagatgtctgggtgtctgtagaagatgcttcctccattaaactgtggtgctttcctcctc

SEQ ID NO: 9002 - DNA, 1642 bp, Homo sapiens
ccccatacccacctggcctctgcacctgagggtagaaagtcactctaggaaaagcctgaagcagccatttggaaggcttcctgttggattcctcttcatctagaaagccagccaggcagctgtcctggagacaagagctggagactggaggtttctaaccagcatccagaaggttcgttagccaggtggtcccttctacaatcgagcagctccttggacagactgtttctcagttatttccagagacccagctacagttccctggctgtttctagagacccagctttattcacctgactgtttccagagacccagctaaagtcacctgcctgttctaaaggcccagctacagccaatcagccgatttcctgagcagtgatgccacctccaagcttgtcctaggtgtctgctgtgaacctccagtgaccccagagactttgctgtaattatctgccctgctgaccctaaagaccttcctagaagtcaagagctagccttgagactgtgctatacacacacagctgagagccaagcccagttctctgggttgtgctttactccacgcatcaataaataattttgaaggcctcacatctggcagccccaggcctggtcctgggtgcataggtctctcggacccactctctgccttcacagttgttcaaagctgagtgagggaaacaggacctacgaaaacgtgtcagcgttttctttttaaaatttaattgatcaggattgtacgtattcaaggtgtaaaatgtgataatttgtcgtacacgtacattgtgcaatgacagtcacaatcaattcctcagcgcacccatcaccacgaatacgatacattagatattctgaacttgctcatcttaggacttcacattggtgtcagtgttttctgacaaatcacgtgtatcaggaatgaatgagggaggtgtggctgggtgaaggcagagagccgaccctacaggtccacatctgcacatacatgcacaggaatgcatgctctcacacacatgcatacacacacgcacacacacagacatgcacatacactcacacgccccaggaaatccaaggaatcactgagcctgctgttggttgaggcatttctgagtatccaccctacctgtagggtcagatgtactgattgacacagaaaattaccctatgtaccactaggaggcggcagaatctcatttgggttaatctgtgtttgtctttaaaaaacaaaaacaggccgggcgcggtggctcacgcctgtaatcccagcactttgggaggctgaggtgggcggatcacgaggtcaggagatcgagaccatcctggctaacacggtgaaaccccatctctactaaaaatacaaaaaaattagctgggcgtggtggcgggcacctgtagtcccagctactcgggaggctgaggcaggagaatggcgtgaacccgggaggcggagcttgcagtgagccgaggtggtgccactgcactccagcctgggcgacagagcgagactccgtcaaaaaaaaaaagaaaagaaaagaaagatttttaagaattcagcaaaaactcagccagctctttctatggggcagttgctaatttagttctaggcaaacgtggacacattaaattctcctacaaaccc

SEQ ID NO: 9003 - DNA, 289 bp, Homo sapiens
cacccccagacctctggaggagacaatggatgcaaacagcccacacaggaaagacaaagcaggagcgtgcacgctctctctttctctctttaattttggtttctctcaagcttccaaatggtgctcagtgctccaaggaaaggaaggaaggaaggaaaaggaggggagaggaggggaaggggaggcagaggaggaacatctggaaaaaaagcagcctgacagtccagctgtttgcaaactcatagcacatcctccagttacatggcagaagagggagggagggagggcc

SEQ ID NO: 9004 - DNA, 75 bp, Homo sapiens
gttccctcattccccgcgcccttcccgcccggcaccccacttctgtatacataaacggccaaggtgtgtgcccgg

SEQ ID NO: 9005 - DNA, 230 bp, Homo sapiens
gcagcctgggatcgctctacgaattacacaggaagcgggattcgggtctctaagatgtcttatgaatgcaggtcagagggtcacatgttaacactagagtctgtcgagaggtaggatttgacactggttttctcactatttttgggagattctgcacgagtcacgcacccccttcacatgacgctatgtactttctcacagggataataaagttagagcactctcgttgc

SEQ ID NO: 9006 - DNA, 1214 bp, Homo sapiens
ccgctgaaccccaggcacggtcgtatccaagggagggatcatggcatgggaggcgactcaaagactggcgtgtgtggagcgtggaagcaggagggcagaggctacagctgtggaaacgaggccatgctgcctcctcctggtgttccatcagggagccgttcggccagtgtctgtctgtctgtctgcctctctgtctgagggcaccctccatttgggatggaaggaatctgtggagaccccatcctcctccctgcacactgtggatgacatggtaccctggctggaccacatactggcctctttcttcaacctctctaatatgggctccagacggatctctaaggttcccagctctcagggttgactctgttccatcctctgtgcaaaatcctcccgtgcttccctttggccctctgtgctcttgtctggttttccccagaaactctcaccctcactccatctcccactgcggtctaacaaatctcctttcgtctctcagaacgggtcttgcaggcagtttgggtatgtcattcattttccttagtgtaaaactagcacgttgcccgcttcccttcacattagaaaacaagatcagcctgtgcaacatggtgaaacctcatctctaccaacaaaacaaaaaaacacaaaaattagccaggtgtggtggtgcatccctatactcccagcaactcagggggctgaggtgggagaatggcttgagcctgggaggcagaggttgcagtgagctgagatcacaccactgcactctagctcgggtgacgaagcctgactttgtctcaaaaaatacagggatgaatatgtcaattaccctgatttgatcatagcacgttgtatacatgtactgcaatattgctgtccaccccataaatatgtacaattctgtatacatttttaaaatcataaaaataagataatgcaccgtctccacccctctcatatttactttctgaaggaaatgttaggtcttctcaaggtaaagttctatatttattatagcgtttaggcatttcttgaccatctaatgagtgtaaaactgtaccactgggccaagtgcagtggatcatgtctgtaatcctagcactgtgggaggccaaggcaggaggatcgcttgagcccaggagttcaagaccagcctgggcaacatagtgagaccccatctctacttaaaataaagaagataaaaattgttttaa

SEQ ID NO: 9007 - DNA, 731 bp, Homo sapiens
cctctggagcagatttgaaagccaggatggcgcctccagaccgaggacagctgtccgccatgcccgcagcttcctggcactacctgagccgggagacccaggactggcggccgccatgcccgcagtaggttctagggggcggtgctggccgcagtggactggcctgcaggtgagcactgccctgggctctggctggttccgtctgctctgctgccagcaggggagaggggccatctgatgcttcccctgggaatctaaactgggaatggccgaggaggaaggggctccgtgcacttgcaggccacgtcaggagagccagcggtgcctgtcggggagggttccaaggtgctccgtgaagagcatgggcaagttgtctgacacttggtggattcttgggtccctgtgggaccttgtgcatgcatggtcctctctgagccttggtttcttcagcagtgagatgctcagaataactgctgtctcccatgatggtgtggtacagcgagctgttgtctggctatggcatggctgtgccgggggtgtttgctgagggcttcctgtgccagagcccagccagagagcaggtgcaggtgtcatcctgagttcaggctctgcacggcatggagtgggaaccccaccagctgctgctacaggacctgggattgcctgggactcccaccttcctatcaattctcatggtagtccaaactgcagactctcaaacttgctcattt

SEQ ID NO: 9008 - DNA, 559 bp, Homo sapiens
cccggagggactttcccgcacccgtatttatacagctgcttctgccacacgcaccccttcccccgtgtgaacacgagtgacagggctccgggggaagtctcagagaagccatagcccccctgggacctccggactgggaggggagcagagtccccaggagccgagggggccacccgaggccaggatggaggtgggaggccgagccaagcagggggacgttgccagaggggaccagggccagagacgggaccaggaaggaactgaggaccaagaagtgcaaggatcagtagccaggaccagagtggccgcctggaggtccccatctcacgtgtgatgccaccccgtcacccctcccctcctgagcagggatccaagaatgtgccaagagtcccgccagcctcagccaggtgggcctgtatatagggtccatgtgcaatagggagggacgtcttctattttttgctgccccctccccgcccactgtctggggcagggggagaaggtattttcgagataaagcacaggcaccacaaataaaagtcgtgaagttgccactcaa

SEQ ID NO: 9009 - DNA, 86 bp, Homo sapiens
ggatgccgccccggacagtggcacctgggaagcctgggagtgtttgtcccatcggtagcttgaaataaacgctcccctcagacacc

SEQ ID NO: 9010 - DNA, 66 bp, Homo sapiens
gccttcctgcctactgcccctgccctgaggagggccctgaggaataaagcttctctctgagctgaa

SEQ ID NO: 9011 - DNA, 399 bp, Homo sapiens
cccaacccctagacaccccttatctccaacttccaaagtcaggttgtaggatgagaacccgctgataccattctaagtccgctgctagagtcctcaattttattctaatcattcccactcagtacccgccacccccaccccgggagtgttggtagactttcaaattccatttctgagattctatggtctattcctagaattctagattgttctctcagaattccaaattccacttctgaggctctaagcccagcctaggatctgacactgagtctcaggcccttgactttggcccccttgttcccaggcaccctgtggctgactaggggctggggtgtctcctcaccagggcctggtcagcacccagatggttcaagtaaagcaagttgtgtccaccct

SEQ ID NO: 9012 - DNA, 383 bp, Homo sapiens
ctcccaccccaagcccccggccaagcctggactctagcccctgaccccagactcccgagaccggccaaagccaagccagccccacccttaagcttcctctgacggttaccctccccccaccttccaccccaaccatctgaaccattcctgtcttctcacccccaacgatgccaatcacgacaactttccagcacactcccccgaccctcgcggacacacccagatgccccagggaccccgggaagggaaggcagcctggtttctcctgcccccgggtcctgccccctgctttgacaatcagccatcctcgtctgctctcctctctcttccaacacagcccatccctgcactgctcctggggccaaataaatattcagcagctc

SEQ ID NO: 9013 - DNA, 506 bp, Homo sapiens
gtgacgagggggctgggtcggcagcccaggcatcctcaagctctggacacccacttgagcccagattcctggaagagcagagggctgggctcccagactcctgggtgctgtgggaggagggggctggtatcccaaactctggtttccccaggagagagtggtctggtgggcttcagatgagtcctatgggagctggggatctggattcctggttccctgaaggaggagagggatgatagcttggattccctaggtctttccaggatgcagaaagaaacaggctggggcctggattctgaggcaggaaggaatttgggtctggagttctggctacttgaggaccaaaggcaggaaggatcctgccttgattttacttcagaaaccaaatcagtcttctataatctggggtcggagggagtccctgtgcccaaggtctctctgcaccccaccatccacatgtatttttccttctatcccataatttattaaatcactgttctccccag

SEQ ID NO: 9014 - DNA, 435 bp, Homo sapiens
ctagggagcttgaagggccggtgttcaggccctctcctcctgcaaggacctgggcctcccagcccagcccagcctgagaaataccctcagcagcgaagcttcctgacgcctgtctgcaggcgccgctgccgccgtcgcttctggctgaagacgtttgaggacgatttgcggaattccaagtccactactgggttccagctgccttcccccggttctgactccagatccctggctcctcagccaggcccacatggagccctcccagccaccagcctgcctccatgttcactgtcggccccacagcctgcccgccccctgctgctgctctgaatccgttttccctgtgggtgtggaaccgtagatgttgctgttaccgtaggagaggcctcggggagggtcatgattgtgataaaccatcgcggttaatgacagcag

SEQ ID NO: 9015 - DNA, 749 bp, Homo sapiens
ctgcctggtgcggcagcggcggccaaatcttccgtcctcccgtggatctcccggggtgggggcagggcgggtcccacgatggcccccattgccctcatcaccctgacacccccacattctctcctctggacccccaggaggctggtgccagggagacaggcccaacccacccccatttgcactgagaagagaagttttggagcgttgcctcctagaataaagatacagagagtcaaatagagagaatggagagagagaaacatatattatatattatatagagagagggaggagagcgagagagagtgaggacaccgaactgggctggcggctccaaagcacagccttccctgttccgtcccagcgggagctggtgttaggggtcccaaggttgccacccacgtgcccagctgtcccacgctgcagcgcagacggccacgcccacacccggccttttagctcaggtccaccatgggggacggcccagcgtgggtgggggtgccagagggtcccgagtgggggccgtgcctttgcccagaccctgcactttcaaccaggccagtccggctctggggagcaggggcctccccggcaacagccccaggggccttgagggtctgaggtcccagccctgttgccaagtgaccttgtccccagctccctcctcccaggctggtgtgagtgtgcgtgcgtttgtgccgagcttctatttcatattgcaaatataaataaaggaaggcagtttacga

SEQ ID NO: 9016 - DNA, 268 bp, Homo sapiens
aaccaggtggcttcttgcccccttctccgtgggaaccccaggcctcttgcctccctccccacctacaaggccctctcccaagggatcgcagggcctaggtgcctggacccagggtgtgccagcccgtctctgtgcagtccctggaaggggcgctgagaaaggcaccagctccttggaccccacctcccatgctctcactctcatccccgttctcttgtccacacagctcttccaataaaggtgtttctcttcctccttctcctccttc

SEQ ID NO: 9017 - DNA, 1093 bp, Homo sapiens
ccaccagccttcgagttccttgtttcccttgctctggtctccacgtgtatgatggggttctcaggcccaggcttcgaccagaggaccctctgccaccaccgtttcttcctgtccttgagctaccttggtgaactcatgaccccaggcccctgctccaccaggatgtcccccaggtcctgccagctgggaagtgccagcatgaacgcctccaacttcgtggaagccagggtcccctgcagctgagggacgccaagcagacacacctgccctccccagccagctcctgtctgtatgggcgagatgactgagagcgcccacgtccctaaggctgtcctgaccctccatgctgcgacaaggacagggaatggtcggtcactatgggcctggtgtctcccctcccccaccacccggtgctgcccagctcaagccagaagctgactttggccgccatggggacatcaggcaaggtctggagacatttttggttggggcagaggcatgctcctggcatcgagtgggtggagaccagagaagccgctcaacatcctgcaatgcatgggacaggccctgcctagaaacaccagctcagcatggcagcagtgcggaggccaggaaaccctgatcgccagtttctaacgccctcaccatttttatttttatttttattttttttgagacagagtttcgctcctgtcacccaggctggagtacaatgatgcgatctcagctcactgcaacctctgcctcccgggttcaagtgattctcctgcctcagcctcccgagtagctgggattacaggcatgcaccaccacgcccagcttattttgtatttttagtagagacggggtttctccgtgttggtcaggctggtctcaaactcctgacctcaggcaatctgcccacctcagcctcccaaagtgctgggattacaggcgtgagccactgcacccggctcaccactagtttttagccctttttgttgggggtggggtgggggcagaggagaggcggatacagaaacttgtgagaatgtgatgaacgctctgaaccccctataaaaaatgtgcatgtaaatatatactctcaacattt

SEQ ID NO: 9018 - DNA, 1618 bp, Homo sapiens
cccggggcccaaagccaccaccgtccttccaaagccagatcttatttatttatttatttcagtactgggggcgaaacagccaggtgatccccccgccattatctccccctagttagagacagtccttccgtgaggcctggggggcatctgtgccttatttatacttatttatttcaggagcaggggtgggaggcaggtggactcctgggtccccgaggaggaggggactggggtcccggattcttgggtctccaagaagtctgtccacagacttctgccctggctcttccccatctaggcctgggcaggaacatatattatttatttaagcaattacttttcatgttggggtggggacggaggggaaagggaagcctgggtttttgtacaaaaatgtgagaaacctttgtgagacagagaacagggaattaaatgtgtcatacatatccacttgagggcgatttgtctgagagctggggctggatgcttgggtaactggggcagggcaggtggaggggagacctccattcaggtggaggtcccgagtgggcggggcagcgactgggagatgggtcggtcacccagacagctctgtggaggcagggtctgagccttgcctggggccccgcactgcatagggccttttgtttgttttttgagatggagtctcgctctgttgcctaggctggagtgcagtgaggcaatctgaggtcactgcaacctccacctcccgggttcaagcaattctcctgcctcagcctcccgattagctgggatcacaggtgtgcaccaccatgcccagctaattatttatttcttttgtatttttagtagagacagggtttcaccatgttggccaggctggtttcgaactcctgacctcaggtgatcctcctgcctcggcctcccaaagtgctgggattacaggtgtgagccaccacacctgacccataggtcttcaataaatatttaatggaaggttccacaagtcaccctgtgatcaacagtacccgtatgggacaaagctgcaaggtcaagatggttcattatggctgtgttcaccatagcaaactggaaacaatctagatatccaacagtgagggttaagcaacatggtgcatctgtggatagaacgccacccagccgcccggagcagggactgtcattcagggaggctaaggagagaggcttgcttgggatatagaaagatatcctgacattggccaggcatggtggctcacgcctgtaatcctggcactttgggaggacgaagcgagtggatcactgaagtccaagagttcgagaccggcctgcgagacatggcaaaaccctgtctcaaaaaagaaagaatgatgtcctgacatgaaacagcaggctacaaaaccactgcatgctgtgatcccaattttgtgtttttctttctatatatggattaaaacaaaaatcctaaagggaaatacgccaaaatgttgacaatgactgtctccaggtcaaaggagagaggtgggattgtgggtgacttttaatgtgtatgattgtctgtattttacagaatttctgccatgactgtgtattttgcatgacacattttaaaaataataaacactatttttagaat

SEQ ID NO: 9019 - DNA, 154 bp, Homo sapiens
tgggctctcttcctccttccaccgtgaccccaacctctcctgtcccctccctccaactctgtctctaagttatttaaattatggctggggtcggggagggtacagggggcactgggacctggatttgtttttctaaataaagttggaaaagcag

SEQ ID NO: 9020 - DNA, 319 bp, Homo sapiens
actccaaccctgccttgagggaagaccaccctcctgtcacccggacctcagtggaagcccgttccccccatccctggatcccaagagtggtgcgatccaccaggagtgccgcccccttgtggggggggcagggtgctgccttcccattggacagctgctcccggaaatgcaaatgagactcctggaaactgggtgggaattggctgagccaagatggaggcggggctcggccccgggccacttcacggggcgggaaggggaggggaagaagagtctcagactgtgggacacggactcgcagaataaacatatatgtggc

SEQ ID NO: 9021 - DNA, 424 bp, Homo sapiens
ccttcgccgccctgccctccgccgctccgcctgagctccccggtttgcagaatggaggagggaagttgaaggagccacctcctctgtctacccacccgtccccttcacgcccttgacactaaggagtggggggccctggactgccccttcctcccccatcgcccgcccccagaacccctgatgctggttaggaaccgctcaccccaacatgtgtcttaaggcaggacgacttggaaaaaaaggcggcggacagttggccagagggatggagactggtggggacgcccccgcctccctgtcccccgtttcacacactggacaccatcacctctttggaactgccagaccctgggggtccccagtgagcaaaggtctgtccttgtccctttgtctgtctgtgaataaatgtgagttcgtgaaatcc

SEQ ID NO: 9022 - DNA, 1070 bp, Homo sapiens
ctgccaggctgcgtgcgccctgccctccacccagcctcctggactcggcctggaccaggggacctcgggactgcgcgtgaggccccggccctccaaatccaaatccagacgcaggccctgaaatgaggggaccctgactggagaggtgggggccaccaaaaacccacaaaggccccggagctgggggaccacaaacaaacagggtccttagctggggcaggggagcccaaatctagggagagactcctgagcctgaggtccctggaatgagtgtgggtagccgtaagtccccaagacatggggactttgcagtgagcaatgggtctccacaagtacctctcatcttgagagccctaatactaaaagatgggcacccacccccaccaagggaagactgccccattccctgagagccatcattcctaacgaccttgatctggagaatgtggagggagcatgtccctgaattttcctagatccctccaaatgccacccaccagagtcactggtgaccccagaaaatggatatagccgaaatctgcctttcccctttttcattccctgtgctgaaagagggaccagggtagatgccccctgccctcgaatcccccctccccgactgtggaatggatcgaccctaacgatcttccccgccccaaacactagaatagactggcctgaaatccccttgcccagtagaatggactgatctatgtgcacacacccccatcacatggaatgggctggtctaggctgtggcctgccaccttccttagagtgaatagggcggacactcctctcttttcctgtagcgtgtggaccggtccacgcaattctttatcctgtgaactcatctgagtgggaggtggtggacactggggtttccttccctctctccgtagcatccgttggtctttctctccatctctgttggtttgtctgtctctgtcttcctcccaatccctaggggaagggggcatttggctagggggtgcccctgtgagcctcgaccttgccccctcgtccctctccccagtgtttccaggacccccaataaaccttgtcctgtc

SEQ ID NO: 9023 - DNA, 1010 bp, Homo sapiens
gctgcagaccagggacatgggttagttaaggcggaggtacgaggccgacccggggagggggacggggtggggaaacggaggcaggggacagaagaggggagattgggggagagatgacagctgcagggatggttgtgagccgctagtgatggagagcagagggagagggccaggctccagactcccacacgcccacacagcacctctgccaggcctaggagaggacaggtgcagctcttgcagctctgcgggtgtgcggccaaaggcaaggcccacgggctggatgtcacttccccgactgtctcttggttggcttgtccttgtgcaagacccagcctgtcacgacagagcctgggcacttcagaggaggagccaggatcgaatggaaggggggaattggggtccaccatagtcttctgctctggtcctccacgggtggaccaggatggagtctcctgcctacctcactgcattgcactggacctgggatgcctatccaccctctggcagaagacactcaccaggttatctgtgaagagactctgggatcccatcacctcaaagccagagggtccccaagtcaccgctgagagcacttgagcctcaaggatgtaagcctgaccataggatcttgactccaacagcggcaacccccacccccattgtggtccgtccttaacccatccactcttcttcggaggcaactgagaacacataaagcaagcagctacctagcatccccctcctaaagctttagactcagagcccagggtcccccacaagcctcaaggtagcctcaggtttctctaatttcctccactcccagttcgaagcaaacagcttactgcctagtccccgccaatcccaagggcgggctggctgatggcagcatggtgggctggcctgggtgtggagtgaaagagtcactgtggtgggggcgagaggaggacttgggagctggaggtgtgacaccttcagttctgttcctattaaaggaccttctgaagggc

SEQ ID NO: 9024 - DNA, 480 bp, Homo sapiens
tggggaacaccctgaagtagtcgtctcacaaaggctttccttggccacagtgggaccttcacctggcacctctatcctgtaattgcacatcatggcagcagggctgtgatttcagaggtactccctaagtgttctagcaatatgattatggagtgtgattcagtgtacatgctgattgtctttgcctcggtcctatatccccttgtctttagaaatcccatcctgccttgtgatatttagaagcacaagtacgttaaacaagtgctaaacgctctggaaagcatggctttattttcttaatggatgtcttggtgtgtaggagcatgcatttgtaggcaccacaatccggatacttctgacacagaagtgatgctagaatgtgtctatagattgtattgctagcatccagactttctagtttgtccagatttcgatttgatcaattttcttgtccaataaaaaagcatttccaaatctcta

SEQ ID NO: 9025 - DNA, 226 bp, Homo sapiens
tcatgttgtacgtaaacagtatttattataaattactaccgtgactgggatgcaagagaattaggactataattttcctatttgatgtgtgtgtgtgtgtgtgtgtgtgtgtgtgtgtgtgtgtgtgtgtgaccttgatccagtcaaccacttcaaattcctacactgtctcaagagtattaaaaggattatatgaagtaataaaggataaaatgcattggaaaaa

SEQ ID NO: 9026 - DNA, 657 bp, Homo sapiens
gggaggggcccgggggggggggcgggcagggcccctcgggcttggcgggagcgacgacgtgcaagaccaagagacccagggagaagcggacggggtgcgatggaccccgcggcatccccggctccccgccctcctctgtccctgcgccgtccgtgggggggcactggggcgtattagggcccgttcacttctccgcctcgagactctgccccctcagcctggcccgcccttcctaagttatcggcctgcgagccggagagacaatggagagaactgcagaggccgagtggcgaccaggccccaagcggaaggccattttccctgctcttcctcagttgtccggggcgggggtggggggtgctgcgaggaatggagaaaccaggccctttagaggatcccagagagggaagagaaccaggggcccttttctcttttagaattttcttttaatcagcccaccttttgactccccgcccgccccaatccattatttttttctgccttccgggtcccatccttagagctcgagtcgttccttcccctcctggattccgggtagcagaggcagcgccgcaggaggcgggtgcccgtttgtcccaggcctgggcgtggtggaggaaggggtgctggaacaataaacggcactatccaaatgtc

SEQ ID NO: 9027 - DNA, 263 bp, Homo sapiens
ttgcataatccggtctatgccttctgcaccaagaagaagtgaatgatatttttcatcaatgttatcagatgacatttgacacatgcaagggcgtctgacacacagagggagtgccctagatatgaattgccaggatgtttgagtaaatatgtgtcctccccactgagctttgttttctgtttcattatgtccattgttttcttataggtttattttggtttgtgttgctgttcttccaataaacgatcatcttattagttttc

SEQ ID NO: 9028 - DNA, 584 bp, Homo sapiens
gctaattgtgactgtgacttacttctccctcttggagaaagacttgaagaatgtaatgccagtgacaatgccttcattcagaggtaagcctttatcctaagtctgaaaattcatatcaaagaaaattttatggatgtaaattgttcagatcataattgtcaaaaatgctgggaaaggttgggagaaattttatttctaacacattccagaaccacattttctaaccacagtgtagtaattttatcaagagcaaaagttatagttttcttacaagttaaaaaaacagccagattatcatttgcttaacaaagaaatcatgcaattaccataaatggtaatgaaaagaatgaattgagagtttaacatgccaagagatgtgaaatgtggccaaagagatgtgagggtaaggggaaagccaaagctacactggaggaatttttatagcctttgaatgcatgcatatacatgaaaatctgaaagataaactcatatgcactaaacatgctattcaagtctaccaaacatccaggcagtgaaagaagaaagtaacagaaaatgatgaaataaagagaccatcttacaat

SEQ ID NO: 9029 - DNA, 1323 bp, Homo sapiens
ggttgttttaaatctataaaatcaacgaatgaggctatcaaacatatggcaaatatgtatttgtctataatgtaaattttgtgtatatgggaccatttgatgatatgtcccactttgaaagccaaagagcaaaagtcattggtgattttgacctcaggatttgaaattaactgaaggaaactcagaagtttggtcagtcattgtgaatgaagatcatttttcatttgataagaattactggctgggcgcagtggcttacacctgtaaccccagcactttgggaggctgagacaggcggatcacgaggtcaagagtttgagaccacggtgaaaccctgtctctactaaaaaatacaaaattagctgggcgtggtggtgcgcacctgtaatctcagctactggagaggctgaggcaggagaatcgcttgaacccaggaggtgggggttgcaccgagcagagattgcaccactgcactccagtctgggcaacagagcaagactctgtgtcaaaaaaaaaaaaaattaccgatattttacttccagcatagttttaaagataatttattggtcacatacaacaaaatagaattgtgaagtccattatagggctctgagcctgatttaaggtcacagaaaaaagaatttgagtctgtttctcagatctagaattatcaaatataaggaacttctcggcaaaacagggtgccactttcagctgacaaacttgtgggtgagaataaagaaaagtgagtctttaggtagataaagttgtcactcataatggtgtgtaacagtagaaaccttactttaccatctccacggatatgaggatatatgatcttcatggtgtgaacgtctaacttggctgagacaagctatcagtaaaagaaccaagatatagtgaagaatgaggatttcagagccaggagaaatcagtattgttttatttggaaataaatcatctatatttatatgagtaaacattggtattttcatgtaacaatactggtatgcaataagtggtgtaatatgagttgttatggactgaatgtttatgtccctcccaaaactaattatgttaaaatcctcaccatcaatgtgatgttacttggaaatgaggcatttgggaggcaattaggattagatgaggtcatgagggtggagccctcgtgatgggattagtgcctttataagaagagacatcaggctgagcccggtggctcatgcctgtaatcccagcactttgggaggccaaggcgagtggatcatgaggtcaggagattgagacaatcctggctaacacggtgaaaccccgtctccactg

SEQ ID NO: 9030 - DNA, 1240 bp, Homo sapiens
gggcatggggtaaaggttagaaaaccttcacctaggacttgacccttaccaaaccacagagaatccaaaccaatccatgataatgtcagtaggagacttaaccttagtgtgttacacacctgacttaacatctctaaactcagattgaaaagagaccgaatgtgcagattccacagtcttaagctttccccttcagatgtcagtgtctgcatgtgggaaagccatagcacacatcttacctttccaagtaatcagattgagaaaaccctatgagtattccagactacagagtttgcccaaatcaactgtaaatgacacttgtgtaacgtatatatagtgtttcatgaggtgtatataaaatagcaaattatgacagaacagtgatcacatatatttggatttatatgatatacagttacagtttactctgcagaggtaccttacctggtattctttgaattttttttttttttggaggaggaagagagcaacaaatttgattatatttttaagtgtcttagatcctgagaaagatttattgtgcattatttgaaccctgtcaatatctttttgagtaattgttttgtttcttacccttaaatagtcttgtgaagctgtaggcatgatagataacatggcttttactccttactgtttgaaaagataagtactttagcttctttctgcagccatttcatctgcgccaacactttggaacctaatactgtgtaaggctttacaatatacggattggctttttgtgacccagattgattggttgccacatgttatgtttgttgaagtggttctcatgcaaaaatattacacatttgtgttctgggttttttttttttttaaccaactcaatatgtgtttgatgatagtgaattgataaaacccgaagcttttccctgtaaatcttacatctttgcctttaaagaatgggttacaaccatcactagatcacagtagtgcctaatgaaggttgagaaccgtaggagaggctctcatgctgtaaataatgttgcaggctaataacctttcatcacttcctttgtgcgcttcctgccttaagtgacaagtagcaacatggcttgggtcccctgtgcagcatcagcttatgctgccacaagtcagtttgcaccctaggtgcccaggagctagtatccttagatctttctatcgctaacttaattctcttcgttatttatctgaccctctaactccatgtctaacttgc

SEQ ID NO: 9031 - DNA, 127 bp, Homo sapiens
gaaacctttagtcacagcacacacttttctcaacattattggcttcctcctagagtgttgtgagtgtgagaaggcctttcactagccccaccttgttaacaacttgaacattcatcaaagtgtggta

SEQ ID NO: 9032 - DNA, 822 bp, Homo sapiens
gagccccatgcacttaaaaaaacatgggaagatatggttgcctggaattgtcaccccagaattccatgttgaaatggcctctaatttggaggctatttttgaaggtagcgaggacttattatcacagtatcctttgaaaacccattcggcatactcactcagcaaatgtttattaagtataaatatttattagatgccttttgtgtaccaggaactcttaaacactgaagatgtagcaataaaccaaatgtgctaaaaccctgatggagttttattccagtgaataatgaccagtggtatccatatctttaaaaacgtttaaaagactatacttttggccaggcgtggtggctcaaatgcctgtaatcccagtactttgggaggctgaggtgggcgcatcacctgaggtcaggagttcgagaccagcatgaccaacatggtgaaaccctgtctctaccaaaaatacaaaaattagccaggcatagttgtgggcacctgtaatcccagctacccgggaggctgaggcaggagaattgcttgaacctgggaggtagaggttgcagtgagccaatattgcaccattgcactcctgcctgggcaacaagagcaaaatttcatctcaaaaataagataaaataaaataaacaaataagacagcactttatacttttagggatgatttctataattcatgagtggagaggtttctctagaggtgtaggggactggaaaccacatccaggaagtacagctttctctcctgagcatgaaggtatcttggcatttcttcactgcaattgccatttgccttttttgtttttc

SEQ ID NO: 9033 - DNA, 2686 bp, Homo sapiens
acacagtcaaattcagtgtacttgataatatcaactggaccccaaatctgtctcacggtcttcctgggagtctatccttctgctgaaactgcaagctaagccttctgaagatggtaaaggacttggccagatgtggtgggtcacacttgtaatcccactactttgggaggccaaggcaggaagattgcttgagctcaggagtttgaaaccagcctggacaacatatagcaagactctgcctctattataaaaaaacaaaataaatgaaaaggactgtaggaggcagagacgggtacagggggtaccacactaccctgttgacacagcctagatccagagttcagaagaccttgagacaatgaaaataaacttggtaataatcttttttcaatcatcacagtaattattgatttgtacaaaaatcacttgacgtcataaccttaaagtgacactgctctgcctatggagtagccgttcttttattcctttactttcttaacaaatttgctttcacttaaaaaaaaacctttaagttcaaggaagaacaagatatatacttcatctcaaaagaatctactcacacacacttattaattacaaaaggaaaatcagtaattttgcagcagagaaatatggccaactccaccttaaccaagtggctgaaagtcactgcaccagtaatggcacaaaccaatgtgagatgcttcctgatatgatacagtaagaaggccacagtctcttctgcgtgttagtgacaaaaagtgggtaagctgaaactaataattaggcaatgtcaagtgaacacaaattcaggatgacagactgcaaagtaacatccatgtattcttcaacaatggattgatcagggctactcagaaggctgaggcggaaggattgcttgaggccaggagttccagatcaacctgggcaacatgatgagaccccatctctacaaacaattttttaaaaatgagccaggtgtggtagtgtgcatctgtagtctcagcaacttaggagcctgaggcaggagaatggtttgaacacagggatggtgaggctgcagtgagctatgatcgtgctactgcactccagcctgggcgacacagcaagttcttgtttccaaacaacaacaaaacaaaacaaaaaaaaaaccggatagaataatgaccaaaaaatggagaaaaagtaggctgactcaggaaacacttagaaagtacagccatacctcaaagatattgtggattgggttgcagcccaccacaataaagcaaatattgctataaagtgagtcacaaaaatggttttgtttccttgtgaatataaagttacattggctgggtgtggtggctcatgcctataatcccagtactttaggacatggaagggggaggatcacttgagaccaggagttgtgaggtcaacctgggcaatatagggagatcctgtctctatttaaaaaaagaagttatggccgggcgcggtggctcatgcctgtaataccagcactttgggaggcggaggcgggcagatcgcgaggtcaggagatcgagaccatcctggctaacgtggagaaaccccgtctctactaaaaaaaaaaattacaaaaaattagccgggcatggtagcaggtgcctgtagtcccagctactcgggaggctgaggcaggagaatggcgtgaacctgggaggcggagcttgcagtgagccaagatcgcgccactgcactccagcctgggtggccgagcgagactccctctcaaaaaaaaaagttacatttacactacactacactgtagtctaataaagtgtaaaatggtgttatgtctaggaaacaaggcacatactttaattttaaaacacttgatgctggctgggtggggtgactcacgcctgtaatcccagcactttgggaggccgaggcaggtggattgcttgagctcagcctggacaacatggcaaaaccccatctattaaaagaaaaaatacctgatgcccttatttgaagctccattattttttaaaaagaaattatataaaaatactttattgctaaaaatactaataatgatcttagccttcagggagtcgtaatcttttttgctggtgaggagtcttgcctcaatgtcattggctgctggctgataagggtggtggttgctaaatattgaagtggttgtaacaatttgttaaaacaacaatgaaatttaccacattaactgacgcttccttccacgaaagatttctctggaacatgagatgttgtttgatagcattttacccataatagaacttctttcaaaattggagccaatcctctcaaaccctgccactgctttcttaactacgtgcgtcaatattgtaaatcctctgttgtagtttaaacagcgttcacagcatcttcaccaggagtaaattccacctcatgaaaccactttcgaggctccttctggactgtggcgttctttccaggctaccttgtggcaatttgagagtctggcatcgttttccgccaggacccaaagatccaggaggcacttgtgactagcctgccaatggacccatgacaaaagtttaacctaaccttcatccgagtcttcgcaaatgctcactgaagaaaattcctaagacaattcaggggcctctcataccctctactgtgagatgttactaaagaaccttagtaactt

SEQ ID NO: 9034 - DNA, 251 bp, Homo sapiens
gtcttttctcttcatggaattcagctatttatcataactcttgctaagatttaggaaatattaactactagttatttgtgatagcaacatacacatggccagtaatgctcttgtccaggaagatctaataccagagctaaaaatgaaagtcatggatactgttacacaaagaacactctatataactgtgttaagtccttcagacaagttcaggaaatcaaaaagtttaaaaagggaattctttagagatt

SEQ ID NO: 9035 - DNA, 3687 bp, Homo sapiens
gatgggagataattccgtttccttgttcaacataataactgacatcagagagaagctccaagcatagcctttatgtgtagccgacagccagaagtagaactttatacactcaaacactcaccctggggaggttcttccgagtgccagctatatgggaagccttctggagctatgctgaattttctagactcttgctggaatttcgtcaaggcagtgcctgttagaagccatctgtctttgtgctggaagagtcctgccttgtgccaaagtaaccccaatgtgtttcaaaagacagacctctgtactattcccttccctggagggaatcatcagtagcctgaggccatcaaggattctcactttttttctgccccactactggtttaagcatgagcatgacccagttttagccagaaaaatgggagctttgttctgctgaccactggcagaggtttcccttcatggatatagttgatctcacatggcacttgggacgaatttttctagccttcaagacacctgacctgaaattggctgcctcatattctggttttgcaacaaatgccttaatttttagactatctgaaatcttgaggattctgttcgctttgtgggttgggttgagaacagaattgagctaagccagtatgaagggaagaacagcttttgtgagagctccaactatctgtatctctgaagtgatagtaggatggcaaagactagctcttatgctagtgtcaagctaacttacttgactgcttcagctctcctaggaaagaatgccagtctttgtaggcctaatcttttggtctatatgttaagattttttgtgtaattgaggtcaccctaagcagtgggcatttgttgtgataatctctaatgtgtctgggagcaacatgaattacgtcccttgttcccagaagatacttcatattcccaaggcttcttgaggagaatttgaactcagtggacatgtcaagatctctgaagtctatttttcagtaggcagttgatattggctgtcctccagaaggcccaggtaggaatcatagttggtgcagaaacccagattaataaaggaatgagaaaactgcagcaaactatagggaatatgacccttctaaaggtacatccacatgtgtttccattactctggctccattatgagggtttacagaaatatttccatacctgtgtctcttatggctaaggttactgtccagaagtcagtctaaacatttttgcaataaactgcacatatttatagtgtaccatttgataagttttgatacatgttggcacttctcaaaccaaaagtttcctgattccttttatattttctccctttccttcacccatccccaggcaactattgatccgttgtcactgtagatttgtttgtatttcctagaattctacagagatagagtaatttaatatgtattctaatgtttttggcttcttaaactctgaaattaaggctcatggtggtgttctgtgtttcatagttcatttcttttcatttgtactttgctaagagtgttccattgtagagaaatagtttcaaagcaagtgatccaggagagaactcacacaagaacaaagccacagtatctgtcattaccttaaactgaaagtgatgagccgtcatttctgctatatttcataagtaaccctagctaatcctggttaaaagtggaagagaactacacaaaggtgaaaatagggatttgtggggcgttttcttggactctggtgaccataatcctatatggtttttttctttttctgttttagttgtttaatatgaattacattgactgatttttttaaatgttaagccaaccttgcatttctgtaataattcccatttggtcatgatgtattagtcatttagtatattgttgaatttgatttgctattttgttttgttttgttttgtttttttgtaacaagttttgcaccaatgttcacgagtgatatttgtccctaactttctttcttgcttgcttgcttttttttctttgtaattttatatcttgcccaggtttggctttggtatcagcataatgccagctttatagagtaagttgggaagtattcctgctcttcagctctctggaagagtttgtgaataattggtattatttcttccttaaatgtttggtagaattcaccaaggaagctgtctgggcctggagtttgttttgtaggaaagtttctaactataagtttgatttctgtggtagatagagggctgtacaagttatatgtacatctgtctgtgtgtgtgttgtctgtctgtcactctggccctgaagtgtgttttgtaggacagcatctaactacaagtttgatttccatggtagatggagggctatactagttatatatacatctgtctgtccgtccatctgtttgtcactccatccatccatctatctctagagtgagctttgatggtttgtgtctttcaaggagtttttctgttttatttaagtactcaaatttttcaaaatattattttcatacttgtagaatttgtagtggtgcaacctcttctattcctgatactggtaatgtctatatttttcttttaaccttgattggtttgggtagagatttatcaattttacaattttattgatcttaaagtacttggtattattgaattttctgttttctgatattttgggatttttcttttccattttgagttttactaatgccttccgcttttattggatttcatttcttttgctactttttaacatggaagctgaggtccttcatttcaaacctttgggtttttttcccctaatatggggaagagatgttaatgttaaaaatctatctgagaactgctttaattacctcccatcaagcttgatgtggtttcatttttttttttgagacagtgtcttgctctgtcatccaggttggagtgcagtggcgcgatctcggctcactgcaagctctgcctcctgggttcacaccattctcctgcctcagcctcccgagtagcttggactacaggcgcctgccaccatgcctggctaattttttgtatttttagtagagacgaggtttcaccgtgttagccaggatggtctcgatctcctgatcttgtgatccgcctgcctcagcctcccaaagtgctgggattacaggcgtgagcccagccgatgtggtttcattttagttgagtttaggatgttttccagttaaaaaaattcttcttgacacatggctctttttaaatgtatgttatttaattcctaaatatttggggattttgcttatctttctggtagtttctgcaataattccattgtggtcagagtacattaagacttgaattatttacatttattgagatttgctttgtggcccagaatatgggctatcttggtatgagttacatgttcacttgaaatgtatactgtactctcgtttgatgaaggggttctacaagtgttgattaggtaaaaatggttgatgttatttaagttttttctatctttattgacattctgtggttttggttccagcaattattttaagaggattgttgacatctctgaatattaaattggatttacttctctgcagttctgtcagattttgcttcacatattttagtatgtttttattaggtgaataataaatatttcctattttatgtcc

SEQ ID NO: 9036 - DNA, 553 bp, Homo sapiens
ctcttgaaactccaaacctgagaaaagccttagacctgcagggaatgtgccatgtctttcttcagtgttatggctatagagagcctttgtgaaggagccgtctgcctaaagttaaacctcatacttctagacctcccgatgggtcagactcccattagttccaggcatatgtgtcttgcaggagctcctttgcatgttctaaactgctggaggcctttgccagagttaaatcattagtcacccttgcatactaaggcgaggcagatacacctgtgttctcccaacccttggaggaaattccttgagcagtctgagcctttaaggggaattccttcccttttctgactgattacagcatacatctgaccagttttggccagaagggcccagcctgggttctgctggaagctgatgtggaaggcttcccttcatggaaattcttgttttcacacaacacttggtagtttttccagcctccaagtcaccacctagtaactggctgcctcacattgctctggtttgtgtggtaataaaggccttatttttaaatcta

SEQ ID NO: 9037 - DNA, 729 bp, Homo sapiens
gagtgtagcaaatgtgggggaaagtcttaggccaatgcccctgacttactatatggtggggaactagcagtagttaatgagtgcagcagatgcaggaaagccttcccctggaggctgaaccttacccgccattgggaatttcacaccggacacaggccttagcagtctaagcaatgtgctgtctctgttcagcccaacagctcaccctagagtggaactctgggagcagccattgggagggaaccatcagtaagaagtgaaacttcatagatatggacattcccactggggagattccctgtgagtgtcaagtatgtgagatgctttcagcagctgtgttgcactttttaaatggctattggcctttgctggggcaggagccatctgctcctaccatctggcagaatcatactgcgtttaccatttaccccagcatgcttgtgacgggcagacctctcttctctccccagtccctaaaaggtgttgtgagtggtctcacagcccactaggggtcttaatttcctctcttttgatgtaaatggcatggaaataatcagctttgttcaagaggacacagaaggattctgcaaatagcctgcagagacttacctgtgttgattgatttcatatgatgctcgttatggatatatccaatatccaagtcacccagctctggaactgcctgcttcacattgctcatgataataaaggcctgttctttaagccacc

SEQ ID NO: 9038 - DNA, 956 bp, Homo sapiens
gtgcagtgagtccagtctcattaaatattggagaatacacacctgagtaagatcctgtgattgcagcaaatgtggaaaatgtttacccaaaggtctgctctccttggatattggagagttcacactagagaagagtccttacaagtaaaataaatttgggcagttttgtagccacacctctgtattccttcaggattatagttaacactgaatgaaggccttactagtgtgacaaatacaggatatttatccagaagtctggctgcataactcacaggagagctgtcatgtgggaggattgctacatgggaggatttgcttgagcctgggaggcagaggttgcagtgagccgagattgcaacactgcagtccagtctggaccacagagtgagaccctgtttcaaaaataaaatatataaatgacatccaataaagtatgcatatttgagctgtaggataagtcttgaattttctttttcttttttttgagacagcctcgctctgtcacccaggctggagtacagtggcataatctcggctcactgcaagccctgcctcctgggttcatgccattctcctgcctcagcctccctaatagctgggactacaggcaaccaccaccactcctaccttttttgtatttttagtagagatggggtttcaccctgttagccaggaagttctcaatctcctgacctcgtgatctgcccgccttggcctctcaaagtgttgggattgcaggcgtgagccactgctcctggcttgaattttcttataatcccatgaaaccatcatcagagtcacaataatgaatttatctaatctatcacctttgtattcacctggagcctttataaagtttttctctatgcagacaaccattgatttactctgctgtataatactttccattttctagaattttctgactgatgtaataaagtgtttcctcttat

SEQ ID NO: 9039 - DNA, 2775 bp, Homo sapiens
gtgcagtgaatatgggaaatcgtttgctgaaacatcccgtctcattaaacacaggagagttcatactggagaaaggccttatgagtgctgtcaatctgggaaacatcagaatgtctgctctccttggtcttaagagacttcgcattggaacggagtctcattctgtcacccaggctggagtgcagtggtgcaatcttggctcactgcaacttgggcctcccaggttcaagtgattctcctacctcagcctcccaaggagctgagattacgagtacaccacaccatgcccggccaaatacttggttttcagtaccacaagagctatgagctggttatccacttcatgtggaatcataagtgtccccaagtgacaatacgtatagattgctgggcagtgaaacagttaagatgtcaccgtagcttgctttctattcaacatctttctaagattaccttactatttcttttgttccaagtttgtatttcctcagagttctcacatatggaaaggatacacactttgtagaaacaagaactttatgttatccaagttctgggatagccatgagctccaattacctcagagctccgagtcctctactcagtacccgttgagatttatgtgttctgaggcttttgtcttctagctacttacttcattctccatgggtaacgtcattcatccacattaactaatttcctcactccaagctcttttctggagataatctccagtccctgtgcagacactgtcattgcactttctgctgaaatggtagtttcttgccagcaaggtgagattatggaatccagaatcttttttcaggggccacatgcccatttccccacttgcatgaatgtcgacactgtagccacagttttggccgtaaatgtgaatttggcaagtaaccactgttcccaaattgggaaatgtcccagtcagaagaagattatctgggacactgatactgacagggagatgggacattctgagggacccggaggcagggagccacctcctcagcttccctgagggctgcctagaatctctcttgtttcctctcactctgaattattcttcctctcatgactgaccaaacacatggaacctcacaaagtccattttaagagctttatcttgtgaagtgaagaacatgaagatagtttgaatcaaagttattgagtggacacttaatgtctttataacattttttacatatgtgtttgtgttttttggggagcataatttgcaaatggaatatctgttattttactaagatgcttcatggatacaagagttaaaacttcctgtcccatttagtgaaacaaaaggttaagaaatgtggataaagcttgtaagttagaaatggcaagataatcagctatatgaagaatctcagctgggtgttttggctcaggcctgtaatcccagcactttgggaggctgaggtgggtggcttacaaggtcaggagttcaagaccaccctggacaatatggtgaaaccctgtctctactaaaaatacaaaaattacccaagcatagtggtgggtgcctgtagtcccagctgcttgggaggctgaggcaggagaattcgttaaacctgggaggcataggttgcagtgagccgagattgcaccactgcactccagcctggtgacagagcgagactccgtctcaaaaaaaaaaaaaaaaaaaaaaaaaaatctcaatccctaaatgttaccttttataacagcaggttatatgggcttagatattatccctaaatttttttttttttttttttttgagacagagtctcactctgtcacccaggctgaagtgcaatggcatggtctcggctcactgcaacctccgcctcccaggttcaagtgattctcttgcctcagcctcccaagtagctgggcctataggttccctccaccacgcccacctaatttttgtatttttagtagagatgggctttcactacgttagccaggctggtctcaaacttgtgacctcatgatccacccccctcagcctcctaaagtgctgggattacaggcatctgccacggcactcggcttatccctagaaatcctatgatagcatgatgtataggcacctaaaggcatggcacttgagaaatgtgaataagattgtaagttacaaatagcaaggtacagtcagatgttaacagtctcagcccctaaatgtcaccttgtattacagcatgttatataagcacatacaggcacatacatgaaatagtgatacttcattctcagtaatatttttcatccttctcactggaaagatctttgatgatttttaatcaacataggagtttcaatgatatctagaagtttaaaagggctcgttcaaacaaattatgaccatacaccctgaagagtatgtgtctgtctcttgtggtgtaaatttttattttattacacccaattatgttcccacaaaacctttataattgggaaattaaggagccttcctcggaaatggaggttgcaatcagctgagatggtaccactgcactctagcctgggcaaaagagcaaggccctgcctcaaaaaaaacaaaacttttttcttcataaactacagtttatataggcaaaactttcagtactaagcaattttagtctctgcaggctcttgtcttgaattaatacaacttttgttaattctcttatgaagttaaatcttcctgcttgtatgcaacttatatgttgaaatttttttgtacaaaagattcatacatctttcctgtttgaaatt

SEQ ID NO: 9040 - DNA, 746 bp, Homo sapiens
ggatctcaagggcatttccctttgcccacctcaccttttcatatttggtaaactgtatgcatttgcctccagcccaagattataaatatgaactgattatgatctgcatgttctctctttgggttcaagcatttccttacagaagagccaccgtggaagtcatgggtaaatatgtgttgaattggtaactccctcttggagaatttcttgtgaattacacagcaataggggaactcatttaactggagacataatctcaatttgtaaagtgtggcccattttctaacatttttattttgcataccctcccctctcttctcgattgatgaaactaacaaagaggttaataaaagcccatctcgtcatgtacagggactcatgcctttaattccagtgttttgggagactaaggcaagaacatcctggaggccaggagttcgacactgtataacagatatatctgacagcagtaactcaagcacaccctaagaatgaccctgtggtctaagaagagtgttggttcagcgttccaaacgaagaaatccaggagtggccaacctggaggtttctgaacccctggcctgttccttggaatgaggccctttgttttgagctaggcggagggtgataagtgaaaatactatataaactgcatgcttctttcaaatgatagtggtttttttgtccagcctgccgctcctggactgccctgtatctaagtcctcaataaaccctatgtctcattt

SEQ ID NO: 9041 - DNA, 89 bp, Homo sapiens
aggttaggtaacacacatagggctgttacggactgagaagtgtccctgcaaaattcacagacataaataaataaatacgtattttcaat

SEQ ID NO: 9042 - DNA, 165 bp, Homo sapiens
acgcagacgacagaggtgccggctgaggcagaggagaaactatgggggtgctgggagactgagcctgtgggcgtggcttgctcccagagaaccttatggaagaggacatcaaagaaagaaatgccagacctgtatcccagaaaataaagccacatgatatagcaa

SEQ ID NO: 9043 - DNA, 1222 bp, Homo sapiens
atttatgcgagtttttcgtttcttgtacatttgacaacacattgaggaaaaccctataaacataatcaagaggggacatttttcattaagagttcagtaagacttctcccacattatttactagaaaatatcatcttagaagaaaccccatgaaggaaaagaatagggaaaagctttcagcagttatttagcccttactcaaaatcagataattaacaatgaaggaaactctaaactccccttatggtctaccagtaattcatacttgaggaccatgactgtggggaatgaggcatcttttagcaagagctctcaccaattgtagattggtgtgaattgctaagggaaaaaccttatgcagagaaaagtttttgactggaaatacactgttttgcatcaagctggagtactggatggaaaactctacaataacattttgtgcataattgtagaaatacagattttgttgttataaggggagggtctgggtgcccaggagtagaatatgaagtgctaaatctgaatgtaagaaaaataatagtattgaatggggtatttactgttgattaacctccttagagaaaattaatgaatgagatgactaacggtagaaaagttattgcctaggagtgtgagactgatgttgctggacagaaagtgatccttagcccagtgtgtcagcgtccattgttactcatcactgcattgttgggcaattagtttgtaatttgttttaggcaatcactataaattataattatggacactgcatcagtatacataacatgaaggaataaaaaggatacagaattgtatatacatacttactgtaacacatctaaaaaaatgtatatgggtaaggacctgaaagatccatggaaaagttaacccagttgagatttttaaaaagttttacaaatacatataacacttatgtgctgggctttcttttaaatgctttccaagtgttaacttgtttagtcccctttactctgagataggtactgttaccccagttttacaaatggctaagctgaagcagagatgttgaaggatcctacctaaggggcacaactagtaagggagtagagctgagattggctccagagttcttgttttcagccaccattttatgctgcctctccagtgattttttttcccattttcttcagtgtttctatagcagagatttgataataaaaagaaaatcctaaacaatgag

SEQ ID NO: 9044 - DNA, 844 bp, Homo sapiens
gccgctgtgctgtcccgttccggaggggccgctttgccggccgtgaatcccagacgaggcattgggcctttccacgcccctgggtggcggcttcctgtggtgtttgtggacgtcctctgcctgtgccctgaatccgctcctgaggctaagcgctcccaacgagaagggtccacgggaagccctcacctctgtaaacacaccctgggccagcgctcgcatccgaggggagccgccggatgtggaagaagactcggctttcctgcagccatttagtgccgccccatgctaggttatttgacattgtgcagtgtagagttgccttaaagtgcgtgatctgccagtgctttcttcaagtcacccttgccccgattcctcctgtttgcgctccccagggttgctcaagtggaaattttgtcagctgtttagccttttcgtacttggcgtgatgtcaacttcacttctaatctgcaaaagcagaagctgtttcctagtttacctcgcgtgtgtttacctatatggagtagctcgcagagatcacagaaatgcttgcagcctaaggcagggttttcagaccgtgggtcccagcccatttagtaaaatgggaaatcaattagcaagtggtcaccagcattacacagcaatgaagcagaataaagtaggccagaatgcatcatgtagtaaaggcaaatactgttttgtgaaacttttcacccatacatctaaatgtgagaactggttgcaatgtaagacatttcttgctgggaagttgtgagcaaaataagttgaaaacactaataaagatctgtctgtctgagcaaaggagactaaactccttgggctacat

SEQ ID NO: 9045 - DNA, 1548 bp, Homo sapiens
tggttgggggccacatgagtcttccagttcactctcactcctgtgtttaggaggcgtgtcttagatctgactcctctctggtcagtagaaaagaatcctttaagctatccagtgaattgatgaatgtgagacattgctgagccacactgttaagtctgctcattggggaactccagagacaacttaggatgagggcagaaaagtctttggggatgattcagtctgtaccagacatgacaacacacacactggaatgaaatgtgcaaacatgggggtgacaccacagagagaacctgtgaatgcattcagaacatgattggaatgaagagccctgtagtagggagtttccaccttgtacgtaagcaaacactgaatcaacttttttttttttttcggacagagtctcactgtgcagtggcatgatctccactcacagcaacctctgcctcccaggttcaagcagttctcctgcctcagcctccaaagtagctaggattacaggtgcctgccaccatgcctggctaattttttctatttttagtagagacagggtttcactgtgttggccaggctggtcttgaactcctgacctcatgatccgcccacctcagcctcccaaagtgttgggattacaggcatgagacactgcctggcctgaatcaaccttttttaagtgtaatcagaaagagaggctttggcaggggctcttactgtgttttctgtaacaacaaaggtgtacaatgagagagtccacacagtgctgtactgcacacaccacagaatgtgtgagattttcctgtttgaatgtatgtctgcattatactcctgcaataatgctgaggactcgttgcaggagggcaaactaggtgaataaattacctgtgaatgaacaatgaagtcgttcctcttaagactgaaacaagcaggccagatgtggtggctcacgcctgtaatcctagcactttgggaggccgaggcggccagatcacaaggttaggagttcaagaccagcctggccagcatggtgaaaccccatctctaccaaaaatacaggaaattatctgggcatagtagtgtgtgcctgtaatcccagctacttgggaagctgaggcaggagaattgcttgaacctgggaggtggaggttgcagtgagctaagatcgcaccactgcactccagcctgggtgacagagcgagactccatttcaaaaaaaaagactgaaacaagcttgtgctaagatggaaagggctgcttctaacagatgtggtttgttgctttagttgttgaagcaaaaatactgagttgttatgtttatgttatcaccccaccactacctccatggttgttcatttaggatgcttctaattcagccactgtgaaccattataaaggttttattgccatgttgaaaatgtttataatatggcaaaaaggggcatcaaatagaagatttactattattccagccatgtaaaaatatgtgcacatatggatgtatgttgaaagtggatgatggagaaataaaatgtggttttctttggggactgg

SEQ ID NO: 9046 - DNA, 1844 bp, Homo sapiens
tgcagccgcgggcccagggtgctgttggtgtcctcagaagtgccggggattctggactggctccctcccctcctgttgcagcacaaggccggggtctctggggggctggagaagcctccctcattcctcccaggaattaataaatgtgaagagaggctctgtttaaaatgtctttggactcccagggctgagtgggctgggatctcgtgtcctcaaagtggatgggttctggggtggctcctgaggtagaggagtggagaactggctcttaagagcacagttttcttttcttttttcttttttgagacagggtctcacactgtcacccaggctggagtgcagtgttgcagtccggctcactgcagttttgacctcccaggctcaagcgatcctcctgcctcagcctcccaagtagctgggagcctgggcatgcatcgccacgtctggctaattattattttttgtagacagggtctcactgtgttgcccaagcttgtcttgaactcctggccttaagtgatcctcccacctcagcctcctgagtagctgggactacaggcatgagccaccatgcctggccaactcacatttttctttctattatttattttttgtagagatgagtctcactatgttgcccaggctggtcttgaactcttgggctcaagtgatcctcccgcctcagcctcccaaagtgttgggattacaggtgtgagccacagcacctggccaaccaacacttctcagggcctctttcatctgtgctcttccaggatgctgcctcttactccctgggcacctcggcctggtcccagcaggtatgggcagttgcttgaggctccagacatactcacctctacctcgaccacatcaaccccatcaccaagaggaggttcagggaagctgcattttgtggtcttgtcctcccagtccagggtggtagtgctgggctgttcccagcctcccacagcagagctggacgctgtggaaatggctggattcctctgtgttctttcccattatccctcagctctgagtcctcttgtgccatctgacatctgatgccttcccaaccactgccgagtttctgcctggagcagggcctcaaggccctggcacacagaagatgcgtatcagtattatcaaccaatagttgatgaattgtgtttttcaacgaatttgctagtgatctggtttactgccttagtaatatctagttcctaatatgcctatgccttttaatgtctgcacagtctatgatgatgtcacttctctcaagcctgatgtgtcctctctctctttcttgctagtggtttatcaatttttaaaaccttttcttgtttatttgtttttgagacagaattttgctcttgttgcccaggctggagtgcaatggcgtgatcttggctcacagcaacctctacctcctgggttcaagtgattctcgtgcctcagcctcctgagtagctgggctgacaggcacccaccaccacacccagctaatttttatgtttttagtagagatggggtttcaccttgttgggtggccaggctggtctccaactcctgagctcaagtgatccacccgcctcagcctcccaaagtgctgggattacaggggtgagccaccacgcccagccccagcttagttttttaaaaagtttattttagccattctaataggtatgtagacatatctaatagtggttttccttgcgtttccttaatgtctgatgatgttaagcattttttccccaagtgcttagttgccatctatatagcatctttgatgaaatgtctgtttatatattttgcacactttaaaatattgggttgttttcttt

SEQ ID NO: 9047 - DNA, 1780 bp, Homo sapiens
cccgaggacgccctgagcgggaggtcgcggacacacggcattgcggggtctcgggcgtgagtgcgctgtctgctggcccagactttttcgggccgccggtgcgggcgccctcctgctgggagtgcaggggcggccttgggtgtggagaaccctggctgcacagtccctttgacgatagtccaccggccacccaggcctgtctggggacatgtaggatgggctcttaccccagggagggcggcaggctccacttcggcgagaggttcgtccatgcagaggtgggcaagaactggggtctccgacaggtgtggctatttctttgagttctctggcactgtcaaaagcagccaacccaccccccagtccacatggtcaccactgctgctaccagctgctcagtgcagtggccactgtgtctcctaaggtgctcgcttcagtcagcacttcatctcaggcaaccacaggtgacagttaaacatgatgaaaccgcatgctatggctttctagtgtctcatattctgttggcaagaagctcagcactgcattcctgaccgaggtcagaaccagatcaatctcagaatctcacctgtgtaggtctgtttcatgggacttttcttttttgggggagggggcagggtttcactctgtcacccaggctggagtgcagtggtgcaatcactgtttattgcagccgcgacttcttaggctcaggtgatcctcccacctcagcctcccaagcagctgggatgacagacttgcgtcactacacctggctaattttaaaattttttgtaaggacagtgtctcaccatgttgcctaggcgggtctcaaaactcctgggctcaagtgatcctcctgcctcagcctcccaaagcgttgggattataggcgtgagccaccgcacctggccagggaaccttctttataccaagtaccacaccagtcagagtcaagtcaggaaatagaaaccacactaggtatttcaaacagaggggatataagttagggactgattgtgcaggttttgcaaggctcagagagcaaaagtggatgttgcagaatctcagagctggatacttgcaggaagctgctaccacccttagggctggagaacccagggaagctaagaggagggtgcaacgaggctggtgttgggactgccaaaggaaacacagaatgacagctccatctctgcagacctcagatttgaccaggcctctggctgcctgggcagcctcattgccaatgggctgaaaggttctgtcactgttcagtggtctgacttctgagttctgtgcacaccctgagctctgctcctctggcctggccaccagtccttgtctgagtgccccaggtctggttatgacttcaggcctcagcacctggttgtctcttctgcaaagaatgcattctcccccagtccacccagaacacacagcctccatccaggtactggctctgagcaggacagagagcatgcagcaggtgctcagcaatatggaaatgggaccaaacagagggagtctccacagctccccgtccctcacagcagaagccagagccgctgcagtgcccagctggtcttcatcacgtctatgagctctgcaatcgctctgcagtcgcctcaactcctggtctcctctgctccttctcactgcacccgcatctcccatgtttgcactggctgttccctctgcctggaatgctccttgcccagttatcccactgtcttctttgcatctggcacacagtagatgctcaataaatgcctgtggaatg

SEQ ID NO: 9048 - DNA, 509 bp, Homo sapiens
gtggagccttatggaagtggtctttgtgagaaaatcttcagccaagtcaaacttcatgcagcagaatccccataccagaaaaattacctacatgtactgctaatgtggaaaagccttcagaagctactctgtttctgaccagcccaggaacctttgcagggccatctcacccatgcagcataaggcagaagccatagtcactttccatcttgcctggatccaaaaatttgcagcagtcctgtcctcatgcatggggaaaacagtaccctgagccttccttcctgtgttctctagggattcaggactgtgctcagctgaaccgatgctggttgaggggccttgagggaaatctaatttgagctcaggaagatgcacattccttgtggatgtggtcaagtctgtgtttaacccctaagatgtgtccattgaggccacaaatcaccctccactggaatcacctaccttgcctgcactaactggtgataataaagaccttattgatcaggtca

SEQ ID NO: 9049 - DNA, 176 bp, Homo sapiens
tcacctggccaacccactggggtagggatcaaagccagccacccccaccccaacacactcggtgtccctttcatcctgggcctgtgtgaatcccagcctggccataccctcaacctcagtgggctggaaatgacagtgggccctgtagcagtggcagaataaactcagatgtgttc

SEQ ID NO: 9050 - DNA, 524 bp, Homo sapiens
tggcgctggggcctggcctcgcccacggtggatccggggcctcccgcacagtcggccacgcccgctgcgggacccgtggttcccgccactagaccacgctccctcctgagcgcaggtcctctctctcccttcaccctttctccataccagggcctaagtccgccttactcctctcctccatgtacttgaaccctccaggtggtgccgggctggggctggggctggttagaccacttctgagaactggactatttcctgcgtaaaccgggcgctcaggcgcttggacccggcccaagatttgactccggttctcaccccgccctctcctggggtggtggtgggggctggggggccgcttgcctgccccagggtcaggctgggcaaggtccctagctctctacccaagctgttactccctcatggggcgcctaaggagactcaagtggacccatcatatatgggggctgggcctcgggactctcgctctaataaaggactgtaggccatggggcctaaaccacgaa

SEQ ID NO: 9051 - DNA, 82 bp, Homo sapiens
gtgcccctgccactccgagataaccagtggatgcccaggatcttttaccacaacccctctgtaataaaagagatttgacact

SEQ ID NO: 9052 - DNA, 377 bp, Homo sapiens
ggttggcgcatacccacccccgccacggccacaagccctggcatcccctgcaaatatttattgggggccatgggtaggggtttggggggcggccggtgggggaatcccctgccttggccttgcctccccttcctgccacgtgcccctagttatttttttttttttaacaccatgtgattaaggtcggcgctgcctcccccgacccactcagcgatgggaaatgaattggcttgtctagcccccctgctgggtgcttgttcagcccccactctgggctgtggagtgggtgggcaacgggcctgggtagctgggcccaggcaacccacccctccacctctggaggtcccaccaggctattaaaggggaatgttactgca

SEQ ID NO: 9053 - DNA, 976 bp, Homo sapiens
ggcaggttcgtgccctgctgcggccagcctgactagaccccaccctgaggtcctgcatttctcagtcggtgtgtaatcacgttccagggcccaaagcccagctctttgttcagttgacttactgtttcttaccttaaaaagtaattgtagatggaaatcagttgtgtttggcaggagaatcaataaaaatctttgattcagacagcttatggggtattttaagcattcttagactagttgaacatctcactttgccccagttacaaaaatagtagaacaagcaacataaaacaatgaaggaaaacctcacttgaaggcccaggtcaacatctaagcctgttgagacttagataatcgagtctacctcttcagtaggtttgtgtggatggcctggagggcaggtgccctctgctccccagtgctacctctctcttccctagggccttttgtggattgacagtagtcccctccgtaggagctcacagtctagattagaagtgttttaatttctacacacccatagtgcacacttgtatattgaaaagatagggaagagagaaacatttatggaatcagtcgttggcaccttcaatacttcatgatttttgtcgagtttacttcatgaggaggtcagcccattggctcccatctgaaccactttgcctctgaaacttaattacatccagaaagaaggacacttgtatgctagtctatggtcagttgaggaatatgactgtttttatatgcacatgtaacccaaatgtccaatataaattggcttattttttaaaataattttaaaagttgggaaaagtgttattatttggcatgcttaaatattgaataagtattcttcatcagcatttaataaatgtataggcagatgtaaggtaatttctgtgtattttgagataatgtcaaaatcatgaatatttcaaaataaactggggagttataaaaatacaactagagatat

SEQ ID NO: 9054 - DNA, 136 bp, Homo sapiens
aggttgtttctgttgagtgctgaaaaattaaattattttcgtaagaaatgattctttcctgcagaatattgcaactttgtgttgttttatgatgagcctatagttgtgataccaataaaacatgtcactagtttcc

SEQ ID NO: 9055 - DNA, 249 bp, Homo sapiens
gggcaaagtggcaggacactgcagaacagcttcatgttcccaaaatcaccgtacgactcttttccaaacacaggcaaatccgaaatcagcaggacgactgttttcccaacacgggtaaatctagtaccatgtcgtagttactctcaggcatggatgaataaatgttatagctgcatttgtctggccttttcttgtaaacattgcctgatttgttccttctggggctttgccattaaaatgtatttacag

SEQ ID NO: 9056 - DNA, 36 bp, Homo sapiens
acaaaaatgactaaataaaaagtatatattcacagt

SEQ ID NO: 9057 - DNA, 337 bp, Homo sapiens
gcctcaggctggggctgcccattgggggccccacatgtccctgcagggttggcagggacagagcccagaccatggtgccagccagggagctgtccctctgtgaagggtggaggctcactgagtagagggctgttgtctaaactgagaaaatggcctatgcttaagaggaaaatgaaagtgttcctggggtgctgtctctgaagaagcagagtttcattacctgtattgtagccccaatgtcattatgtaattattacccagaattgctcttccataaagcttgtgcctttgtccaagctatacaataaaatctttaagtagtgcagtagttaagtcc

SEQ ID NO: 9058 - DNA, 107 bp, Homo sapiens
cacacacaaagccccggtgtcggacacacagcagtaatttcccagtcatagtcttcttttcaaatgttttgaacacctggtgatttaataaagtggtcgtctcacaa

SEQ ID NO: 9059 - DNA, 110 bp, Homo sapiens
ctgcctccaacacactacgtcagaaggacccgggtctttgaaactgtgtcttgaagctaatgtattaatgtgacatggaggaactcaataaaactcctgcttcactggtg

SEQ ID NO: 9060 - DNA, 7337 bp, Homo sapiens
aaggcgcccgctgctcgctctttctctcggagggtgcagagctgggttccttgggaggaagttgtagtggtgatgatgatgatgataatgatgatgatgatggtggtgttgatggtggcggtggtagggtggaggggagagaagaagatgctgatgatattgataagatgtcgtgacgcaaagaaattggaaaacatgatgaaaattttggtggagttaaagtgaaatgagtagtttttaaacatttttcctgtcctttttttgtcccccctcccttcctttatcgtgtctcaaggtagttgcatacctagtctggagttgtgattattttcccaaaaaatgtgtttttgtaattactatttctttttcctgaaattcgtgattgcaacaaaggcagagggggcggggcgggggaggggaggtaggacccgctccggaaggcgctgtttgaagcttgtcggtctttgaagtctggaagacgtctgcagaggacccttttggcagcacaactgttactctagggagttggtggagatatttttttttcttaagagaacttaaagaactggtgatttttttttaacaaaaaaagggaccattgcaacttttgttaatttaattttttttttttttttttttttttttttttttggagggagaaaactgatgtcttctatgcatccgattcttaacaaaactgcagggagcttgaaaaaatgcagactgtacaaacgcttacaaaaaaaaaaactgtgaactgacttaagatcagagtttacttttcagatcaaattgtttatggttttacaaatgtgatttctacttgccaactttttttttgtaacttgttcccttatacctccttgattgaataccagacagcctagacctcagtacaaaaggtattgaaacatttttgatacataacagacctcagtcttttttaaaaattaatatattttcaggcgtatttttgtacagtgaaaagggaacattcttgctgtgttttttcagtaagactttcaggcacttcttcccttttgatttcttttttttcctctgttttttagcatgcaagtatgttggtacgttatgtcctggtttaaaaaggattaaaattttaaaataatccttgcatctaaaggccttgtggtttaaaaaaaaaaagcaaacttttttttgtacagctatagtagagatttgttcaatatttgtaggtaaagatttattgaaaatggtgatatagacctcagagctgttatcttagtttaaagattgtatatgtactgtactatagtaggactttatgtatctcatacgctgtgatgtggatggggccccagatggaaggtttgaaactggattctcgatttttagcaaaaaagaaaaaaaaaaggcacatagtttaaaaagtttctcattttgtgcaatataatctaaataaagtacagaccatctgcatattttgtagcaaatggtggcaaagcagactcaatgcactgtcgacatcattgcctgtttttttttttttttttttgtgctggaagtctgtatcttgacaattttaataaatcagctggaactgatagaaactcgcatcgccaatagtctctatggaagtcaaactggaggtcctgttgtcgcagagcattcggtggtgaggctgttgtgtgcgcggatgaggggaggtggcaggagagaattctacatttagggggttaggctgaaaagtgttcaattagcaggctgatttctttttcctcttccgctagttgtgaaagacaggggaagggtgttctttctctctgccctccctttccatctccagctccccatttcctttctcacctcctcctccactccctgcctcttctccccacccatcctggcgggcgggctgcgcggaggctcgggagctggccggggaggggcggatggaggggcctgggttgccagctcccttggtcggggtcctgctcgctggggcttgtgtgttctctgcggcgggccgcgtccccgctgagcctcgcggtgacagccgcctttggcagcgagcgctcggggcacttctatccccgcctctcaaagggtggggacagccgtttccagatttgaattttttctgttctttatttttaacgctgcatcttcgcgtgtgctcagaggtggttgttggcggagaacgccgccgcagtgtttgacctctagcggtgaagggggaaggggaagaggaaaggagagaagtggtcggtgtctgtttccttctgtcccccggggccgtggagctgtcggagggaaggaggacggtgcggggccgcagggggcgcggggcgcggcgggacccaggctacgagcgggagggaggcgggagtcgggggaagacgcggcaggccggccgagggcaccccgaggaacatggcatggcctctgtgcgatccgagtcgcggtctccggggtgcctgggagggccgaaccactggtgagggcgtggggagcagggggtggcagagggcacccgggcggtagtccgggacgcgcaaggcagagccctgacgctccgggtccccgtgcctggctcttcttgcctcgccaccgcgtgctcctgggcgcgccccgccgcgggcccttgaggcgcgcggagacaccagcgctggcttcccgggcccgcgggccggggagggaagcctcggggctgcggggtgagaggaagaaagcaaacccggggagcaggcggctgccgcacccgcgcaccccgggccctcaccacgccctccccgcgcgccggctcaggggctgccccggaatcagctccccggggccgccgcaacgaaggtggatccgcatcttgattgttctccgggagcctcctgggggctccggcggcggcgcgggcgcgacccatcccgctggcgctccccgctcgctgaaccccgtttgcctgtccacaccccctcgctccccaccatttttcctgaccggcctgtgtccccgagccctcgcggcaggcccgagcaggcgatcgcggccgggcacgcgcgccccgggctcccgccccccttccgagcatccgccgcctcttttctgctgggtctgggaggagggaggctgggaggccgctcggggcccagcgtgccagccccggagttcagcctcccgagctgcggcgcccgcagcggaggaggttttcagtggctgattgaaactcactgcaaaatcaccacgactctttcacctactgagatgattgaccgaggtttggccttccatttttactgagatttggcgagaccgaatggaagcgtccgcacagtaactgcagctgctaggccagaggggccccggcgcccttcccgcctcccctcccgcttgcttttgccttactcgatcttaccaccacccctcccccggccccccgactgagaactcgggcctctcacccgccccccagcctcccgctctgggcgagcctcctccccagcccccacccctgggatgcgaagccagcaagcttttgctgcagatggacaggtttcttttctgtggctttttcctttcgataaaccatcagatttcagtagtacatttgggaaaagaaggggctgatggcgttaaccaggttctcaatatagaactggatttctggagttgtttaccttaccccacaccccctcaacatgtagactaatgcagccattggtggtacatttattttagccacggataattgaaccagcggtttacaattgacacgtgctccgtgctggtgattttatgtggcagccctctgctgcagttccgaaacttgttggcaacgtaaacccattgataggctgatctatgtattttgaaagcctgaaaacttggcatgtcttttctgttttaatcatagatgaatcttggacattttctgtggtgaggtggaaactttaagtaaattagtaaagtaataatttggcttcagaatgggaagagatagtcaagattttttttttttaaagccatgtggcctaacttgatacaaaaataaaagtaattgtttggcaatctaaatttaaaacctgttagaactcaggacaggcgcttcaatgcgctttttaacaatatttaaggctgttttgatgagtgcgttgtgagaatcatcttaatgaattctttattgagtgtctaaaacatagtataatacacatggtattcttgccactggatagtcttcaataaaagtttaattgatttttttttgttggtctcttaagtaagtcttatttttaactaagcattgacagaatatcttaaaatggtaacctgggggtggcgggtgggtgctgtgtgcacggcagcctagccagtggggatcctgctgtttattataagtagttcacagactctgatggcattttggtaagctttccatctttaagaaattgaaccagcattctcttattaattctttaaactgtggaagtaatttccagttcttacactctgatacgcatcccttttatttaaaaaaaaaaaaaatgctaataaaaggcagtgtacttaaactgtgctttgcaaatattgtgtatgttatgaatgactacagacactgggcaaattatttgtagaatgattatcctttagctagagaaagaaatcattacaactcttttgggcagagatgtttctttttaatgttaatcaaggggaagtgatttaaatatgcataaatgtagcagtcagggtgatttagttgcttttttcatgaaagaaaaagactcaaaagacaagacttatttttctcttctgggacttgaaatcataatcatctgatattagtacagtacaagaaatttacatttgttttttacttcagaatttaagtgacttttgcccaaggaatttgagaaataaggcaaataagttgctctattttaaagtagtcattcaatataaatatattatatcaatcttaacttttttattctctgatatgattaataatatgtatattcttacttttcttctaatgggcatatgtatccttgtggacactttgagagaggttttcttggactctcccatttatagaatctttatactcttttactgtgtggttccctgcttttaacagatttctgaggcaaatatatttgtgcttttttcttatgtaggaagaccagcgaaaatagtttactgagttgtcaattttatcagtagataagaaactttctttattacagtttcagggaagattttttcaggatatttctcagttattctaagggccaaattttgtaaaatttccattaggaatgtcagtttcaaataccctttgtatagcctaagcctgtgaggataacaagaatgagccttacctatcctaacacagggatttacaagttcccaaagtaaccgtctccatgtaactcttgacatacttttctgagatttggcttatttttattattggttatttctcactgttcattctatttgatttattctacaacatccccttttatttaatgatctggaaaattctgctctttgataacaactcaggatttttttgttcagttttggtttttgccccttcctgtggagcctacattttcaaccacaataaagatgaaacaaaatttatgaaactgagctctcttccattttacttactgctggcttttttttttttttttttccttgattcctaccataccttcgtttttttcattgtacttttttaacactacctatatccattagctgcctaattagttttatctgttccatgtggatgcagtgagtttataagagaatttcacaaacaagtagttttttagtgaacttaaaataaacagaattttaaaggagacctatttttatactcaataaaagcacaaaagtgcagaaagtataaaacggcttacaaagggagacacaagctcataatgttccatgtataaaagtaataactttattgggtagagatattcttacaagatctagcacctctgccagtgcacagataggactgttttaaatgatttgggaacttttggttgcctgcagttgtgaacagagaacttctctacagagaaacaaaccactaaaagcaatatgaccgagttgagatgtggtttccaatgagcaattggtgaatttaagcaacctggatgtgcatatgtggaggctcccgtctcactgtttgatcaaacttcttttatgtagtcacgtagacttgattttttctgctgtgaaaatgaaaaaataaagcaatatgacaaaaagtttaaaaatgcataaaaaataggatttcctctaggctcctcgaagagatttttttaatatgatgcttgtcttactttcttagacacgttacatttccccttccaaaaaaaaaaaaaaggacaactggaagtaatttatcatataaagaattttgatcaaatagatattgacaaagggccctctgtcacatttttcttcatccagcttttgttcaaaaacagtatgcctcctcccttgaatcacatagggagaaacgttatactccattctcattaatttcccattttgtctacttttactcttgtacatatgttgtgggtttaagagtcttttgcatttgttctgtgacacctttttttgaattgactgttttaaaacggaggcctattttttccggtttgggactcctagtggttatggcatcccataatgcttcgtgacggccaccaggacagaaccacctgatgttttagagcagttttcagcatgacactgttaacaagtgtgtattttccaaggccacatgaaacttactttcttagccactccaggtttgggagcagaaaagctgaaaaacccttttgtgtagaagtctgagtggtttgtgggggggaccttttttagagtttgcatgccagcgcacggcctattgctgtgaaacagagagaaggtaaagctacctgaggcagtgcgctggaggatgaagtgtttgatagcactaggggggaaagaaaatgcatggcaaagtttcgtcttctcgtagactatctagcatgcagagtgtagtgtgttgaaacggtgtatgacattgctgtatcaaagttgtaaaattaagcattatttattgaaaactatgtatttttttgtaaaaacctgatcacatagagaatatcagtggcttgtgcttgtgcttcgatctaaccagcttcttgacccacccccccttggtatgcagtgttaatgctcagggttgaaaatagtacactccaatgtctcttttgcaagagtttttcacagaggattacatttgttcaaaagactctaataaaattgtgtgatcaatcttc

SEQ ID NO: 9061 - DNA, 1496 bp, Homo sapiens
acatcacacattacacatgtatgtataagggtagaataatatggtacaaaatccagtgagtacaagcacacaatgggcattcagtacaggttaaatgaatatgcaagaaaaattcaaagttgttgttgctgtttataagggtggtgattattaatagatgcaaatgtatactcccttttgtaatcacagcaaggtaaaagtcttatctctgatcattaccatgaggacacttaaatatttagccctggggacaaaatggtttgtaggcaggacgtcctgtgtgtttatgcacacataaaatgccgccctggccccaggactgcaaggcctctgactgcatcatttacattcaggggtggtcctgatcaacatggccccatagaataatagagggaatttcagatagtacagcgttagataataagcgctttccactgactctgtttacatgtggaaattagaagcgctgagtgaaaaagagtagtgaaaataaagacaggaagtatatacacaacaaacaatttttcctctctgcaaatcggattattcccttgcgcaccccctgcaacccccatctatgatgtcaaactcaatggactgttgaactaatagcctgggagtcaccagcgtgagagtgtgtatgtccacgctgtgcaacttgaattaggctggccaccacggctgtgtacagctaccccaggaagagcccctcccctcctcagcatttcagtggaaaacgtgctgactgggacccagctacaggaatcacatttgggcagagagaatggcttatccttttcatgaggggtcttgactcaagaacacttgccaattctgcttgaccgtttcccattctttacggtttttcctatcactccttagactaagaaagaaaaatctgtaggaatgattcggtgggatttctcttttgttcctaaataaaccttatccctggatgagctcgttcacactagggaagttactaccactggctttgaagccaggcagatctgggtgttccttcccatgtctttatttgctttgtgggggatcttttcccagcctttctgctttcatccttcttagtgagagcttcttcagctgcagaacaggggcaataatgcctaccttgctgggttgcagcagagaatgctgcttatgcaggaaaataaaaaaacacatagcacacaatgggagcttaatacataagaattataaacagtcttttgtgtatatatcaatgtatttcatgtccttaatgtttatttaaagcaagtacattcttttgaattaagcataaaaaggtcataaaatgccagagatgtgcttatttgaaatgtttgcaatgctttgcaattgttttaaaataaggagatgatataacagggtgttacctccgccactaattagttacgtaatcttagattatgtcacttccctgggtctcagttgtaaacagttgcttaataaataatgtttgttttgctttcatcaat

SEQ ID NO: 9062 - DNA, 2290 bp, Homo sapiens
agcggaaagtggaacgagacttcaacacaccagtgggaaaactcctagagtaactgccattgtctgcaatactatcccgttggtatttcccagtggctgaaaacctgattttctgctgcacgtggcatctgattacctgtggtcactgaacacacgaataacttggatagcaaatcctgagacaatggaaaaccattaactttacttcattggcttataaccttgttgttattgaaacagcacttctgtttttgagtttgttttagctaaaaagaaggaatacacacaggaataatgaccccaaaaatgcttagataaggcccctatacacaggacctgacatttagctcaatgatgcgtttgtaagaaataagctctagtgatatctgtgggggcaaaatttaatttggatttgattttttaaaacaatgtttactgcgatttctatatttccattttgaaactatttcttgttccaggtttgttcatttgacagagtcagtattttttgccaaatatccagataaccagttttcacatctgagacattacaaagtatctgcctcaattatttctgctggttataatgcttttttttttttgcctttatgccattgcagtcttgtactttttactgtgatgtacagaaatagtcaacagatgtttccaagaacatatgatatgataatcctaccaattttcaagaagtctctagaaagagataacacatggaaagacggtgtggtgcagcccagcccacggtggctgttccatgaatgctggctacctatgtgtgtggtacctgttgtgtccctttctcttcaaagatcctgagcaaaacaaagatacgctttccatttgatgatggagttgacatggaggcagtgcttgcattgctttgttcgcctatcatctggccacatgaggctgtcaagcaaaagaataggagtgtagttgagtagctggttggccctacatctctgagaagtgacggcacactgggttggcataagatatcctaaaatcacgctggaaccttgggcaaggaagaatgtgagcaagagtagagagagtgcctggatttcatgtcagtgaagccaagtcaccatatcatatttttgaatgaactctgagtcagttgaaatagggtaccatctaggtcagtttaagaagagtcagctcagagaaagcaagcataagggaaaatgtcacgtaaactagatcagggaacaaaatcctctccttgtggaaatatcccatgcagtttgttgatacaacttagtatcttattgcctaaaaaaaaatttcttatcattgtttcaaaaaagcaaaatcatggaaaatttttgttgtccaggcaaataaaaggtcattttaatttagctgcaatttcagtgttcctcactaggtggcatttaaatgtcgcctgatgtcattaagcaccatccaaaaagtctgcttcataatctattttcaagacttggtgattctgaaagttttggtttttgtgactttgtttctcaggaaaaaaaatattcctacttaaattttaagtctataattcaatttaaatatgtgtgtgtctcatccaggataggataggttgtcttctattttccattttacctatttactttttttgtaagaaaagagaaaaatgaattctaaagatgttccccatgggttttgattgtgtctaagctatgatgaccttcatataatcagcataaacataaaacaaattttttacttaacatgagtgcactttactaatcctcatggcacagtggctcacgcctgtaatcccagcacttgggaggacaatgtgggtggatcacgaggtcaggagttcgagaacagcctggccaacatggtgaaaccccgtctccactaaaaatacaaaaattagccaggcatggtggcgtacacttgtaattccagctactcaagaggctgaggcaggaggattgcttgaaccctgaaggcagaggttacagagccaagatagcgccactgcactccagcctggatgacagagcaagactccgtctcaaaaaaaaaaaaaaaaaaaagcaagagagttcaactaagaaaggtcacatatgtgaaagcccaaggacactgtttgatatacagcaggtattcaatcagtgttatttgaaaccaaatctgaatttgaagtttgaatcttctgagttggaatgaatttttttctagctgagggaaactgtatttttctttccccaaagaggaatgtaatgtaaagtgaaataaaactataagctatgtt

SEQ ID NO: 9063 - DNA, 4416 bp, Homo sapiens
aggaagcgcgatgctggaacacatccctgcctccgggaagtgtggctctcccccaaccctccccaccgtccccccttcactaaacatctttcttgccttatgtgccccattgagcttcacagtgtcaggctggacgccgtgatttcagggacctatgtcacaatgttcgctgaggccccaggtgtggtggggaggggaggcaggtgtgggtagcgcacatccccacagatcaatctctgcagatgacagggaggtgctgtgagaagtgcaccaggcagctttctctctgtggtagactaggcatgtctggggatggcctaagagactttctgctccttggcttctagatggcaccatgttgtcagagaagtcttttaaggactgccactctcttcagacagaatctgattattccagcttgagagaagcactctgtttatgacaactgtttttattactaatggcatttagtaaaatcctttttagaaggtattttttttccaactgagtagtgaaaatcaacaaggtgcatataaaccatcctatgcctttcttgaaatgtgcattttaagaagttatagttaaacgacttttcaggagatttagaaagccttatgcactctttgtgtttttcttgaaacttgctgtagtaactttttgaacgctgtaagctgtgtactgttataagtgtgcttcctatattgttgcatttccttgataatattgacgtgtttaaaggaacatctcatctccattagatttgccttttgttgttttctctctttggtgattcagctcagctcatgggcctcatcccttctctcccaggtagcagaaaacgctttttattgtattcaatcccactgctttgctcggcaatggttctcctccgaattgctgccgtctggcctctggcctcagtcttcagatagacagtaagaagaaagcagcctcattgatccgcagatgtaggggcctcttggcagaggctggaggactctgggggctagggaagagcctgccagattttcacatttttaaaatgttctagtcattttgagaaatcatatatcttacacagttccaagtcctgttgctaaccgttttgctcttgttggggaaaagaacctcccatttcacttcgttttaacgtggggattttaccacttgatcttttacagggctgtctgtgaccatttccatggcagcaggatgcagggattaataaggacacatacacattattccaccaattgactttgaaaagtggagaaagtgtattctttaaagagaatttacttctaaaagccacaggtgcttttacaaagcaaactgcattgaatttaaaacttctaaaaataacaggcaaatattgtagctatattacagtgggattttaaaaatcttgttaaacattctataaagaagtaaaacaaaatccttttatctcagttatttgcccatcacaagcacatttttaaaatgttgctttgtgtgtgtttgacttctgcatttgagtatcagtctcaggtcctagtttactttccctggttggaaatttatttcttatttcctaacattgaattcgttagaaaaaacagcgtcacctcactcttcacctgtcatgttgattttccttatgaacccgaagccatttagaaaatccctgtgtgtcaaaattacattcaaaaagctctccttgtaattgcaagtttagtaactcagtaagaacatgcctgcgactccctttctggatggaacctgggctgtggctctctgtcgtttgtggtgctgtgatggtgtctactgttagaatagcttttctggaggtgggtggcaactccacgcgggagtcattggctgggcttgagccctcagcctgtgatatgtggatgcagctgtccagccactgccctttaacatgcccagcacacatgggaggcctgtggccctgtgtccagtggcccacaggacacgcctccaccatatgctcatccttcctgcctgaaattgctgctgcccatcgcatgagcccacacagtagcacccccgtccttaggatgagagtcagagcctttggaaaggctgcatccccagggctagagctcagatgaccttatttctagagggacaggctgttctgttggaagagtctctggcccagtcatgcacatctgtagccccagccatccttgtgccttcacctctgatgtgtttcacaagcacgtagttcaacccagatagggaccacagagattctggggccagccaggggcagtcaaattggcacctactggctctgactttttgtatgaagcatgcctcagtttcctcattttgatctagatataaaattaaaattgtccatttcctatataaataccagcaagatcactctgagatacataaactcgcatttccttctgttttagtaaggagtgccagacttatctttgatgggaatacagtatgaaccctgcttgatgtaaaatggaaatagcacacaggcagatggccctgggtttggactttgatcttgccatcattccccagtaaaacctggggagttctgcgttgagtggacggacttattcctgtgaagcggcataatttgtctccattgaaaaatggcattcactcttacagatggtgttcactgcaagccccagaagcatatggcatgtgttcactaagaggcctttaatcctggggagtaaggggcgaaggcccttagacaaccatggctgctgtactgccgcccagggtgggtggccagtgaggactggccttagcccagtggacctgtggcttctctgaggcccttgagtaactgaccacatttggaggttttgctggaaatgcctgacctctcagtctggctctgctgtgtagtccatagcccagccagatgagcttgcagcctcataggaggtcagcaccttgcaaagatgcagtcaccatagatgtccacgtagcagagactgacttaggatctgagataaagcatcggattgcaggaataactgtccaaattagttcttcctcctcaactcataggagtagctgtggacagaggaaccaacatctgccacctctggcattttctttctttttttttctttttgagacggagtttcgcttttgtcccccaagctggagtacaatgacaggatctcggctcactgcaagctctgcctcccgggttcaagcgattctcctgcctcagcctcccaagtagctgggattacaggcacccaccacctcacccagctaatttttgtattttcagtagagacggggtttcaccatgttggccaggctactctcaaactcctgacctcaggtgatctgcccacctcggcttcccaaagtgctggaattacaggcctgagccaccccacccggcctattttcttaaaggggaacaaatgatcttgacaacatattattccataaaaccagtttagggcacaggccagttcctgattagaacacaggacctgtgggagggactatcagagatgcaaaaattacttcaagatgagtttattgttttcatttgtattgcaaaagttagaagtcattttacaaattaaaaaaacatttttttcttggtagtctttaaaaattaggggattgaaaggatccaggatgggctttgtgtgtgtgtctcagattctcatttattagtgagcacacctgtgtatatatataaatcacaaggagatcatcaagggaaaacattttgcatgtgtaaagcttcatgaagttctctttaaaaaataccaaagcttgtttatttctgataattaacctaagcccttatgaaaataaacaaaatgaagggattatgacaggtattaccaaaaacaccaaaaggaacaaaggggcctgcgttaaaacctaattgctaatgcttcacaactaggagagcatgccgtcttgatgtttaaaaaacccagggtctccacccttcctttgatttgtgcaattctgtcttccacagttccggagccttcagtgaggggtagctacatgccccatgcctgccctttctttccttctttgctcactttactatgggtgtattttaatcttgtataaaaatatgcatgaatgagtcatgcacatgtatacgttatgtatttgacaagtggtggtgaaacaaaatcaaaacagatttgatttgtgtttttgaaatgtcagtacattttgtgccactaacactgtgatgtataaaagagctgtttgaatgccttttaatgttgtgttttgtactctggaatcatatggaaaaagtttgatttgtaatttcaatacatattttaaatgtattgtgtcttacgtagtttgtccccccctttagcagggattcctttttaaagctattttggctggaatacaggtgacttttgt

SEQ ID NO: 9064 - DNA, 767 bp, Homo sapiens
gtgttcatgatttcttttattctttgcacaacaacaacaacaacaaattcacggaatcttttaagtgctgaacttatttttcaaccatttcacaaggaggacaagttgaatggacctttttaaaaagaaaaaaaaaatggaaggaaaactaagaatgatcatcttcccagggtgttctcttacttggactgtgatattcgttatttatgaaaaagacttttaaatgccctttctgcagttggaaggttttctttatatactattcccaccatggggagcgaaaacgttaaaatcacaaggaattgcccaatctaagcagactttgccttttttcaaaggtggagcgtgaataccagaaggatccagtattcagtcacttaaatgaagtcttttggtcagaaattacctttttgacacaagcctactgaatgctgtgtatatatttatatataaatatatctatttgagtgaaaccttgtgaactctttaattagagttttcttgtatagtggcagagatgtctatttctgcattcaaaagtgtaatgatgtacttattcatgctaaactttttataaaagtttagttgtaaacttaacccttttatacaaaataaatcaagtgtgtttattgaatggtgattgcctgctttatttcagaggaccagtgctttgatttttattatgctatgttataactgaacccaaataaatacaagttcaaatttatgtagactgtataagattataataaaacatgtctgaagtc

SEQ ID NO: 9065 - DNA, 2350 bp, Homo sapiens
attgctactgaacaaaagcattaacagttatgttcctgtttcgttattggtaccaaaactcttgccagataaccagtttcatgaactgtttgtatggcagcccatgttctctaatgccactgctctgttttaaaaactcagaggcaatttttacatatcagtaattgtttttataatttgtggttttcatgaaacattgctatgcatttattaggaaaaactgaatttcccaacaggtgaactgaaaagttattttaactattatacataatcaagatcctgcctctacggaattagctaaacctaaaaatgtttgcattaatgaataaattcttcctgcattccttggcccagttctggagttggtgacctttatcacaattattattttaggcggccagtgaactgctgcttcagaagtccatagcccagctctgaactttctcgataaaatgccatcagttcacctttaaagacacacattcctttgaaatccacccagtgtttaaaaagcaacttggaaatttacacattagcattgtactttctagccctaatttgtgaggttgcagctatcattatattctgcatgtatgtataacctgttgtgaacaatcatacttaacaaaactactgatggtttatgacaacgtagggtaactacagttcattctgttccaggttatataaaactgcatttcctgaatttggttaaaaactaaggatgatggattgcaaaacagttcttttaaattagtttatatgctttaggtgttttggaatttgccttcttgaacttcctgagtcacacagaaagcaactgtacacagtagaattctgtggcgcagaccatgctgtattaacacatcacttgctgtttcctactgagtgtaccactgccttcccttctagcccaggagaatgtttactcagtttagtgtcttgtatttctataatactccaacaggaatggtagtcacactgtcttgaaattgaatctgtccatctgtttataatcaagaacatatcagaaatatataggtcccaggtaatactcccaaacatcccactttttactgtttcaggccatcatatcattcttaagctacttggggtggtagtagaggattaggttgtctattataaaaccaaaactcattcgtttaatgaacttgactgtcatacctctatttagtaattgcgagggtaagattcatagtaggaatattggaaattttggcactctgagaataaataggcatatgatacccacttggacttttaacaaaagtaaaggaataaatttgcatataggcttggaaagtgaggcagcaatgctgttaactgcatttgttgtgatggtgcatttgattgaagcagcttgtctttattatgcaagactgtgtagagttttttttttttttggcattgtactttttgtttttgttataaaggaagacagaacaaactggaatgttttatgatgttgtatagcaatcgctttttacctttcaaagttccgggtaaaaatgtgttatatctgtagttttttgtttttgtttttttttaaagcactacatctgttttcactaattgttaatttctgtttgaacccttcatttaattttctcatagatttaagtaaacagatgtattttgcacagtgcacttatgtctattttaacaatcctcctgcatctgtattttatagtcagccttttgaccacctggtgccagctatataaggaataaagttgattcatatcaacattagaactccagtcccaaactaatctgtcaggttcactggtacataaatacctaggaaatatttttccagtctacaatttggtgctattgtgcagtaactaatagtactcttaccagaggagaaattatattaacgaccctgctaatatcctttcttagttatttgctccttgcaaattaaaaaagcaactaagagaaagaaaaacattgtagatatctatttatatttaaagtttatgtttcatgaactgcagctgcaggattctggcattttgcatgccattctccatcagatctgggatgatggctcagaacatgtacacagactaagagtaactgtgtgatctgttaaggggtggataacataatatgcagcttaggatgctattttgagatgtatgatattcagttcattcacctgattactttggttgcagcacaactgtatatattgtataaccgaaattgattattttcattgtccttaatgcagtgatttataattagagcatgtttaataagtttactcttcttgttaactagtcatttgactggaaaaaaataaaatacttttaaatgg

SEQ ID NO: 9066 - DNA, 81 bp, Homo sapiens
gactgtgcctgtatatgaactttgaaaaaatacttgactctacttttgttacctaaaataaaatgcattcgtttctctggg

SEQ ID NO: 9067 - DNA, 430 bp, Homo sapiens
gaaaatgaaatagaaactttctggaaaaatattttaatagtgataataacatcagattttaatataacattccagagaattgtggaaaatactgcatatatatgtatagactctgacacatatttacatatatatcaagtgtgcttagaaaaatgtatattgtaaagcaggtgagcttcatttgattttatttttcagagtatgaacattctaagagaaagttaaaacaatagcaaattgtataattgtatccagaaatgtatactcatcgtattttaaagctaaatttattttttaaactagatcccttcattattctttatgccccagagtaaatcccagatggatcaaagatctaaacataatctttcatatgtaaaaatataaaagtattagtagaaaacaaatatgaatgctttgatgatcttgg

SEQ ID NO: 9068 - DNA, 1568 bp, Homo sapiens
aggcctgcgggccacagctccccaggagttcagtgcaggtgtttctagatcttacggtttggcaactgcaggtaaccccagtcagccatgtcgccagcacaggtctatgtcgagggaatgggttccttgcaggttggaggcggggctgcatctggcttggtggtagcatttaatctattgcattggtgtttttcagatgaaagagaaatccatataccattatgtttgaatttcctgatatatacaggatttaaagtgaaaactttattccaagagttaacagagtctctgggaagctttaggacatctgctacgttatttatcaaaatattgggatctctgccttgtgcctacagtgtcgtgggcctgctcgctagcagaagtcagaaaaggcgataggcttggctttaaggatttcgtgcccttgcctgaattcagtacaactccactgcctcacgttagcgggagcgcacctgaagagtacggggggagccctctctcccttaccctctcactctccaccagatgtttactaaacagggcatgttactgaaatcttcctttgcgactttctcggacatatcaactgcctttctcatgaagaattttaatgggttacagtatgaaatcagttaagataaagctgcattgtatataagtgcaatatatttttgaaggtctgtaaatgtgtacatacatgtcttatataaatatataatatataaatatggtgtctgtgtacatatagtgaagatatgcagtaagagctaccttaaagactttccctagacaaaggttaagttattttttgatcgtgtataccaagcagatagaatactgtgcttagtggaacccgctaaaaacctttttctctgtttttccaaacacaggcattctgtagcatagcaaaaccttctcaaatgacagagattctgtttgctgttgagaatgttgttatttggatttctgcactgtttaacaaatgaagtaaaagaaaaacactactgcaatcacgtcttttgttatgctagtatcagtcagatgcacttagagtgaagaaacactgtaattacagcacacagattgcaagtattgcgtaccaagtgatacaactcgaaatgcagttctcatcttcctgttttgagaaatgattattttatcacgcatcagagccttcgtgctttgattatcttgtatgttaacaattctagaaaacattcatgaattcacaaaaatatgttactatggcaggggaacattttgtacacatttaagtatataaaaatactaaaatatgtaattttataacaaagtcacgggtatctttaggttcagggaactagactaggtcattcgtgtaaatggactggtagttacagtcttaggttaaagtattctaatgaagtatgggaactaaattgctggttttctaagataagatatgggatatgggtcatataacttttgtattttttatgaagttgattttgtcttgcgtgttatttttaattgtatcattgaagatgtattttaaaccaaaggaattaaattttatatgtctatttcgt

SEQ ID NO: 9069 - DNA, 2329 bp, Homo sapiens
aaggtccattaggacatcactcatgggatttttaaaaagcctctttccaggaatggaactgatggattcctctcccactgcctcacccaaaaaaaacggtcttggcggcctaggggaagatcggggagctggttttgatgaaagtatgttaacttttcttttccacttgggaccctgttcagtatcttttgtagtttcagaagtttttttgttttggttttttttttaaagaaatggtagaaaatttgataatctgaatcaccagcattcaaacaaatatttcggcaataaagtttacaaaatctggatttttacaaccttttctattgatgttttgtagaaataagacagggtactaatttttatactggtttttagaaaaatatttatattgttggtgctcaaatcaccaatttctagctagatcattttgcagccttcttttcagtgtttaataacaaagtttttcctaatggcccttcttttagtaaactggacatgttattccactacaaaaaccacaagttatctggccttttagatctttttggaatcggacctggttgagtaaggacctcttaaaagggaaaaataaattttgccgtcagcttcttcataacgttttcaaggaaattctaggcaatcattcctgtcaccaaagaactaaaattttggttgactggaactagtgagctgtgtccatggtgtgtcatgaaggatgtaccccagagagtaacatgagccactgggcagatcccagggaccagtacttgctgcaggatctagtctgtaatagtcttggccatggctctgctgaaagcaagccattcagtttcttgtttgtacctaaaacaccaaaaaagaaacactcaaatccagctgctttgtcaattgtcagttctgactccttttgctgtggccttatccgtactatattgtgggtagagtaacttctcagaaaaaaaggaaatgtctgtattggttggatgaaactccaccagagcacagcttagctggggcgagatgcatgtgaaggcaggcagtgccaagattccgcttcctttgtttgccaaatactagaaacacaaggaaatgcaagttacgctaaatggcagtaatactacccaactgcctttctgttcattttgtttgaaggaaattgttttgaccaaacagaaaattacttggaatggtgtgttttacagtctacctagaaaatagatggacaatatttttcaactgtatgagcacgtagataaccgagagaatgtggccacctgtgttcaagaagccactgatactggtttttgttaaacattggaagttcaggcaatggaataaatgtaggaacatacagaatgttgcactaatttggtagcctgggaattttttttattgtgcagtatgtatttaaattttgtctatgttaattaccagcatttacctttatttaaatgatggtaaggtggaatattgaataaaattaggttttgtgttttgttctttgtagtctgataaaatctccacctggtcattcattgtgtgtgacttgatacctgttaacttgccccttagtatcagctgttacttgacacaaatgtgtgtgttattcagaggttttcagtctggacactccataggtgagtgtcgtgtcttcgtgagacagcacagttgtctcatgttgtgcatagttcatgtttcctcaccacccagtcctttctcctgctcatcaaaatcagcatacacatttttgactgtacacactataaatggcatcaaatttggatatttttcttaattatgacatgcaaagtaatgtgagtcctgccagtattctggtggataaggtcttttgagtatttggttgcttgtcacaacattctccaagcagtgatatttctaaagaggagatacatgttgaaaacggttttaatttacacttccatttcctgattacatttggaaatactttgtgtaaaccatcccccttccacctccatttgtctgttgaaagattttaagttggaaacagttcctgtctgaaaactcttctgagaaccacaaaccttgtgtatggattcggcatggagccctcagctggcggctctgggtgctgacggccgctggagaggtgggctcccctcgtgcactttattgcctgggcagttttgcttgatcttttgtgactttgagccttttaagtagtttgaatgataagacttaaaatgtttcataattatgttttatgtaacagactttgacattatttaaacgagcatgtgtaatgtaacttttctctttgaatcatataaaacttgattttacattg

SEQ ID NO: 9070 - DNA, 1109 bp, Homo sapiens
atgaactgaagatgtgcccttacttggctgattttttttttccatctcataagaaaaatcagctgaagtgttaccaactagccacaccatgaattgtccgtaatgttcattaacagcatctttaaaactgtgtagctacctcacaaccagtcctgtctgtttatagtgctggtagtatcaccttttgccagaaggcctggctggctgtgacttaccatagcagtgacaatggcagtcttggctttaaagtgaggggtgaccctttagtgagcttagcacagcgggattaaacagtcctttaaccagcacagccagttaaaagatgcagcctcactgcttcaacgcagattttaatgtttacttaaatataaacctggcactttacaaacaaataaacattgtttgtactcacaaggcgataatagcttgatttatttggtttctacaccaaatacattctcctgaccactaatgggagccaattcacaattcactaagtgactaaagtaagttaaacttgtgtagactaagcatgtaatttttaagttttattttaatgaattaaaatatttgttaaccaactttaaagtcagtcctgtgtatacctagatattagtcagttggtgccagatagaagacaggttgtgtttttatcctgtggcttgtgtagtgtcctgggattctctgccccctctgagtagagtgttgtgggataaaggaatctctcagggcaaggagcttcttaagttaaatcactagaaatttaggggtgatctgggccttcatatgtgtgagaagccgtttcattttatttctcactgtattttcctcaacgtctggttgatgagaaaaaattcttgaagagttttcatatgtgggagctaaggtagtattgtaaaatttcaagtcatccttaaacaaaatgatccacctaagatcttgcccctgttaagtggtgaaatcaactagaggtggttcctacaagttgttcattctagttttgtttggtgtaagtaggttgtgtgagttaattcatttatatttactatgtctgttaaatcagaaattttttattatctatgttcttctagattttacctgtagttcat

SEQ ID NO: 9071 - DNA, 1133 bp, Homo sapiens
acagcagatctgctgctttcaatcacacccactgcctctcatgccggagtgggggaaatggaacccgcaaagcctgcaggccagggagggtgggaaactggggtgatgtgagcccacagggtggagcactgtggactgaatgcctgtgtcccctgggttcatatgttgaacccctaactcccaatgtgatggtgtcaggaggtggagcctttgggaggtggttaggccgtgagggtggagacccatgctggggttggtgcccttatggttctcccatgtgaggacacagagggcagccatctacaagccaagaagagaggcctcaccagacaccaaacctgccggcaccttgctgtgagatttccagcccccagagctgtgagaaataaatttctgttgtttaaggcactcaatattttgttacagtagcccaagctgactgagcagatattcatatggaaagtgaattttgatctctacttcatgccgtacataaaagccaattccagattgactgtagatacagattggcaaagcaaaacagtacagtttctagaaagaaacaggaaaatatctgcatgaggtggtcaaatatttcctagagaggacacaaaaagcactaactacaaaataaacaatgataaattggactgcattaaaattaagaacatctgtttaacaaaagaccccacgaagagcgtgagaagccagagtgcagagtgggaggagaaatctgacctgagatgggaaattagaatatgaagaactccttcaagtcagcaagaagacaggcaagccgagaggaggacgggcaaacgacctcaacagacactttacagaagagatatccaggccaggtgcagtggctcatgcctgtaatcccagcactttgggaggctgaggccggtggatcacctgggatcaggagtccaagatcagcctggccaacatgtcgaagtgccatctctactaaaaatacaaaaatttgctgggcttggtggtgtgcacttgtaatcccagctacatgggaagcggaggtgggagaatttcttgaacccgggaggcagactttgcagtgagctgagatcgtgccactgcactccagcctgcgggacagagtgagactccatatc

SEQ ID NO: 9072 - DNA, 795 bp, Homo sapiens
gcgagcggcccctggacagttgcagagaaacacaggcttgtcgtgccgtttaagctttgcttgcaagagtggatgccccgcaatcgttcctgctctcccgggccccgggcctggggcatgcgttgcacctgcccagcccggtggctgcgcctccctcctccacctgaccaacgcgacattcctcccctcacgcctggcccggtcccttccagggcaactcccagggatgtggtgacatgcagggttcaagtgttcttggttccaggcacctcccggctcacggggagctcagaggtccatgccgaggagaccaggcaggacctcccgaggctgcgccccggccggcccatgcgttttgtgatcccaagtgactctgtgggaagggtggggacgaggcgtcgggagggtatacagggagcccctcccgtgcatggctgcccccccgttcattttctccaccacagccgcttgcacgtatagatactgtggtcccctttcttttaatatataaattatgtatggtgaagtggagtgtattgtgtaggtcccgtatttaatgcctctgactgcctttgaagcgcagccctctgtggcccgcagccccctgagcctggctgttgtgtggtatttatgctctctttgtctgcctgtttctaaggaaatgcatgtgtgccctgagccgtgatgatcctcccatccgtgttgtgagcacaggcatttgtgtctggtctgtcctccctgttgattggtctggcatttccggtattaaaatgataaaataaatggcattttctg

SEQ ID NO: 9073 - DNA, 1839 bp, Homo sapiens
aaaggccagctggcacctctgtctcatgttcgtgcagattattacagacacctctttcctttagccagagaatggttcaaatgtcttacagaactaagatctttttcagagaaattgctcacaaaagttagtgacagttgtatttatttttttaagttacaataaaatgctctcaagtcctttgaatgttccaacaaattcaaaacttcattttctgaatgttttacataaatgcgaactacctgttcgcattggtaacctgctgctgtatttcatgtcttaacggctattttgaggttcattaacaacatagaaagccttgaactgtataaccagctagattccttaataattagtcactagagacagcccaaagacaaatattgggcaggaaatcagttctcactgagcccggtttccatgtaaaatctctgttgtggtgggcataggtggcaccatctaaagaaaagaggtcttgttttttgtttaaaaaagtttgtggggaggaaagacatctgtgtatcacttcaaaatattgatttactgctaaacatcactctgaatttatgatgtggatactaacttcatacatttatcggcattgtccaaaatattttattctttaatggaaaaagccattaatattcaaatgaagggatcacattaaaaaaaacccatacataagaaacagcctccaagaacattcaagcagcagtcagagagaaaaatgtttcgacagccaagttttcttcaaaatattatgtgacagaatacgactcaattcaccggctacaacaattcatagaatttttcaatgttttcttgagatgcaaaagttcactgttgcagtgttttcaaatgaccaatcaagtactacttcttggttaaaaggccactggtagagtcatctgagtgtagagaatgtcccttcactgctggaaaaatccactggctcccaagaaaagaaaatggtctgaagcctctgttgtggctctcacaactcatctttccctaagtcatcaagctccacatcactgaggtcaatgtcatcctccacgggaagctgggagacgacagaaagccactgttagatctgcagaaggggacaccctggaaggtcaacatctcattttatggaagagcgactctctggagctactcctgctacaatccaggttctcctcagtctgactcctaccctgaccttcgtacctatgattatacggatggaaaagctcagaactcaggtgaaacatttcaacatcacatcactcaccattttaacactggaagccacttgaacgtgtccttttgaggagggtgggacacaacagtacagaaataagtgctaatttcaaagctatcattttctatttttctaagataaagtaaatgaattccaggttaaatgttcactttaaggtaataatcaggaaagcaaccttactactgaaatgtatcttggctgtcaagagtatcaaatgccatgcagcacttaaacttgtgataaggaagatgaagggtcttcagagaagaacctcttaaaaggcccacgggtgcaccagggctgaggtctgatgggaaggacttgactccaggtgcagagatgcacaggctcaagagagtaaaccaggactgctgcccgcacagcttccctcccgggcactcacctcgccatccctgccgtcccaaggctctctctcaacgatggtagggaaagccccgcctcctacaggtgccgtggagccacgcccaaaagagagctcccttagggaaaaatgaccaaaacacacacacacatttacaatggactgctggtgcagaagaataaacaacttt

SEQ ID NO: 9074 - DNA, 313 bp, Homo sapiens
caggagggcccctcaggcagagatggaccaggcggtggacagatgggtagatgtggcaggcatgtcatcgacagcacagaagggctgtcctgtgtccccccaaccctcccctggacagactctgaaggccctcccggcacctctgccaaggctgggtaagactcctctatgttgcctgctgtccaggagcccgggagggaggggtgtgcaggagccgcagggccgtgtgggacgagtggaggccgcggcctggctggcacgagagcccacgcccgcttctgtatctccctcaataaagcctcctgctctgtgc

SEQ ID NO: 9075 - DNA, 1913 bp, Homo sapiens
gagcaaggagggctgggctggccttccccaggtgggtgtgggtggggacaagagacccagcccacaacagcaccagtcagctccccacacaaggcagcttgggtctgcactgtctgtaagctgcaggacactcttccaggggacccaaggggtcactcttacacactttttacacgtaagattcagaggagtcagtaactggtccacggccgtacaatccccagcccttccagcttgggaactcatgggtgccccatgaaagggaccctgcattgtggtcaggagcactgaatgcctgggttcaaatccagcttgtgaccctgatgagctgtgggaccttgagctggctgctgcaacactctgtgcctccgtctcccctcctgcgattcagtgtgttcactccttgcagctgctgtgacaagtgagcacaaactgcatagcttaaaacaacacaaacgtatcatcttacagctctgaagatcacaactctgacatgggtgacatgttgcagagctgtgctcttttaggagtatctggggaagaatctatttccacattttttccagtttctcaaggcagcctgtattccttagttggcagctccttactccgtctttgaagccagcatcctagcatcttcaaatcagtctctatcgcttgctctctcctgcctcactccttcatcttttctttctttctctctctctctcttttttttttagagacagtgtcttactctgtcacctaggctagagggcagtgatgcaattataaatcattgtagccttgaactcccgggctcaagcaatcctcccacctcagcctcccaagtagctagggatacagacacatggcaacatgcctggctaattttttttttatttttattccagacagagtctcgcactgtcgcctaggctggagtgcaacagtgtgatcttggctcaccgcaacctccgcctcctaggtccaggcaattctcctgcttctgcctcctgagtagctggaattacaggcatgtgccgccatgcctggctaattttttgtatttttagtagagatggggtttctccatgttggtcaggctggtctgaaactcccaacttcaggtgatccgcctgcctcagcctcccaaagtgctgggattacaggtgtgagccactgcgcccggccatgcctggctaatttttaaaattttatgtagagatagggtctcactatgttgaccaggctggtcttgaacttttgggctcaaatgatcctcccaccttggcctcccaaagcactgggattacaggcatctggtttcacttcctccaccttttaaggacccttgtgattatatcacaacctttatatttaagcaaaaaaatgcagaaaaggcttagttcctctttgttggttaaaacacaaatggattcattctttcaaacatccgcattctcctcttcttcctgggtgctctgccaggctgtggtttcccttggtttgggtggagcatgtgacagagccatggccagtggaatgggagcaaaaaccctaggtctcccttccaggcctggtccatgagacactccaggtattggcttgttctcctttccccatcagctgaagaagggagaggacttggaggatgcagggaagagaggggcacaagatggagggagcatgtcaggaccaagcctggagccctgagtgagctcgtggagcagaatctcccgacacccacactgacacacaaacaaaataaacaaaaactggccaaaacaaaaacaatagcccacacttctagggtaaagcattttaaatttattttctcaacaacccaagagaatcaacaggcagggatttcgtattcatttaatacaggcaaaacctgagattcagagaggtgaaataaaatcccgaacata

SEQ ID NO: 9076 - DNA, 1042 bp, Homo sapiens
tggatacattattccttcacacagtggattttgagtaactgaaccaaaggaaaaagaagctctttgctaaattaaggtcttttataaatttagtaaatcagtttataatctttaaagccaaaggtttttttagacttgaaagaaagagccacttaaattcttgtttaaaaataccaatttgcctcctccttcctcacttcgttaggttatggtagtgctcagacatctgcagtgttgaggccagtcactgttggaagtcatccaagaagcccattttgaggccattttgagccttactcttaagttctctatgaagaactacattgatttgttggctttcagaatcttttaggaaataaatcctctccaggacaaaaatgaacatgaatggagtggcattttgttccaagtcagaggtgggcacctataataaatgactagggttcactttctgggactgatgtttaattgtaacacagatacaacagggtggccttgttgtgtataatacggtattatacccgcatgtgctctagcaaggataccaaggcaagcatacatgtagctggcttgagtttgtaccaaaacagtccttcaactttgcactgtgccttaagtaattactaacaaaaggtactaggattagctgcaatctctactttcgatgaggaaatcccagtaagctttctgattcaagtacaatgctgccattttttaaagggccacaactatagaattaccactgttggaatttggtacaaaatatgttttgtctattgaaaacatacacggtaaatggtgttgttaggtaggttctgtccagttcttagggacttttttcacattatagcatttttaccctaaacatgatgttgagattattatatactgtattttcttctaaattaaccctaatgtttaaaaactcactttccccctttaattgaaggcattgttttgttagatgcagtaatgatgtttaccagagattattgtttcctatgcaaaataaattttcatattttgaattctgctgagtctt

SEQ ID NO: 9077 - DNA, 2332 bp, Homo sapiens
ggaagacagcggcgagttttctgaagagatgagtgctcagagccctcatgctgttgaggctaaagggaggcctggaacggtggggcgtttgactggaatggaccccagggactgtccaggtgcagcccctcctagtacacatgggcccccgaggccgtggtcctgggagccaggaagactccgcagtgggtgagaatgaaaacttgagactcccaagttctgggccagcccattgctctgggctgttttaaagcccatttcacgaggaacaaagatttacttcctgtcctgccattcgtgtgcttccatggacaaacctgatttttttctcttagttctaaagaatcttgggttattttgtagcggtgccagtatttcagtagatgggatttcagccaagtaggttcccctgtaacctcctacaaagcaatattccaaaggaacattttaactgtaaaggctggagacaagaaaaaataagtagatcgttttaataacaattatttaattgcctataagtttgctgtttcagaggctagcccaaaggcatcaaatttaataaagttaaacaaattgatttacttcagagcaaatatgatcctattaaaataatatagggtaaataccctacctcttagaaagggcaaaaatgcaaagaagctttctttaaaactaaaagggttttttggggggggagttggcggggaggaaataaggctaacagaggttgacctaaaattagccttacaaaggagaaaggaccacattgcttacttgaaacagacaatgaaaacaaccaaagtgatatataaaatagttgatgagaactagacttatgactgtagtttactagagtttagttttcagttgctgaagtagctcattttctcttactaatgtttggttcctcagggaagaatctcacttgactagagaggaggtgggaacagaagagagaaggaggcagggagatgtatttcttagggctcaccccttcacagactgacagaatggttttgttttgttttgttttgttttgttttgtttttgagatggactctagctctgtcacccaggctggagtgcagtggtgcgatctcggctcactgcaagctccgcctcccgggttctcaccattctcctgcctcagcctcccgagtagctgggactacaggcgcccaccaccacgcccggctaattttttgtattttttagtagagacggggtttcaccatgttagccaggatggtctcgatctcctgacctcgtgatccgcccgcctcggcctcccaaagtgctgggattacaggcgtgagccaccgtgcctgccccagaatggtttttaaagccacagttgagaggccacccattgcccggcgcctggacagtgatcatcttgttcatcttgttcagtcctttcttgtgtgattggaattattcatcccctttgaaagatgagaaggttgagatgcaaagagtctacctttccaagttctcactgctggaaagagctagaagcacagttcaaagttctggcttctggactctgcagtccaggtctcccttctcccacttgcctaccctcaatgccacactgtttttgaagtggcccataacttgaaggaaaagtttaaagacagttcaatttaatcatcagaatgcattcttttttttttcggagacggagtttcactcttgctgcccaggctggagtgcaatggtgcaatgacctcggctcactgcaacctctgcctcctgggttcaagtgattctccagcctcagcctcccgagtagctgggattatgggcgcccaccaccatgcccagctaatttttgtattttttttttttagtagagatggggtttcgccaggttggccaggctggtcttgtgaactcctggcctcaggtgatctgcccacctcatcctccaaaagtgctgggattacaggcatgagccactgcgcctggcctcagaatgcattcttacacatctatcctagacatttataagcactctaatggataacaatccaagaataaatgattgtaaaagatgatgccgaagagttgatgtcaatctttttttcctaagaaaaaaagtccgcgagtattaaatatttagatcaatgtttataaaatgattactttgtatatctcattattcctattttggaataaaaactgaccttctttaatcatatacttgtcttttgtaaatagcagcttttgtgtcattctccccactttattagttaatttaaattggaaaaaaccctcaaactaatattcttgtctgttccagtcttataaataaaacttataatgcatg

SEQ ID NO: 9078 - DNA, 775 bp, Homo sapiens
gaggcgtgaattcatggacccatcctggaatcagaatcaggccccacttctgcatcagaagccctgggtggcaccagcaagtgtttggcaagcccttgagaagcagtgtctttgagaacgtgacctgtgccccaggcaccagctttactccccgagcccagcaggacatctgcatataacacacagccgaagtcagaaaatatatttttggtgactaaatggagtacctggagtacaagataacacacacacacacacacacacacacacacacacacacacacacacacgccacctttgggagctcagcagccccgagaggatttgatagcttcaccgcttcacctggttttacaaatgcggagactgaggtttagggcagttaagcttcttgcttagcatcatgtaggtaaagaatggtggaaagatatttgaacccgacctgggcaattccacctctgagggctgtcctcagaatgaatcttctgatgggctgggcacggtggctcacgcctgtaatcccagaactttgagaggccgaggcgggtagatcactttaggtcagaagttcaagatcagcctgggcaacatggtgaaaccttgtctctactaaaaatacaaaaattggccgggtgtggtggtgatgcgcacctgtcatcccagctactcgggaggctgaggtgggagaatcacttgaacttgggaggcagaggttgtggtgagccgagatcacgccactgcactccagcccggggacagagcaagacactgtctc

SEQ ID NO: 9079 - DNA, 722 bp, Homo sapiens
accagacaattcataaaagagaaaataccagaaggaaacaaatattgaaaagtattcagtctcactcatcatcaaagacatgcaaatcacaaatcaagtcatctttttctgaattaataacccaaatgatggtacccagtggtgcttaggtgcggtaaaaccagcgcttgtccgatgcaccgttcgcgtggtaaactgacgcattcaggctcttgggaagcaatctgatgatatgtagtagctggttctgtaaatccacctttgagaatttaggcgaaggaagtaacgttctatatgtcaagatgtgcattgcagagggatttataaaggtgaatatttggaagaaataagagaatccacaatagagaccttgctaagtaaacggtggtgctcacgtatgatgggacattatggacacactaacagcactctttatgttggctgaaaatggcactgaaactgatgatagggtcatggttaaggaaagaatgcaagacccaaagtttatactgacaatcattgcagctatttgtaaggacagttttaatactaattccagcaatacatgtttttattccctgtcctggagtaggagaaagcctatattcccaggctgaatgttctacacatttaccactgtatatgcacatagggacagtgtaacctgtctataccaccgtagttccagtcctaactttctgaattctgtttaaagaccttct

SEQ ID NO: 9080 - DNA, 2614 bp, Homo sapiens
aatgtcccaagcagcctcttgccagcagtgcagagcctggttgtcacccattaaaggataggtctccccggagtgcacagctccacctgggagcctggcgcgtcatcattggcctgacagcagagagaattgagaagcatttctcccctgccccaccccggggctgacatttctaagcaagataggaagggagcactttctaggctaggagttgggtgcatttgtaccgtgaaaagcattcctcagttgtggcttaatgccagttacgacgctgcctttccggcctgctccagcaagtagctactggttcacgtgcagtttggggctgtgaaacctaggcagaaggcggctgtctgagggctgtccccgcctaggacagggtcaatcgaggaatgccagatgtgcacggtttttggcaaagtagggggcacatttccattatagcaatgttagtgccaccaccttctgaacacagtggggagggctgtgaaggctcatgtgacctggatctgaggtctctgatagaaatctggacgccaccgggtccaggcctggcctcagacttggccttgtggatgggccccttacagtatttgctgactagtctcatttttaggtgataaatttttctttaattcctttggttaaagatagtctatttcattggcatatctccccccagtttttgtggctcaaggctggaatatttatgccttaatatatctatggcagacatttaagaatgcgctttatctagctcatggtaactttgcaacgccttagattaaaatgacagtaaatattactaaggcagtattttgaatgagtttgacactgccggcttccttccatccagcgaggtggtgctgacagtgtggacttgagcacacttatgccaaatgataatgatactgacttctgttgggagctctccaaagaaactggttggttttaagaaaatagtttcaagaagttcaactatattcttttagatattatgtattgttttactctgattaggttactgtgataggcatttattcatattctttctataccactgtcattaatatattaaaaagatgtatgtgttagactatcgaaagggccttattctctctttctcatagactgaccttcttttggaatttctgagtcatttattttccttagctttttccactcaaattaagggcaagcgaaaaagtaataatttggcattctttaagcctacagaatgtgattctttcacttgtttattacactggctcgtggacagaacaatttgaaaagtgaaagaattattttggtaaaagattttgctttacttttcgaagcattatttttttaaagagtgttttactccaacgattgaaacattttcctatttaaatttcattgttagaatcacaggaggcaaaaaatggaacggttgaatgaaattttactctttctgtgaaagaaaatccacagagttgttgcctccgttgtagttggtgggccccgttagcattggatgcctttgccaaatggttcatgtggacacacaaaggcaaacagatctgccatcgatcgcagatttctgtagaaacacggatgtgcatgtgcagattcccttttgcaggtattaaaaataattaaaaatagtcctgcctgaggttgcagtgagccgagcttgcactactgcactccagcctgggtgacagagtaagactccatgtcaaaaaaaaaaaaaaaaaaaaaaaagtcctgccttaactaactcctctgcgcttgttcactagtaacctaaagaggctatattcattctttatgcaatgagggtatttttgagtgaattttaactgctctgaactaagtataagctcatgggcctgcaaaggttcagacggtttctcctttgcacccaggaggaactttggctgcgagaatggggggatgtatccctcatgcagttggcatccaggcagccctctgcagcagcacaccctgcaggcggagttttcagaggatgcaattttggatcccgaattttgatgtaccttaaacttccacatcactgcaccctgaaacagagcatgctttccagaaagtcacactctcagatctgtgtcaagttcaatgtgagccctggcaaggctggcatattaacacctgccttctggcttctgaaagtgagatttgtatatgggctgcactcacgcatatacgagttggtttatctttgtgtacatgactataacccagtgatgctgaggtcatgtgctggaatgctgtatttggaccacacatttcaaagttgccctatggaaatgaatcctacttagtgacaagtcatcaaatgtttgtcacatgtgatgaagacaaatatgtatacctggcatagagaaaaatatatacctggtacattggagaaaaataattacactttcaaagagaattccctttgcaattttatgtttggatcaccactgtaagcacactttatttgcatttgatctgtatttgtatatgctgatgcaatgataaaaatcactgtaatacttcattgtgttgtactggatgcaaagctagaaaatattgcaataaatgagaccgatgaaagacttctctg

SEQ ID NO: 9081 - DNA, 1936 bp, Homo sapiens
gctcatgccccacggagacttagcaggttccaggagtgagcgagggcagcggaaaggagttcttccgggggacacgaattgcctggctgagtagcaagaaagacacactcttaagtttcttggttcagagcaggaaaaccttcaaggagctgactgaccacgtagcatgggggcaagaggcgtgggatggggattggggtgagatggatgggagcccgctggagcttgtcttccctaacatagcctgggagaccaccccttgccacttgggccacttccgcctaccccacttttcattttgttccaaaatagttgcagatcctgacagaatcaaaactctctgcctcaaacacacatcctggcatcgcactgttagcatttaacttcttgttaggattcagggaaggaacagttggccaagaattttttttcttttaaacaagccaaccacctagctggtaattaatgaggttcacttaaaaaaaaaattcggtgcacacagactgacatgaaacctgggtgctacagtaaaagaaaacaaaagtccagtttgtgtctcttaatcgctcacttcaactcatttcttctaaataaactatttaatatcctggtcaggaaatgacatgttaatgctttgctccctgaagggggaaaaaatctgtcctttaacaagctattctgttttgtgtcaattggttcgtggcaggaagctattagaagtcaaacgtccagatgcattactgctatcttagtttaaagggggaaagaaaagggaagaagaaaggaaaagagaaatccaactcctttttcatgttttgcttttgaacaatgagggtttgtgtgacaggcattcctctttgctgagatgatagcaatggcctgagattttagcaagctcctggagtctgatgcttttgcagtactctgatcgcaactaaacatttgtctttgttttattagaaactagtgaaacaaagcaggttgtcccacatgtataaaatacagggcagctatttagttttctttacagagaatgatccttttaaggcttgtaaggccctctggtttggacaaaaaccctcagtagagacaagcgggaaggataattagctgaaagctatgatgatataaataaaaacagctctctatcccaatacgcacctttgtattttcaagaactcttctatttattaaggaaaatgtcacattgtgatgtattaagccagtacttcaattacgggttgacttgggatgacatattacatgctgtagttaacatttataattctttttccttgtttgagtatttctgtctctgaaataaccttttacttggcttttctagatagctttatttgatttcgagtggcaaaatgttttttattacggcttttctattgctgtatgatacagaactcttttggcataaatatttgtgttcccagtacctcacttgttcggatttgactgcctgtatatgttttgtgaaatggtcctgtttttgggtaggtgacacgtggactctagtatgtaaatgttacttgaatctgtgcttcataatagtgtgtggcatgtatgtgcagactcttggatgctttatgcctgcgcagcaggagccctgtcctcacgttcccaggagggcggcttcacccttcgtaaccaggagacaaggcggccatggatttgcccttgattctattttgctaatggaagatagaaaggagagaaggttttttttttttttaacattctgaagatggtgctgtgtcaagaaggaccttttttttcccctctcccctattttttaagtaccttggaggaggagaggttggtgacatgcatggtggggatctatggcctctggtgctttgtcctgtatttggtttaatgtttttgtcctaatctcttcaatcaataaaattgtgcgtatttaact

SEQ ID NO: 9082 - DNA, 1465 bp, Homo sapiens
ccgcctaggggctgccggcccctctgcctcccccgcacctcgctcccttcccttccccgcacccggacttcgcagtcagcggttctcaacctctgccccgccccgccacgcgcgtccgccgccggtggcccgggcccgggctgcacccccgcatccccaagccagcggcaggaagtctcaggaactgccccagggccgaaagggcgccgctgcgagcgcctggctgacagccacagcggtggtgacggtgctgggagaccccgcgtgcgctttccccttgagatgtaaaccgggaacggggaaggggctgaggggagaaaggacatggccttccccgcgagtccatggccagtgactgtggcccgactcgaaaacaaccctcttctcaaaagggaccatcaccgccccgagcgtgcgcacacagaccggtcggaggcgagaactggtctctacagggcacagttcagctcctctgtggatgcgtccccagatcgcaggatttccaagaaatcgagcctgtcccttgtgcacttgggaataattccccaagacagcacttcgggattccgggttatcctgaggctgcccgggacttttccagctctccagccccaggtctcctgacattgtgttccaggctgcgggctaagccagacagtgtttgcctccggttctttccaccgtgggaagcgaacgccacccccacccgcctttgcctgcgagtctccctcgctggcagaagggaagccggcccggtcccgggaggaagatggcgctgcgaattcggtgaggacagccggccccgcccccgacaaggagctcgctcgttcacctggtgtctgggaacttgaatgtgtgaagggcgcttattgttctgaacccttgattgctccctcctcgggctgcatttcaaaaatagtcatatttttaaaggagttggaggagagggagggggaggacatggcaccattccagaaaccagcattgttacaacaccatagccagtatatttagtttggcttttcctaacatagaaatcttcaaagctggggaagtggaaataaagttttaaaaatgagagagcagttttccaactatgtcaacaaagcctatcgtgttgatgtttttattgaccattttagcaacaggctaataaaatttcaaattgaaatttttattttcatggctttaatccatgatagtttaaatactgggggccattaagagtggatgtagctaagagcttagctaacattgccttttcactctatttttctcagatattgtaagcattctgtttttcaatattgtagttaattttttggctttcaacagcagccctagtaatggtggagttgttaattaatgtgtatattgtactgaatttctgtcagttaaggggttcactgctttggtggaaattggtggaaattgctagcaggttccacgatgtttatttttttct

SEQ ID NO: 9083 - DNA, 194 bp, Homo sapiens
tttttacatttactgaataagatttgagtaatgaaagtctgtagtcttaaaactctaaaacagttgtactgcttccaagcagcagtatttatagtaacgtaagctattaatgctaactcttgcatgtcaagaaacattagtcttaggaattcttcaaaaaatggcatcccaatgaaaataaatttgatgactat

SEQ ID NO: 9084 - DNA, 909 bp, Homo sapiens
acgcttctcaaaactggacagtcactgccactttgcacattttgattttttttttaaacaaacattgtgttgacattaagaatgttggtttactttcaaatcggtcccctgtcgagttcggctctgggtgggcagtaggaccaccagtgtggggttctgctgggaccttggagagcctgcatcccaggatgctgggtggccctgcagcctcctccacctcacctccatgacagcgctaaacgttggtgacggttgggagcctctggggctgttgaagtcaccttgtgtgttccaagtttccaaacaacagaaagtcattccttctttttaaaatggtgcttaagttccagcagatgccacataaggggtttgccatttgatacccctggggaacatttctgtaaataccattgacacatccgccttttgtatacatcctgggtaatgagaggtggcttttgcggccagtattagactggaagttcatacctaagtactgtaataatacctcaatgtttgaggagcatgttttgtatacaaatatattgttaatctctgttatgtactgtactaattcttacactgcctgtatactttagtatgacgctgatacataactaaatttgatacttatattttcgtatgaaaatgagttgtgaaagttttgagtagatattactttatcactttttgaactaagaaacttttgtaaagaaatttactatatatatatgcctttttcctagcctgtttcttcctgttaatgtatttgttcatgtttggtgcatagaactgggtaaatgcaaagttctgtgtttaatttcttcaaaatgtatatatttagtgctgcatcttatagcactttgaaatacctcatgtttatgaaaataaatagcttaaaattaaatg

SEQ ID NO: 9085 - DNA, 1044 bp, Homo sapiens
gctgatgtcaatgctatggactgcacaaaagtctcaatgttccattcagtctgcagctattcacacacacacacacacacacacacacacacacacacacacacacaaatattgcttggactacctataaatggacttgcttcttgtgtttgaaacactcgtgtgcatgagaatgtcatttgctaatgaattttaaaagcatatataaaacaaaacaaacaacctgccacaatgtgatatgtgtaatatcatttcataaaaatccctcttcctccaaagcctgggcagaaatgtgctgcaaagagttatatgacttcttgttcatgttttgctaatgctcgtatctccttgattacataatgttagtagcactgagacccccatggtaatgtaacttaattataagctatgtcactaccctcctgtaaaatactattggacagacacagagggacccttggctcctgtgtctggtccacacaccacagaagcttgtattatcagtgaatataaatgtactacatttgcatgccttttgggtttgccttaattcttacctcatttgcatcctatcgatctggaaagagctgttttggatgaatgcagtataaaatgtaaaaaccctgctaaatgacttattgattaagtatatctatctatatatacatatacacaaagatattatttatcgaaagtaaaaaagatggaagtgtattggtttctgtttgaattttcaaaggcttccaatgtggtggcaataaatgtcccaaataaatttataacaattgattttccccctaattcttattttataattttaaaattgcagcagttgctagcaacaacttactaaatctactcttaaatatacaactttggaatttgaagaattaatgacaacaaaagggaaaaaagcaactttccaacttttcatccaggctcccaaaagagggacaacgaacatggcatgtgaaaagtaaaacagatttgttcattccgaaaaaaaaatgttcattctatgacaataaattttatctcagtgtg

SEQ ID NO: 9086 - DNA, 224 bp, Homo sapiens
aatttaaaacacttaggtataacttaactattttagtactatcagcaatagcagagacagagggaaggtatctagttcatgtgtggtaaaaattttaatgttctctgtgtcatgaaacacttgccattttaatcaaagttgtaatttttaaaaagtcacctaaaactctggttttaaaagatcctctgtattgaaaacttctgataatgtatgtcattatgtcc

SEQ ID NO: 9087 - DNA, 473 bp, Homo sapiens
gcgggggtgtttgtgcctgtttctcttatcctttcccgacattaggttaacacagctttataaacctcagtgggttcgttaaaatcatttaattctcagggtgtacctttcagccatagttggacattcattgctgaattctgaaatgatagaattgtctttatttttctctgtgaggtcaattaaatgccttgttctgaaatttattttttacaagagagagttgtgatatagtttggaatataagataaatggtattgggtggggtttgtggctacagcttatgcatcattctgtgtttgtcatttactcacattgagctaactttaaattactgacaagtagaatcaaaggtgcagctgactgagacgacatgcatgtaagatccacaaaatgagacaatgcatgtaaatccatgctcatgttctaaacatggaaactaggagcctaataaacttcctaattcagtatgg

SEQ ID NO: 9088 - DNA, 1383 bp, Homo sapiens
gggccgcgcccgtcgcgcctgcccctgccggcacggctccccctcctggaccagtcccccgcgagcccggagaaggggagacccgtgtcccacaaggaccccaccggcctgcctggcatctgtctgctgacgcctctggcttgcgccaggacttggcgtgggcaccgggcgcccccatcccagtgtctgtgtgcgtccagctgtgttgcacaggcctgggctccccactgagtgccaagggtcccctgagcatgcttttctgaagagccgggcctcagagtgtgtggctgtgtgtctgttcgactcccctcgccccattttcaccccacccccgcctctgatccccgggggcgagattggcgcgggagtgtggccgcgccccatcagatgttcgcccttcaccagcgggagcttgatatcccttgtctgtaacatagaccccgggtactgcgggaggggagggctgctggggaggatggggggatgttatataaatatagatataattttattttcggagctaagatggtgttatttaagggtggtgatgggtgagcgctctggcccaggctgggccagactcccgcccaagcatgaacaggacttgaccatctttccaacccctggggaagacatttgcaactgacttggggaggacacagcttcagcacagcctctcctgcgggccagcccgctgcgaaccctccaccagctaccggagggaggagggaggatgcgctgtggggttgtttttgccataagcgaactttgtgcctgtcctagaagtgaaaattgttcagtccaagaaactgatgttatttgatttatttaaaggctaaaatttgtttttttattctttgcacaattgtttcattgtttgacacttaatgcactcgtcatttgcatacgacagtagcattctgaccacacttgtacgctgtaacctcatctacttctgatgtttttaaaaaatgacttttaacaaggagagggaaaagaaacccactaaattttgctttgtttccttgaagaatgtggcaacactgttttgtgattttatttgtgcaggtcatgcacacagttttgataaagggcagtaacaagtattggggcctattttttttttttccacaaggcattctctaaagctatgtgaaattttctctgcacctctgtacagagaatacacctgcccctgtatatccttttttcccctcccctccctcccagtggtacttctactaaattgttgtcttgttttttattttttaaataaactgacaaatgacaaaatggtgagcttatgatgtttacataaaagttctataagctgtgtatacagttttttatgtaaaatattaaaagactatgatgatgacattt

SEQ ID NO: 9089 - DNA, 65 bp, Homo sapiens
cgcgagggccggggagggggcagccacgcggccgaggatccccagctgatgagcagcagcgggcc

SEQ ID NO: 9090 - DNA, 954 bp, Homo sapiens
tttttgatagactaagtggaaaatttgcagagaaatgatggttgtaagtggacatgcaaaccaaaattggggattggagaagtcagactcactagacttttggttcgagtactattgaactctctcctgatgagaagatgtttagataagtacaagttaagaaagtagcatatgactggaaactatattcagtgcactttctccaaaagactacccagaaaaatagacttattttcaaataccagttatcaagatatattaaatagctgtattgtttagaatcttaatatggtataaattagcatatgtattcacaatattcattcagacatcattcccagacagcagggatttatttaaatgttagctgtctgagtttttaaatagctaatacgaccgggtacagtggttcatgcctgtaatcccagaacttcgggaggccgagacaggcagatcacgaggtcaacagattgagaccatcctggcaaacatggtgaaaccccatctctagtaaaaatacaaaaattagctgggcgtggcggtgcgcaactgtagtcccagctactcgggaggctgaggcaggagaatctcttgaacctggcaagtgtaggttgcagtgagctgagattgagcaactgtactccagcttggcgacagagcaagaccccctctcaaaaataaataaaataaagtaaaataaatataaataattgtggccgggtgcaatggctcatgcctgtaatcccagcactttgggaggctgagatgggaggatcacttgaagccaggagtttaaaaccagaatgatcaacagagtgagacccctgtctatatatttttttaatttaaaaaataaaagaataaaattgtgtagctcagtatagtatcaagattaatctgcctactcacatttctacactttataaaaatgtaataaaagaaaattatctttct

SEQ ID NO: 9091 - DNA, 615 bp, Homo sapiens
atgagcttggggcagagggcgaagctgacctgcacccctgatgtggcatatggagccacgggccaccccggtgtcatccctcccaatgccaccctcatctttgacgtggagctgctcaacttagagtgaaggcaggaaggaactcaaggtggctggagatggctgctgctcaccctcctagcctgctctgccactgggacggctcctgcttttggggctcttgatcagtgtgctaacctcactgcctcatggcatcatccattctctctgcccaagttgctctgtatgtgttcgtcagtgttcatgcgaattcttgcttgaggaaacttcggttgcagattgaagcatttcaggttgtgcattttgtgtgatgcatgtagtagcctttcctgatgacagaacacagatctcttgttcgcacaatctacactgccttaccttcacttaaaccacacacacaaggtgctcagacatgaaatgtacatggcgtaccgtacacagagggacttgagccagttacctttgctgtcactttctctcttataaattctgttagctgctcacttaaacaatgtcctctttgagaaaatgtaaaataaaggctctgtgcttgac

SEQ ID NO: 9092 - DNA, 2576 bp, Homo sapiens
aggaatgctctagtgagtttccacttcaagtagtacccactcataagccgggggggcagacccttctgtctaaacacatcttttatttgtgttccagcaggtgcaacaggttcaggtgtttgctgacgtccagtgtacagtgaatctggtaggcggggacccttacctgaaccagcctggtccactgggaactcaaaagcccacgtcaggaccacagaccccccaggcccagcagaagagcctccttcagcagctactgactgaataaccacttttaaaggaatgtgaaatttaaataatagacatacagagatatacaaatatattatatatttttctgagatttttgatatctcaatctgcagccattcttcaggtcgtagcatttggagcaaaaaaaaaaaaaaaaaaaaaaaaaggagtttgcttttgtcgggagattgaaagatgtttttgtttctttctttgtaaaggccttggatattgaaaaaataccaaggcagaacagttggacaatctatttcttgagccaaatttaattattcttatttttgtaatcagtcattggcttcttatctggatgaaggcttttggaggagaaccaaaacgacaagttccaagaagaagatgaagctccgcctccgccgcttagtcccaaccctgcccaggaagaagggcccgtggggctttgcctgtgcccgtccaccaaaggctgtcatgtgtctcgaaatcagcagccctccccatcccaatcccaggcagcttgtgtgtacaatcagcttctctagcaactctgtatctgttggcttcaagagaatattttgcctccacatatgtaccccttctcctttttttaaagatggatttaaaccaagatgcctccaggaaagaggacgaaatgagtatattcacagaggaatccaaaaaatacagtttgggggaaaatgcaataatttttgatgagatgggtgaaggacaagaagtgagttgtgtcaattattgtagatacaattttctgattaaatctggaaaaataaaaggcagcctgttttttctgcttttattgtattaacagctgaggtagctaaagttatttaaaataaaattaaatttatgatccaagtagcttatttttccctttaaatctcattgtaaatatatttgatttcttgtagaaattgatttccttctgtttaattttatgcttttattatactcttgatttttctaaatttgtgtgtgaaatataacattgattgaattgcagttacatttggttagtaatatttcattattttaataactgtgatgtcatgtatggatttactttggggttcaaatcaaaatgtcactgccagaaagagctgttccagctgatctagagcatactgccctagagtgtccctgggatcatctgaacagaagtgcacaggctacttgtacagagaaaaaattaatactcaaaggaaatcttcattttttagattgactttgggaatttgaattttcatcagtgcaaatataaatttctctatcctgctctgaggctaattggtaccatattttccctttgtgtcttgtgactctgccacatcccatctcatcctggcctctgagtcaagaacccagtgaactgactttctagttctagaagttccgctgcaaggccaggaaagcttgagaaaggtattgtggaagaagcaaaggtagacccccatcactcacctttgtctgcatccctgggcctgtgaatgatgacagcacctgacattctgcaccagctacctctgcctccatggcagagaaaaggccataagaacagtggaagaggagcatggactcagacttcaaggaagaagccatttccccaggtccttccttctgcatctcaccacccctagttacaaataactccattgaacagcatctattcagaaactatgccgaataaaaagattggtggaagggctcatgtggttagcaactatgaaacagaaataggacactcagttacaaacattatctcctttagtttttcagaaaatgcatccctgatttcattcatttccagcttgaaagccagccatattactctagtccctaccaaactgctctagaaggtcatttccattttgtttgtgatatttagacgcgcagacttcaggaagttcacctttaacttcagcattccagatgaagtttcctgactcagtgcttttgcataaggaactagaaaaaaaaagtaaggaaaattggagatgctaacatcctcccccatcccaactgcaccttaaaatatgcatgtcaccttcaaggttttataattgcactgtttgttttatgtatgtacagattaaaattattgctacatttgaggaaaataaaattgcttgcttctatgtaattcctgtcattccacaggaaattcacttttccagctactgaatagaatttgtttaacaacctcatgggttgcctcttcatttacagggaagaaatgaaatgtacatctgcagaaattgccaaagcccaaattaacgagtattataaaaggataataaagcatccctgaagcc

SEQ ID NO: 9093 - DNA, 562 bp, Homo sapiens
aaataaatcccccctcccctgccaggtgaaaggaaatattgcactttctgttctcatgactaaggggacaggagttccagaagaacctttcaagatgatcaggaacaccaggacgagggccgtctcacctcactcggaccacatggagacctcccttcaaaatgggagccatgtcctgccccaccaagccctgtctgaagtggagcttccccgcctgtgctccctccacagtcccggaaagcccagcggcaaaggcagctttgtcccagctctgccaccctcctgctcacagtggtcagggcccctcaggggcaaggacggcagggattggaacgagggctctggaaggactgttcagccctatgcctaagacccctatgctggggacactacaggcacacacaggaatagcagggccaccctcagagctcacacatccacgaacaaatgaaggctgaggaggtttctaaacctaaagtccatgagtgtgcacttcaatccaggaaggtcgggacttccttcagtttcaaaaaataaattctcccttccggtttggactgtt

SEQ ID NO: 9094 - DNA, 2388 bp, Homo sapiens
gcattctcctgttccatcagttgccatccactaccccgttttctcttcttgctgcaaaataaaccactctgtccatttttaactctaaacagatatttttgtttctcatcttaactatccaagccacctattttatttgttctttcatctgtgactgcttgctgactttatcataattttcttcaaacaaaaaaatgtatagaaaaatcatgtctgtgagttcatttttaaatgtacttgctcagctcaactgcatttcagttgtattatagtccagttcttatcaacattaaaacctatagcaatcatttcaaatctattctgcaaattgtataagaataaagttagaattaacaattttattttgtacaacagtggaattttctgtcatggataatgtgcttgagtccctataatctatagacatgtgatagcaaaagaaacaaacaaaagccaggaaaacactcattttcgccttgaatatgtaaatgggattaattttgtcctgtgccttatgtggaaaggaacttctttggttttccttttttgttctggtggaagcatgtgcaggagacatatcatccaaacataaaccattaaaatgtttgtggtttgcttggctgtaattttcaaagtagttaattgaggacaaagggtaatgcagaagtgatagctttggtttgctgagtcttgttttaagtggccttgatatttaaaactattcctgccaccatttcttctccttggccacttcttccttgcgtctccctgcatgctgctttatttgcttctccctccccaaccacctcatggtatatttaagagtgaaagggacaaactagtaggtttgtcaagtttaatataaagcactgatgtaacttgctaggtaaacggaaagataagttctaactgcctactatccaatgtcagttaattggtgtcttcccccctcatttgctctcttccctaaaatgtgtcccagatgccttcatttgctgttttacttctatgttctgcttttcctcctctctttgttcccttcctgtctatccattgagtttatgaaatggaagagttaactgcatgcactagtgtttggagggtgttgtggtttgtctttctaattaggtgtatagcctattcactttcctagaataaatctcttaacctaaatttgagtagtctgcattttggcaactcctctagcagcttggtagcctagtacaggttgtttttttaaaaaaggaaaagcaggaaggaggagtgaattttattaacatgtttgccaaatgtattgagatttggcctctgaagaacactttttcagtgttaagtttctttaccttaagattcagaaatactttagaatattattaattttaagtcctgtctttacatccttttggaaaacttgtattaccatgggtttggaaaaaggacaacgaaaggcttttcatgtaaagataagatctttagctatctctaaccctgtccttttttcactgcattttttctagttttgcttcattgcttatcattaggatagggtaagtgaagtttgctatgctgctagcatcctaagatgatacctttgttgaaagaattgtgaatagcatgattcatttctagcagaggctgagtttaggacagcagcttccattgagaagtctttctgtgtcgtgaatagcattttaatgacctcttggctcacataagcaaacaacatagggacgtatctgctatgaaaatccacaaatttttcagatagtgccctaaaaacaattttatatgcctcactggttgttattcttaggttattcccacacttgactttatcattgtttactactagtaaaaagcagcattgccaaataatccctaattttccactaaaaatataatgaaatgatgttaagctttttgaaaagtttaggttaaacctactgttgttagattaatgtatttgttgcttccctttatctggaatgtggcattagcttttttattttaaccctctttaattcttattcaattccatgacttaaggttggagagctaaacactgggatttttggataacagactgacagttttgcataattataatcggcattgtacatagaaaggatatggctaccttttgttaaatctgcactttctaaatatcaaaaaagggaaatgaagtataaatcaatttttgtataatctgtttgaaacatgagttttatttgcttaatattagggctttgccccttttctgtaagtctcttgggatcctgtgtagaagctgttctcattaaacaccaaacagttaagtccattctctggtactagctacaaattcggtttcatattctacttaacaatttaaataaactgaaatatttc

SEQ ID NO: 9095 - DNA, 511 bp, Homo sapiens
tagatccagaagaagtgacctgaagtttctgtgcaacactcacactaggcaatgccatttcaatgcattactaaatgacatttgtagttcctagctcctcttaggaaaacagttcttgtggccttctattaaatagtttgcacttaagccttgccagtgttctgagcttttcaataatcagtttactgctctttcagggatttctaagccaccagaatctcacatgagatgtgtgggtggttgtttttggtctctgttgtcactaaagactaaatgagggtttgcagttgggaaagaggtcaactgagatttggaaatcatctttgtaatatttgcaaattatacttgttcttatctgtgtcctaaagatgtgttctctataaaatacaaaccaacgtgcctaattaattatggaaaaataattcagaatctaaacaccactgaaaacttataaaaaatgtttagatacataaatatggtggtcagcgttaataaagtggagaaatattgg

SEQ ID NO: 9096 - DNA, 6788 bp, Homo sapiens
taatctttctttgggcacaaagaagtactgtaaataaatgcttgtaaatatttcctccatcaccattgaactagactgatctgcttgacagacgtgggatctcagtatggtacttggacagcaggaatgatacatataatctgaacttgggaaattttggacctactaactctaagcctattttattttttataaaactatgtgacattttggttgagcagaatgtacgttagaccagcaaaatgttcctaatggttctaacttcgtgagtttacaatgttgtgattcatgcagggttaaagatgctttgtttttattttttaagtaccaaaattggtttcagaacactgataacactcagaaaaccacagtgtgttttcatatttggaactttgtaatagcgggagtagcagtagtccaaacctagtatagggaaaggataaaaataagtcaccttcaccaagagatgccaatgattaccaaacaacagacagttgccaaatactggtttctctttcccctgaaaatggcttttgttctcaaatgataagagagctaatacatttagctaatattctagctctctttattatggaacagatcttgatagatggtttaattttctcctaaagagaaataatcagttgagaatttgagaatgggttgtaattatcgctcacccattgggatggttcattgtttaaatatggcattttccccccttcagctgcaggttcctgagatttggtgcctgtgagctctgattgtaggaatgcatgtgacagtcccagtcctatggtaatgacttaggaggaatgcagataaaagtaccttgtaagataaatataaattggagttaggaatttcatgaacctcactatgaccaaaattaattttttgattcagtttgtctgtctgtctgtccttcccctctcttcttttttcagggtgaggtgctgtgtttcttatttcatacgagataaaacagagagaagttctctcttctccagcttgtccatttccccacttgaagaaaacttttgatatatatgccttactgagtacatgccccctttaatgttaacatgacttggagtaatttctgaggtttactgacaaacataaaaatccctttaattgtagtgtagttgttctataaaccatattttttcatgatgtggatattttcttctatttctttgtcttcatttaatttggtggtggtgaactttacttgctgattttcttttatttttcactgaatgaagtttgtgcttgaatgaagagtgtatcttaaaccccctttttttggacaggctgcacttggataaaataggcaccactgtgttgatatgtaattaaattcataactatttatgaatgtgaccattgttaaatttaattatagtgtatttctttcttgaatttcagtctgctgctttgtaaaaaataactgtaattgatatttcatttttaaaatttataaattccaatcattgtcattcaagttattagaaatgagtcacggcactaactcatggttctatactcattttaagaaattgtaaaggttgaggtgtatttggtgactttctctgagacacagatgaacgttggaaatagatgagaaatggatgcagaataatgcagatagtgatcccatgtttgttaattgccatcatggaagtcagagaattaaccaattaagtgacggtaactattttttgtataccttgttctttgtgatctataaaattaaactggataaaatgttaattgggggtagggaaaaagctttgttttaagatttctaagctaattattttaccgttttgttgaccttgtacacaagaatgagattaatctgtattatataagaaaagaactgataaatatttataaaatgacaaacttggaccacaggctttcttgaccttgtacagtatagtaaaaataccctttacttctgacattttaaggtcacgtcctatagtttgggggcccttttacttcaaaggtgtgtttctgccctcttttggttgtatcaaatttatttgaaaattgttttgtgctgtactttatgacttgtttccctatggtggtaaagaatgatgccatagtcagttttattgacattgttagatgaaagaaaagtagctgtcaacaaggggaaagtgaaattgagcaattcactgtttcaggatacttgaggatctttagtgtactgctgactctttttcttgttttgtctgccattcttgaaagtgcatcttgagagcccccatttgttgtgtagagatatagcagctgaagcaggacttcattccagatagctgtgtgcatttatgtcatgccaattactataacatttccaaagtatgaaaggtctttcaggcttatgcatgatattgtgggtgacttcatgccccagcctttctccccagcatacagtgagctgccttttggggagcaatgccatgataaggagcatacgtgcatgttttccgtactttcagaatagagtgccttagctaggccagaggctcgtattgtgtttctgctgaccaaagttgcatacacctgtaagaagtgtctttttaggttatggtattaaaaaagtcgtttcaggcttatcagataataattctcctatatttgaggggggcatgggataaaaagatttaataatacctggatagagaatgctaatgctgccttttgtgatcctttaatattatccatgcttttataaagtgcagtacacattttgacattgccacagtttacagtgtcattcttccacgaataggtaattgatagagtttatgggtcttagtcttaagggtaacagagtgaataccttccaaataaaaagctaaatattcctccttgtcattttaatgtcattattgaaatacttttaattctaattttcaaaagaaagctaaatgctgattgtggtttaggatgttacagtactaataccatcatgttatttattctaatatagaggcattgagaggaggggagtgtatgtctagagttaccccaattctaaataggtaccaaaagagtattgattatgacctggagcctgagctttgggagaatatacaaaggaaaaagcaggcatagtttccactttaaagggaagaagggactttaacatcctatgaatttgaaacatcctatgaatttgaaagtttcctaagtgttgttttcaaagaactggtttattttatagtcagtcaaaatgcatttggaatgtaccttgcttccataacagactttgactctatgacctatgaagaataaaaagataatctgaaggtgtttgagtcagaggctacttttcccctttatattttatatagaagcctatttgtaattcttcctcttcgttcttcacctgggtttcctcttatctacccaccacctaggacagaggctgcccactcaggtcttgccttgttgcccctagatgttgccacattcacatctccttgatggccttagatctcttgactagtcaaggactgggaacgtgccagggggaacaaagtaagcttgatgggctggaacttttgactttgggtccccaaacagccaaaaacagatacagaaatctttggttgtgtggatgcctgtgttcagagtggccttatcttgacctcagttctggatttaagtactctatagaaaatttgtgaagtcagaccagaattttctttgtcccatgaggtgtctttgtaagtcagcatgctcttgcttgaacaccctgtgggtgaataactttagtaagttagctgccagcattagaaccttccaggaagaattttaactagtatgctacatttgaagcactctgacatgtacatttaaagtgacagttttaaaagtaaaatggtgttaaatctctgaaacttgaacgtatgatgctctggacattttaggaagcttaagtaaatttctgattttcctttattgattatgtaacccacgtgatttgcatattttagtttttatgtttgacagtggtacaaatgactgacattggcaggcagttattgtagggtatatggttaatcacgattgtctaacttttccagagaaagtggtgatatgcttcttccttgcatggagctgtgggaattggatttgttggctcttcatttccagtgtttctacagtgcagaataaatgtaactttttaagcctgcatgctagtaatatgctttgctctttagtaaacaaatatgcaatagatagtaatctatctactttttttaaagcagggatctgctccctatctagacagatcttttaatgcattaatatttagagtagcaaaagaagttttgccatttgtagctctctcacaggtagcttaagcgagggggttgtgttgcatgtgcttagaaaggccaggatcccagaattggaaggtgccacatatacttttagaatattttaacaaaggcttgtctctaggaaaatccacttggactgcagcaggattgttctggtcttccacagaccattcacatggtctttctctccagagaatcattcttagaaagccaggctaaatcagagtagtgctgtttttaaagcaagtatattggatgatggctatagggtaccttaatgctgtgttgaaattggaagcagactgctcttcagcagcacatatactgcaactgaagttagagacagtactgaagacgagggagtagctaaatgctgtggatatttcatgtctgtttggctaatgtcttctcttgaggagtttctatgggtagcaattaaaattagaatttattttaaggtttttattaaaatatatacaatttgccataaattctagattctgatattcttgacaagcactttttgaatatctcaagagtaagttcttgacctggaacatatatagttagtacttgatgtcactaaccaagttgtagaaggagcctgttataattctgcaagatctgtgaatagcattataaatctggggcaggtgcctgtaatcccagcactttgggaagccaaggcaggtggattgcttgagcccaggagttcgacaccaacctgagcaacatggcgaaaccccgtctgtaataaaaatacaaaaaaattagctgggcatggtggcatgtgcctgtaatcccagttactggggaggctgaggcaggagaatcacttgaacctgggagatggagattgcagtgagcagagattgtgccactgcactccagccagagtgacagagcaagactccatctcaaaaaataataataaaaataaacaaatctgtttaaattactgttgcctttcagcattagactttgagtttaataactacaaattgagactgctcacaatattaactttttttgtaggttattttgttgtttagataacttgcctccctagaggagcattcaggagataaagacctagctacatgtaatgatatgatcatttcaaaaatgtgccaagaaagcaaaattcattattgaactctaaatttctgggtgtttttttttttaaagtagcattttctctgggtaaagggaaaggcaatgaatgattgccaacatgtaaactccctgctgcccgccttcccccagtcccctccatctaacataatacagtaaatttgtagccagttgtagaaaaagaaattgatatctttctgagtaaggtttcatgccctgtgactaagaataggtggaggaatcatggccaaatcaaatatgaattgtttagcttggtcctgttgcagttggctttctgtagtgttctgaaacaagaggacgattccattccttctcaggaacctagaaacaacaccgcttgagcaactggaatatgtttgctgcaagcagaatattttggggagaggaagagtagtttaattcaagtagtttaattgaacatattagtcattggtctgtctgggacgtgcagtgttcatagtagcaatgtatgtaccatttattttatctggttgtgtgtgatgtgtgtgtatgcctatttaatatgtacacatatattcactacatatgtatgtatgatatattcatatatacatgcagtctgcttgattatcagcaaaatggtcagcctttatcagatagtttcttcatgtggagttcatctgcatgtggcccttactctgaagcctcttcctgatctggagccacagtctgtctgtcttccagttcatctcagtcctcgagaaaggccctttaaatatgtcactttcccattttcctttaaccatgggttgtgtgagccagaaagagctttgagaaagatggctgcttccaccagggtggaggcttctaggtctgcatgatgatggggcccgtttctggccagagggtggctctgggagcagttgtgctgcgggcttgctgggggagaactctaactgttgcagaaacagagcttcatggcttgcttaaattacttagctggaatattttaaagtgtcagataatgtgatgtacaaagagagtatgccgatgcatttcattgtttttgcattatctgtatcagtgtttcccattgctagcccgaataatcaagaccagactgtttcttgtcactggattctggaagccttgccctttcaactggatttatgtttgtttctgctgctgtgaaaccccaaagtaatgcagtaggttttaattgaaaattgtttaattctattattgataattatttattgtaataaaagtaaaagagtaatttttaaatccttttaattgttt

SEQ ID NO: 9097 - DNA, 193 bp, Homo sapiens
gctggaccgccaaaggctgatgtgttagggctggcctgatgctggtgtctgtgccggagccagctcatatcacccactgggccgcacctgggcctgctctctggattttccagggctgtctttatagcctgtcgaaataaggagccagaggagttacctgtgtcctgcattatgattaaagccttttaaagtt

SEQ ID NO: 9098 - DNA, 1267 bp, Homo sapiens
ctgccccgaggggcctggagcacctgggggcgcgggcgggggacccctgctgggaggccaggagactgcccctgctgccttctgcccagtgggaccccgcacaacatccctcaccactctcccccagcacccccatctccgactgtgcctgcttgcaccagccggcaggaggccgggctctgaggacccctggggcccccatcggagccctgcaaattccgagaaatgtgaaacttggtggggtcagggaggaaaggcagaagctgggagcctcccttccctttgaaaatctaagaagctcccagtcctcagagaccctgctggtacccagacccccaccttcggaggggacttcatgttccgtgtacgtttgcatctctatttatacctctgtcctgctaggtctcccaccttcccttggttccaaaagccagggtgtctatgtccaagtcacccctactcagccccactccccttcctcatccccagctgtgtctcccaacctcccttcgtgttgttttgcatggctttgcagttatggagaaagtggaaacccagcagtccctaaagctggtccccagaaagcaggacagaaagaaggagggacaggcaggcagcaggaggggcgagctgggaggcaggaggcagcggcctgtcagtctgcagaatggtcgcactggaggttcaagctaactggcctccagccacattctcatagcaggtaggacttcagccttccagacactgcccttagaatctggaacagaagacttcagactcaccataattgctgataattacccactcttaaatttgtcgagtgatttttagcctctgaaaactctatgctggccactgattcctttgagtctcacaaaaccctacttaggtcatcagggcaggagttctcactcccattttacagatgagaatactgaggcctggacaggtgaagtgaccagagagcaaaaggcaaaggggtgggggctgggtgcagtggctcacacctgtattcccaacacttttggaggctgaggttggaggattgcttgagcccaggaatttgagaccagcctaggtgacatagtgagaccccatctctacaaaaaataaaaaattaaccaggtgtggtggcacgtgcctgggagtcccagcgacttgggaggctgaggtgggaggattgtttgagcctgggaggtcgaggctgtagtgagccctgattgcaccactgtactccagcctgggtgacagggcaagaccctgtctc

SEQ ID NO: 9099 - DNA, 2720 bp, Homo sapiens
ggttccctggaggcttctactgccacccgggtgctccttctccctgagactgaggccacacaggctggtgggccccgaatgccctatccccaaggcctcaccctgtcccctccctgcagaacccccagggcagctgctgccacagaagataacaacacccaagtcctctttttctcactaccacctgcagggtggtgttacccagcccccacaagcctgagtgcagtggcagacctcagctctctggacccctcctacagcactagagctaaatcatgaagttgaattgtaggaatttaccaccgtagtgtatctgaatcataaactagattatcatagttatctagtttatgagtcataagctagatttgattcttcaaagaagaaaagtcagtgagcaaatttaaaccagaactaagcattatattttctttttttttttttgagacagagtctcgctctgtcgcccaggctggagtgcagtggcacgatctcggcggctcactacaacctctgcctcccaggttcaaatgattctcctgcctcagcctcccgagtagctgggattacaggtgcataacacacctgggtaacttttatagagatggggtttcaccatgttggccaggctggtctcaaactcctgacctcaggtgatctgcctgcctcggcctcccaaagtgctgggattacaggcgtgagacaccacacccagccataactaagcattatgttttctaaaacttctaagatcctccctaaacccgtctggagacatgggttttagcccagactctgcctcaaactcattgtagctcccagcacattacccagttgctctgggccttggtgttatgctctgggaagtagatgttgatgctgtggccttagtgccttctggccccagcattccatgggcctgtgatcttgaccaacctgagaaaacagtaacagcccatccactggaaatacccctctgcccacagcaccacccttctgtgctgttttttttgttgtttgtttgtttcttctttttgagacagagtcttgctctgttgccacgctggagtgcagtggtgtgatctcggctcactgcaacctcccgctcccaggttcaagcaagtcccctgagtagctgggactacaggcgtgtgccaccacatccggctaattttttgcattctttaatagagacggggttttgccatgttggccaggatggtctcaatctcctgacctcatgatccacctgcctcagcctcccaaagtgctggggttacaggcatgagccaccacgcccagccttttttttttttttttttttttcttgagagacagggtcttgctctgtcacccaggcacagcttactgcagccttgaactcctgggatcaatcagtcctcctgcctcagcctcccgagtagctaagactaacaggtatgtaccaccatgcctggtttattgttttatttttttggcagagatgggtctcactgtgttgcccaggctgatctcaaactcctggcctcaagcgatcctcccatctcagcctcccaaagtgctgggattacagacctgagccaccacacctgggcaacagagtgaaacctgtccctgttttcctgctcttactctcacctctgaggcctcctctgcctggaagagattacagggaaattccaggcagcccttgtcaattgtttttatgaattctttacctgttccttttaaagacaaggaaactgaggcccaaagttctaagttgtttggcaaatggagtctcctaccctcagctcctgcaaggacctgggggacccccaggtccagcagccacatgattctgcagcagacagggacctagagcacatctggatctcagccccacccctggcaacctgcctgcctagagaactcccaagatgacagactaagtaggattctgccatttagaataattctggtatcctgggcgttgcgttaagttgcttaactttcattctgtcttacgatagtcttcagaggtgggaacagatgaagaaaccatgccccagagaaggttaagtgacttcctctttatggagccagtgttccaacctaggtttgcctgataccagacctgtggccccacctcccatgcaggtctctgtggggtctttgggatggatctcctagggctgggctggaagcctcatgtactgttgtcttctaggtaaccaccctgaagagaaggggtggcatcaggaaccgcagggaaccaagcagcctttggtccagtgctgctccttggaacagttgagtgtggcctcaaaccattctcctgggtagctcagtcataaaacaccgaatgcctgcctcaaaatagcctctgagggaagggagctgttgacaagtgaagccctcaggttgtgtgggattccagcaggttattacagcttgtggggggagggagggtccattccaccagctttgaatcccagggtcccctcagcttcactgggccacagtgtctgtcccaggaagaagcaaatggacagtgaggatgatggagagactacagctgccttgtctaaaacctgggatcttaaaagtgttattttggcttttattttttaaaaaaagaaaaggaaaattggcaattgtattaatccattctcgaattgctgtaaagaaatacctgagactgggtaatttaatttataaagaaaagaggtttaattggc

SEQ ID NO: 9100 - DNA, 774 bp, Homo sapiens
ggatgataccggggactctccagagccatgactagatccaatggattctgcgatgctgtctggactttgctgtctctgaacagtatgtgtgtgttgctttaaatatttttcttttttttgagaaggagaagactgcatgactttcctctgtaacagaggtaatatatgagacaatcaacaccgttccaaaggcctgaaaataattttcagataaagagactccaaggttgactttagtttgtgagttactcatgtgactatttgaggattttgaaaacatcagatttgctgtggtatgggagaaaaggctatgtacttattattttagctctttctgtaatatttacattttttaccatatgtacatttgtacttttattttacacataagggaaaaaataagaccactttgagcagttgcctggaaggctgggcatttccatcatatagacctctgcccttcagagtagcctcaccattagtggcagcatcatgtaactgagtggactgtgcttgtcaacggatgtgtagcttttcagaaacttaattggggatgaatagaaaacctgtaagctttgatgttctggttacttctagtaaattcctgtcaaaatcaattcagaaattctaacttggagaatttaacattttactcttgtaaatcatagaagatgtatcataacagttcagaattttaaagtacattttcgatgcttttatgggtatttttgtagtttctttgtagagagataataaaaatcaaaatatttaatg

SEQ ID NO: 9101 - DNA, 1205 bp, Homo sapiens
aggcattgccaagccccccgagtgaggacgcaccgccgccaccagcccgcaactctccagccgaagctgcaggggcaggagaggctgggctgggtggcacaccacccgaggggggccccgggacccacggagccctccctatgtctgcaaagtgattcactgtgcttcgagccaactctaacaggcactttgagatgtgttcctcctgctgtagtcctttctgccttggcctcggcgggcttttctggggcccaggaagcccacactatgcacagagcccaatgcatagagccctggccagcccttcctctcactcctgcctccgctggctttgggaaagcccagactttagtgccctgccccctggctgactggccagttgcccagagcactttagcagatgtggtttcaaagtaaaggcctcctcccccaccccttaggccccgtggtgacatttcccaagtcagacagatgtcagcttcccagccatgcccaggacgtcctatctcccccaacccacctctggccctgtgtaggggcagggatgggggtggctgggactcctggtgcccctcgccagcttctcctgcgccccgcccacaccctcggggggtcacaggcccagaagggtagctgggcggggctcgaggctggtgccaggcgcgtgtaaatggttttgttttgcacgtttggtttgcgcagtagtttggtttgacttgtttgtgcatcctgtgaaaaataacggtgcttgtgtcactagcatagaatagcgacaggaatagatgtggtccttaggagacgctgcacttgacaccaaccagacagcacagggcaggggtggtggagggggctgggctcacaggcctctcttttccccgcctgcagtcttctgggctgcgggaggccctggccctttccccttcccctcccctccttgtctagtttcccacattccaaaagggggcctgggatgctagccccagagatgccagcccttcaggaagcaggtgtcctttcccctctctgcccctgatcactcccagcactccccttgccttcccctgtcttcacctgccaccacacacacacacacacacacacacacacacacacacgcacggcttcctataacttcttcctgctggacagagactcagcgctcctcctgtgtgactggcaagaggcctcatgcctgctgagagagg

SEQ ID NO: 9102 - DNA, 870 bp, Homo sapiens
gggcggccgcagccctggctgactgcacagcttccccgtgcctccctccctgctccactcccacattatagtcctttcctaacacggtcggccgggtgctttgtgtcagtgctgcagcactggggagccaggcgaggggggcttgggggcatggggccggaaagcaggcagaagcccgtcctgggtggtgctggcccagttggtgggacccctgtccacacccaccctatttatttccgttgtctctctgctgtgtcgcccaacacttcccagggtgctgctgccacccgccccagccagccacctgctcctgacagccagcagctgtgtatttgacaaagtcattggtatatttttacttactggattctccttgcactttacctgttcttttccagagctgacagcacgggctccggcgcagtgtgcctggcttggcttcccttccccatggctgggggctggggtaggactcacccattctaatttattttgtcttttggcttctcagtagctaaggggaaggctgatgtcaggagagggagagggggctgaggaggtagtgctgtaggcccagggggtcagggaaagggaggggggcatgtgagggatggaaatgacctcctggcaccaggctcacccacccaaggccccctgccccagcactgaatcccagcgctgccctgaggcccccagccactccctccagcagcctggttcaccacacaaactctgcctggaccccattgtctgtctgcttcccacctgccctccccaccccctgcccctcgggcaccagcctgcatatgtgttcacttttatttaaataaacttgtgtggtaaaagtacatgccatgtgtccctcaactg

SEQ ID NO: 9103 - DNA, 860 bp, Homo sapiens
gccctgccttcctggccactgatttctgcatgggtagaccatccaagactgcagcgggtagaaggtggcagttcttcatgggagtctttttaacttggtgcctgagttctctcctaggcaagtggccagttgcctccacctcagttcttccatctttggtggggacagggcccagcagcatctcagcctcctacccacaattccactgaacacttttctggccctactgcacatggcccccagcctccatccttgtgctggtagcctctcacaactccgcccttgccctctgccttccacttccttccatctcatttctaaaccccaaacagctcatctctaaaaagatagaactcccagcaggtggcttctgtgttcttctgacaaatgattcctgcttctccagactttagcagcctcctgttcccattcttggtcacagctctagccacagcagaaggaaaggggcttccagaagaatatagcaccgcattgggaaacagcagcctcacctccacctgaagcctgggtgtggctgtcagtggacatggggagctggatggaaatgcctctcacttcaaaatgcccagcctgccccaaatgcctctaagcccctccctgtcccctcccttgtagtcctacttcttccaactttccattccccatcatgctgggggtcttggtcacaaggctcagcttctctccactgtccatccctcctatcatctgtagagcagagcacaggcagttgtgtgccttgggcccagggaaccctccatcaacctgagacaggactcagtatatggttcttgggtatgccctaccaggtggaataaaggacacagatttgatttctagca

SEQ ID NO: 9104 - DNA, 358 bp, Homo sapiens
taatgcctttatgttcaagcccaggatatagccccaagatggggtaacagtgggaaatatgctagttcccctccaggccgctgattccatgtgacagccgttaagtccttggaatgccagccacgctgtccaaggcattacagagtatcaccttgagacagaacaaaacagggacctgccaccccttccctccctccgcagcacaagattttgggaccacaaaaaaaagtctatatttttatattggggggagggagtagaaaagcaagcccctatactgggccctattcagtggcagcttcttgttccataggattaaggaagactctgaggaaataaaagttgtttggaaaaatcc

SEQ ID NO: 9105 - DNA, 64 bp, Homo sapiens
gagcttgaagatatactgttggcccaggaccaaggggtgaatcaataaaattagtttgtagcag

SEQ ID NO: 9106 - DNA, 380 bp, Homo sapiens
actggggtcccgcccgacgtgtctacgtcggctgaagagacagcgggggcggcgggctcctggggtctcgcctgagacggggcacctagccctgggcgagcgccgcacccgggcccgcagcggcaccgcgcccagagcggcctctccccacgcccggggcgcgccggctcagggaggctcggggccgcccatgcagacttttggcctggcgcgatcccccaagaacccctccagggccggcctgcggaggagccgatcctcgcaccctccgctccctccactggccctccaggtcgattccctgggctccaggctcccccgcgcgggcgccgcccaccgccatactaaacgatcgaggaataaagacacttggtttttct

SEQ ID NO: 9107 - DNA, 1001 bp, Homo sapiens
gagcaggtgccggctcctcacacaccatggagactaccattgcggctgcatcgccttctcccctccatccagcctggcgtccaggttgccctgttcaggggacagatgcaagctgtggggaggactctgcctgtgtcctgtgttccccacagggagaggctctggggggatggctgggggatgcagagcctcagagcaaataaatcttcctcagagccagcttctcctctcaatgtctgaactgctctggctgggcattcctgaggctctgactcttcgatcctccctctttgtgtccattccccaaattaacctctccgcccaggcccagaggaggggctgcctgggctagagcagcgagaagtgccctgggcttgccaccagctctgccctggctggggaggacactcggtgccccacacccagtgaacctgccaaagaaaccgtgagagctcttcggggccctgcgttgtgcagactctattcccacagctcagaagctgggagtccacaccgctgagctgaactgacaggccagtggggggcaggggtgcgcctcctctgccctgcccaccagcctgtgatttgatggggtcttcattgtccagaaatacctcctcccgctgactgccccagagcctgaaagtctcacccttggagcccaccttggaattaagggcgtgcctcagccacaaatgtgacccaggatacagagtgttgctgtcctcagggaggtccgatctggaacacatattggaattggggccaactccaatatagggtgggtaaggccttataatgtaaagagcatataatgtaaagggctttagagtgagacagacctggattaaaatctgccatttaattagctgcatatcaccttagggtacagcacttaacgcaatctgcctcaatttcttcatctgtcaaatggaaccaattctgcttggctacagaattattgtgaggataaaatcatatataaaatgcccagcatgatg

SEQ ID NO: 9108 - DNA, 66 bp, Homo sapiens
caagagtaccatttggggtctcagttcactctttccttgtttattaaatatcaacttttcctgcct

SEQ ID NO: 9109 - DNA, 228 bp, Homo sapiens
actacataggtcttaccattgacctaagatcaatctgaactatcttagcccagtcagggagctctgcttcctagaaaggcatctttcgccagtggattcgcctcaaggttgaggccgccattggaagatgaaaaattgcactcccttggtgtagacaaataccagttcccattggtgttgttgcctataataaacacttttttctttttttttcctctctttcttttt

SEQ ID NO: 9110 - DNA, 267 bp, Homo sapiens
ggcctggcttcctcagcctcttctctttaggcccagctgctgggcaaggaattccagtgcctcctacgggggcagcacacttagatattcctggacatccagatagctcacatgtgctgaccacacttcaggctctggactggagctctctggcatgggggtggggcctcagatgctggggcccagtctgccccatcttcattcctgcaccttaaacctgtacagtcatttttctactgacttaataaacagccgagctgtcccttg

SEQ ID NO: 9111 - DNA, 1000 bp, Homo sapiens
gtgctgacccagtgagggtgccttctgctgcccagtcccctggacacattgaagagaggagcaagtagccctgtcctgacattgaccctgatttgacccctcttcttataaggatctcaagaatctcttcagaagcactgatgacgttgatcccagtaaggacatcacctctacccttggtaccacaactctgtatggggttgcccagctactcttcctttcagttgcagtcccaattttactccgtcagaaagcagccctcccctccctccccttatgaggtctcaggcagtggtggcagatttttcctgaagagtctttttcctgtgtctgccttgttattggaaccaatgccagctggtaggatccctgagccccttgcgatatcaccaccaagagcctgataactgagcagggtggatcctgtccctggagctgctgcacccattaattctcccttgttgcaactctgtgtaccaagaacccctagcatcagcctcattcctaagccaataacgcctgtatggagttggtttcatcttctggtgcccacggccattggcattgccagcctcattccatgccactatgagtcaactcaggaaaactgcgagtgcatttgaggcttaggggtagtcattccatctttagattatccttggacttcagctaccagcacagcatgcattagccttggtcctgtaggttaactgaagttcaaacatcagtgccagcttgcctccatccttttcacatattatgcaggccaattgacatataatttgttcttaaaaataggggcatgaaatatgtgatctggaaaagattgtactttctggactcttttcccactcttgcctctttgtgctgctgtttcgtatcctcctcacaccgtgtatttcccacccactcagggtcacagcctactaattcctcaaacttctctccctggactaggagaaaggctaaagaatgtcagtaaataaaagagctttcatcc

SEQ ID NO: 9112 - DNA, 552 bp, Homo sapiens
gcctgcgccgacccgaccctgctcgagagcccgcgctagagtcggggaggatctgcgcagagaccgcagcatcacccaaatcggcgccggccccgggaggatctcaataaagaactcgagcgtcccagacccgtatctcctttcgctgcccaaccccgcagcctgggcttcgaaggcgacccgcccaccatcctgcccttcccagaacctgagaccgtctggggggcggaagccaaatgaacccctattgggcacctctgtgatgccaggagcgaactggtgagcccagcgccctgggaagagggccgagggcggggcggtggtgccgggacctctgaggtcctggggatttggggacccttggggtccacatgcacctggctgacctggctgaaagccgctgtctcggagccccccacagcattttgttcccctcccgctggcccgggggccccaccttcccacgggttcccacgctgctgtgactgccctgcctctacgacaaaagccaacgggtcttcagtacttttattaaaaaatagtcacgcagac

SEQ ID NO: 9113 - DNA, 408 bp, Homo sapiens
tctccactgcttggatgtctgccctctaccccagaggaatttacagaaacttgccctgtgcctgtgtcccccatgctaggggcggaggggtcttttccttcttctttcctacctaccccttttctcttggccaggggcctcgtatcctacctttccttgtcccctgggctggctgcacagaggattgccccttctcttttcagagctggccctcgatgccaaattagcatttagtattttgcacaaagtctaagggaccatggctgcctgccttggggaggaaccatatctccctctgggccgcttctggcctcttggagccatgggccaaaggccaaggggatgggcagaggtctgtgtttggtctggcccagttccccatcattaaactcagcctgactgctgcct

SEQ ID NO: 9114 - DNA, 443 bp, Homo sapiens
agctcactcgggccaggccctgatctgcgctgtggctgtccctggacgtgctgcagccctcctgtcccttccccccagtcagtattaccctgtgaagccccttccctcctttattattcaggagggctgggggggctccctggttctgagcatcatcctttcccctcccctctcttcctcccctctgcactttgtttacttgttttgcacagacgtgggcctgggccttctcagcagccgccttctagttgggggctagtcgctgatctgccggctcccgcccagcctgtgtggaaaggaggcccacgggcactaggggagccgaattctacaatcccgctggggcggccggggcgggagagaaaggtggtgctgcagtggtggccctggggggccattcgattcgcctcagttgctgctgtaataaaagtctactttttgct

SEQ ID NO: 9115 - DNA, 111 bp, Homo sapiens
caggtgctgttccgagactcagtcctaaagggttttttttcccactaagcaaggggccctgacctcgggatgagataacaaattgtaataaagtaacttctcttttcttct

SEQ ID NO: 9116 - DNA, 242 bp, Homo sapiens
acccatgtttctgggtgggtgaaaggggcccaaccctgcccacttcagcccagcccgcccaaggggacttgtgccagcagaacatgtgggaggaagaagccccgtttccagggcatccgcagcccagggtagggagaaatattctctccactttgggggagagttcttgctctcgacctagtggtttctactctcaccgacttattctgatttcagaaataaaatgaaatgtcttattttgg

SEQ ID NO: 9117 - DNA, 195 bp, Homo sapiens
ggcgaggtccgcccctattattcattgtcctaagtcttcatcgtgctgccctttccaggcttctttcctgctcagccactgcctccaattcctgcgcccccagcgtggaaaggcttccatttctctctaccgggggggaggcgggtgagaatgggtctgtaatttctctaagatgaataaaggggcagtaaatga

SEQ ID NO: 9118 - DNA, 1630 bp, Homo sapiens
gcagtcagtgtaaaagtgctcctaggaaagcagatgtgatgctgttgtcacggggacctgtgctgggaggactgagtgaagattctttcagctgtttgtgtaaggctgtgactttctcagctccttcctcctgtgtaaatttcactgtcttcccttcttacattttgattcccccctccccttttagtaggttttcctgctattcctcgtcaagtcctcttgtttttttatcttgcccaaagagctccctctcaaggccaactataggctcctcttgccctgtacaaaactaagaaacctctttggttgtcctttccttcctggggtatagaatgttcttggaagctccattgatttagtagctgctccatcatctagcttgtgaaaccattccaaactaattttttaaaaccataactgatttgtcattttgtatttgtgatataacaagtctagaagttagaactgttgtcattcacataataagattactctgtctccttgggaaaaaaactttatggaggctgtttgtcctctcaatatggttttaagattgaaagtaagaaaacggatttaggatgaaaactctagaactaccctatgctgtttatactgggaaatgctttgtaccaagtagcagtgactagacccacagacatgaaaagcaaccttaggagtaaagtgacccaaacattaaaatgacaggaaagagaaagtagaagcagcaataaatactgccccaactttcctggagcccgaggcctcatccatagctatgatcacttgccctctgaagcttatttttgcttctttggttttaagaattgagaaatatcacattgcccctgatgttttgacagtctcctagtgctcctggtagtgccactaagggaaaaccaaggtgcgcattccttctccctggactttaccttacttgttagtctacgccccactgtttccacccatccccttagccaacctctgtctttttgaattttctgagaatattgtcctatcctcttttatatatggagttctctcctctttatatcctgagactttgacaccagatgtagatatttatctggagctggaaagaaaaattctttttctgtacctcatgcctatctggtaatgtttaatgggttatttctctttgagggtggctttctctggaacattggttagagcagctttgttgtcgtgtttctggattctcttccccattttgcgtaaatattggtcttatatattcttgcctattttgtggcatatgccacataaaaaatgaacctgatatagacaagtactaccttttcaaattctgaaaggctattaccactttaactctttgtgctcctccaaatagctttaaaatgtgggcttttgtgaagaccactttcaaacaagggagcactgaaacctgaattggatactgccagaataggtagttttgaaacaagttaaggacatggtatatgcactctgcattttcattggcagtgtgcccttaaagccctttcagtagatgagggttgtcagggaggagaaatgaagaagctatgttaatttctggtgagtaagacctggggaatgtttggcaatgacaaaagaaataaatgactctcag

SEQ ID NO: 9119 - DNA, 646 bp, Homo sapiens
gagactttagcacacttcacttgtttctagaagtccagaattttggacctccacgtgaaagaactgttcttacctctgaactgggggctcccataagggataattttcctcagagtagcaaagtttctcttattagagaaatcttgtgactcagatgaagtcagggatagaagacccttggacctggcaggttaatgctgattattccttggcctttcccttgtatttatgcaaggaaggatatactgagctgatactcttccaagcctacaacttcaagttttatcatttgaactcaagtacttttgctgctgaggaatggaatcaaaagaacgtagtctcctggtgaccacctcagatctctattattaggctagatgtatagcctctactcccccagcttcttgctcttgaccctgcactgtaagttgcccttctattagcagccaaggaaaagggaaacatgagcttatccagaacggtggcagagtctccttggcaatcaaccaacgttgctatgaaatatgcctcacactgtatagctcattataggacgtcaggtttgttgaaaaaagtgggcaagacatgattaatgaatcagaatcctgtttcattggtgacttggataaagactttttaattttaa

SEQ ID NO: 9120 - DNA, 297 bp, Homo sapiens
ttgcttcagaatcccaaaagaaaaccttgtggaccatgtgacatggaatatttgggataatgtatcaaattgaatggccagagaagtttagatgattatttgtaagatctggtgactggcttttcgttctgtgttcttggcttcctaaatttatctgcccatatgattctcatgcatttgatatttatgtttaaaagtgtttatatatgtatgtaaaaagggaaccatatgttttgagaatttgtaaagtgagagacatgatcctattaaaataagaaggcaaaaatgttcctaata

SEQ ID NO: 9121 - DNA, 260 bp, Homo sapiens
acggtggattgaaaatgactttgatttataaagagaagactgagggcggggatactgattcagaaatcctgtagcgtgtaataaaagaagaggaaatggcatggaatcactgcctcctgtgatttgaaggccattgtgaaggaaaacaatgcagtgaaagaaagttcttcatattaggacagatatcattgcatcacatttatttatctttctgggtatttttatagcccttaataaaaaatattaaaatagcctgtgct

SEQ ID NO: 9122 - DNA, 449 bp, Homo sapiens
ggcttatttcaaaacctttgtccctcagttccaggaggcagcatttgccaatggaaagctctaggaaacaccagtcttgagaggtggccagccagactgcctgtccacatgcgtgtcagcacatacagccgcttcctggaagccgcctggaatgtcttcacggcagcgttttgctcacacagcagcttttgcacgccccaggcagccccgactgctgaaatccaacttgagctggctggtggtccctggatcctagagcccttcacttcgggttactccctctttcttgcctctatttcttagttggaagaaataaactcacaaattatggtgcagtaattttccggggaaagtaaagcctcaggaatgcccacgcctttcttccaaagcctttgtctctgagacctcttaagttctaagattaaatgcccctcgctgttcttcctctg

SEQ ID NO: 9123 - DNA, 2199 bp, Homo sapiens
cccagtgcacctccctccccagctccggagggggtcctcctcgctcctccttcccagggaccagcaccttcaagcgctccagggccgtgagggcaagagggggacctgccaccagggagcttcctggctctgggggacccaggtgggacttagcagtgagtattggaagacttgggttgatctcttagaagccatgggacctcctccctcattcatcttgcaagcaaatcccatttcttgaaaagccttggagaactcggtttggtagacttggacatctctctggcttctgaagagcctgaagctggcctggaccattcctgtccctttgttaccatactgtctctggagtgatggtgtccttccctgccccaccacgcatgctcagtgccttttggtttcaccttccctcgacttgaccctttcctcccccagcgtcagtttcactccctcttggtttttatcaaatttgccatgacatttcatctgggtggtctgaatattaaagctcttcatttctggagatggggcagcaggtggctcttctgctggggctgacttgtccagaaggggacaaagtgcaatacagagccttccctaccctgacgcctcccagtcatcatctccagaactcccagcggggctccctgagctctcaaggagatgctgccatcactgggaggctcagaggacccttcctgcccaccttcggagacggcttctggaggaacggcttggccagaagacagggtgtgagtgagacagtggggcacaggttgggtttgccaaacgcctaattaccaggccaggaagcatgccaacaaagccacacgggtgtcctagccagcttcccttcacctggtgtcttgagtagggcgtctcctgtaattactgccttgccattctgcccctggacccttctctccggaccagggaggcgtccctccctaggagccacacattatactccaagtccctgccgggctccgcctttcccccaccctggctctcagggtgacgccacccacagagatttaatgagcgtgggcctggaccttccccagatgctgccaggcagcccctccccaagcctcaaagaagcatttgctgaggatggagaggcaggggagggaggcgggaggccgtcactggagtggcgtctgcagcagctgctgccccagcacccgctcagcctgtcctggctgctcacctccccgcagggcaccgggcctttcctgccctctgtggtcatctgccacctgctggatcaagtgctttctcttttacactcccctgtccccaccccagtgcactcttctggcccaggcagcaagcaagctgtgaacagctggcctgagctgtcgctgtggcttgtggctcatgcgccattcctggttgtctgttgaatctttctggctgctggaattggagataggatgttttgcttcccactgcaggagagctgccccctttcacggggttggggaagggtccccctggcctccagcaggagcacagctcagcagggtccctgctgcccacccctctgagccttttctccccagggtatggctcctgctgagtttcttgtccagcagggccttgacaggaatccagggagtagctcctggccagaaccagcctctgcggggcttgtgctctgcaaagactctgctgctggggattcagctctagaggtcacagtatcctcgtttgaaagataattaagatcccccgtggagaaagcagtgacacattcacacagctgttccctcgcatgttatttcatgaacatgacctgttttcgtgcactagacacacagagtggaacagccgtatgcttaaagtacatgggccagtgggactggaagtgacctgtacaagtgatgcagaaaggagggtttcaaagaaaaaggattttgtttaaaatactttaaaaatgttatttcctgcatcccttggctgtgatgcccctctcccgatttcccaggggctctgggagggacccttctaagaagattgggcagttgggtttctggcttgagatgaatccaagcagcagaatgagccaggagtagcaggagatgggcaaagaaaactggggtgcactcagctctcacaggggtaatcatctcaagtggtatttgtagccaagtgggagctattttcttttttgtgcatatagatatttcttaaatg

SEQ ID NO: 9124 - DNA, 686 bp, Homo sapiens
gcccgggggtgggtcctcaccctaaactccctatagccactctcttcaccgccctctgccccagccactcccggccaccaggacatgcttcaatgcctggtgccataggaagcccaggggacagtcacaacttcttggggcctgggcttcttccaggcctatgctcctggaatggatacatttaaataaagtccaaagctattttattcctgggtttgcctgcgtgaagcactcaccttccatctcttgtgcagcccaggtgtgggagctgccactttttgtggcctgcctccagcagggctgcccaagccacgaccaaccagagcccaaactgcctgccaccacgagcatatcctcaagtcaccaaacccactatttcaaaggcagaaaaaatgctggtcaccaggtggtggctggaattttggagctggctggttgccattcagtccaatccaacacatacctattaagcaactgttttgtatccaggacaatgcgaagcactgaggtgcctcctaggctgtgcatgtcgcagcctggcagagaggtcaaactccttcaataaccaagaagccacgtgatgatgtgtaactactagggcatcagtaggtaaatgtgtctgattgttttaaagaatagaaagggttcttcggggaaagtttcttgggggagagcaaccttcacat

SEQ ID NO: 9125 - DNA, 3636 bp, Homo sapiens
agaaaggaattctgtaaagaaaccatcagatttgttaaggacatacttcataatatataagtgtgcactgtaaaaccatccagccatttgacaccctttatgatgtcacacctttaacttaaggagacgggtaaaggatcttaaatttttttctaatagaaagatgtgctacactgtattgtaataagtatactctgttatagtcaacaaagttaaatccaaattcaaaattatccattaaagttacatcttcatgtatcacaatttttaaagttgaaaagcatcccagttaaactagatgtgatagttaaaccagatgaaagcatgatgatccatctgtgtaatgtggttttagtgttgcttggttgtttaattattttgagcttgttttgtttttgtttgttttcactagaataatggcaaatacttctaatttttttccctaaacatttttaaaagtgaaatatgggaagagctttacagacattcaccaactattattttcccttgtttatctacttagatatctgtttaatcttactaagaaaactttcgcctcattacattaaaaaggaattttagagattgattgttttaaaaaaaaatacgcacattgtccaatccagtgattttaatcatacagtttgactgggcaaactttacagctgatagtgaatattttgctttatacaggaattgacactgatttggatttgtgcactctaatttttaacttattgatgctctattgtgcagtagcatttcatttaagataaggctcatatagtattacccaactagttggtaatgtgattatgtggtaccttggctttaggttttcattcgcacggaacaccttttggcatgcttaacttcctggtaacaccttcacctgcattggttttctttttcttttttctttctttttttttttttttttttttttgagttgttgtttgtttttagatccacagtacatgagaatccttttttgacaagccttggaaagctgacactgtctctttttcctccctctatacgaaggatgtatttaaatgaatgctggtcagtgggacattttgtcaactatgggtattgggtgcttaactgtctaatattgccatgtgaatgttgtatacgattgtaaggcttatgtcactaaagatttttattctgattttttcataatcaaaggtcatatgatactgtatagacaagctttgtagtgaagtatagtagcaataatttctgtacctgatcaagtttattgcagcctttcttttcctatttcttttttttaagggttagtattaacaaatggcaatgagtagaaaagttaacatgaagattttagaaggagagaacttacaggacacagatttgtgattctttgactgtgacactattggatgtgattctaaaagcttttattgagcattgtcaaatttgtaagcttcatagggatggacatcatatctataatgcccttctatatgtgctaccatagatgtgacatttttgaccttaatatcgtctttgaaaatgttaaattgagaaacctgttaacttacattttatgaattggcacattgtattacttactgcaagagatatttcattttcagcacagtgcaaaagttctttaaaatgcatatgtctttttttctaattccgttttgttttaaagcacattttaaatgtagttttctcatttagtaaaagttgtctaattgatatgaagcctgactgattttttttttccttacagtgagacatttaagcacacattttattcacatagatactatgtccttgacatattgaaatgattcttttctgaaagtattcatgatctgcatatgatgtattaggttaggtcacaaaggttttatctgaggtgatttaaataacttcctgattggagtgtgtaagctgagcgatttctaataaaattttagttgtacacttttagtagtcatagtgaagcaggtctagaaaataagcctttggcagggaaaaagggcaatgttgattaatctcagtattaaaccacattaatctgtatcccattgtctggcttttgtaaattcatccaggtcaagactaagtatgttggttaataggaatccttttttttttttttaaagactaaatgtgaaaaaataatcactacttaagctaattaatattggtcattaaatttaaaggatggaaatttatcatgtttaaaaattattcaagcactcttaaaaccacttaaacagcctccagtcataaaaatgtgttctttacaaatatttgcttggcaacacgacttgaaataaataaaactttgtttcttaggagaaaatgattctgtaattccagtgtcactaatttatattgttctttcctctgatttttttcaggttagtgatttttttgtatacaatttaatccaaatgttatgacattcagaaatcatgaaacacagtagatatctgttataatgtggtgtatcacatggattataaagcaaagttatggtcgatttctattcttgaaagaatcaactacagtgaatcctttgcatttgaagccttaacatgcattgctttaattttgcccagggacaaattttaataatcagcaagactggtttgtgcaaagcgttgagtcatcaggtatttagagcctagccagctacccagtatccatgctgccatatcccttcattgtaaaaagtacctaaacattcgtgaaatgattttttttagctgaaaaatgctggcaagaagaattttaaagcttaaaataggtggtaaatttgaagtatgagtgtgttcacgagaaacataggcttttcaaaaaaatttttattcaaggcaaagcaaggaacatcttgagatatgtctcaagaatataaagatgtattattttaagccaaggagctgaaatatatctcagtttataaattcaggtatattctttttgtctccatggcaaccataacttttgaaccaaaaaaaattgtttttacatctttatgctgaaaatgtgtttagattaggaatatggtcgggctgaatttgctgttgctccctaaccaaatccacctcttgttttccttgtgagtccatggctaaatcaaagctgcccctgagaagagacttaatccaagcctgattgtactagtggcatcacttagaagtaggctttccctcttcctagtagatctcaatgttttataattccttaaaacagctgaaaattgggacaacatactttacgcaatgaacagtagttaaataggaaataaactagttccatataagtatacacctagagttttaattacctttataatgtttcttaaaagtgaaacttagatacaattgtgattggatacttagatactaagtgaaacttagtgtaacaattttgatctgttaaattggattttacatgtacatttgaatgccagaatttctaaataaatcccctggttaggaaattttaaaagtcaaagcttgttttcttcaaccactaccttctacattggttgacttagaccgtaagctttttaagtttctcattgtaatttaccttctcatgcagattgctgatgttttattaaaccttatttttacaaaaatg

SEQ ID NO: 9126 - DNA, 666 bp, Homo sapiens
gatggcccaactaaaccaatttggaatcattaactacaaaatgtcaaactaactgcaagacaagtgtcaaaatgggatgtttaagcagttttgctatgttatacatcttttagttgttattttcaaaattatatgtataagttatataagtcatagtaatagctaaaaatgccaatctatggaagcagtgattttcaatataaagttctattttgatatttttccatcttcaagtcagttactgtcatctggagtactcagttaagttgtggtttgaccttcctcaacttgacaagaaaagctaatttaagagaagaaaaacataaagtcattatattaattaaaagaaaaaacaccatttaatatgttctgaaaacattactcacctgtatgaccaggttgccagtgtactggtctagcaacatagggaaatgatccatatggaaaatcagaatgcgattcttctgttgtaaaaaaatatatgtactataagctacataaaatattttctatttttttcacaaaactgttaaaatatgagttactctctttattgtaagttttttctttatttatttccttgcatatgttttagagctactctgccagttattatacagaaactatttgtcaatgattatgtaataaacatatgattttataacc

SEQ ID NO: 9127 - DNA, 327 bp, Homo sapiens
taatatgccagaattagatttatgcatgttgtttactgagctctagtcagtcctttctggcggggatacataataatttatatactccaacaatatgagttaaattaatcttgaaactttctcccctttcagttactttttgtcttgtgtccatatttgttttgtggtgacccacctaaacagatttttaatgtgacctatgttaagttgaaaactaatgcaccataagcctcagtattttaagagcctgaatcatttttttgaaatgtttattttattcaaaagggtttcaagaagaaaataaatttacttgtaatctcaccttcc

SEQ ID NO: 9128 - DNA, 137 bp, Homo sapiens
agatggatctgaaatgggcaattattatttatcttatttttttgatggactattctcctggttactttcccccttagagttccagatgtacatggtatattttgaagtagaaataaaagaattacttatttttctaa

SEQ ID NO: 9129 - DNA, 1913 bp, Homo sapiens
gcttctaaaatattaaataagctcaaatatatatatttggtgtaaataaagagtccatggtaaatggtttactttatttagccatattaaaattttgaaaatatagttatcttcttaaaaaccattataacaattcagagagagttctttacaaagccatgaatatgaactatggggaatcatggttcttttaaagcaattttcaaaataagtaccaattaaagctttaggttccaagaagattctgggactcaggaagaaaaagtgccatcaggtgaccagctgttgcatttcttgcttattctgttttgtttttgcacatcataatggatttttcttagtgccctaattgtgaagggtttctctagctttggttatgtgtaatgttcacgtgacctttttttgtcaatcatttttggaatttttctttctttctgtgctttattactaataagtccaatgagtgagtagtagctagatgactagtatgtagttttatattttggtaaaattatttgccctttcagaaatgcctcatctaaagatacatgataattttggagttggaaggggccttagaggctctccagctctgcttcttgcccattgccaaatactgaaatggaagcccgtcttacctggggtcactaactggttggttaactgagctaagaatagactgtgggtctcctcacttgtggcccagtgctctttctgctatacaaaatgtctaatctcagatttttcttctgctgcttgactgcttcatctggatgaactacaaaaaacccatgattaaggtttatgaattcaagtaataattagattttttttgcacagacttacttaacttccttattggatatgtttgtaacacataaacacaaagcacttttcaaacatgatgcacttttatctttgtgaataatttactgtcctttcctcctgggatatgagaaacattttaaaaaacgtatttaacagaagagagcaaataaagatatatcaggaaggatgtattagttatttacttaaatgtttataatatctggattttttttgttttgttactcatagaactggtgttgtttgctgtttttatttctctaattgttgcagagttctgcctgttacaaagctacagaactgtattgtttttattttccttcttgagcacatgttaacaaactaagcttcacattagagtgatgtcataatgtaaaatgtttgcattgtggttaggtattgaagtttatgtcctgtctgtgtaaagattcatcttttattgtaaatatttagactttaccacagaaatattggaacagtttgctttataagattaaaaagcatccttcagaatggagcttgccttgtgcttagaaataatatgttgaactattttgcaatatactattttaaatctaaattctgtcacttcgctgcctttttaaaatagtgtggtatttcaaatattgctagagctattttcctgaaatacatttgcaaaataaggctgctttgtaatcaaggaatatttttattgattgaaggaaatgactgtactgcgattcaaaagtaaacttattttattatacagattatttcttaaaaactctatttataccttaacatgaaatccatgaccacaccaaacttggttattcataatttttcctgttaaatataaaacactgtaagttaaaaacagtaatgccaacattgaatttatttttgaggtcaaagaaccagttgttctctttatatttagatgaggatgattgagtccatatactatgtatgtttacatatactatacatgcacattaggtgttttcatttgtgttttgcttatgaaatgtcatttaaagttcacttcttgagcatcaataaaaagggaagctgtgtggttttgg

SEQ ID NO: 9130 - DNA, 1689 bp, Homo sapiens
agatacagagagaaatccatcttttcccaggtctccttcactgaaaacaaaaatctacttacatacactgtcaccttagcatcagagtcggattaatgaactgcggaacaagaggttgtgagaatctaagatggaacctttctttctttctttctttttttttaaattttgtattttccatccaacagcagtgtgtagagagaatattatgcagatgccgttaattttttaccctatgtttacatcttgaggcagcagagtctgtctgcagctatgtggtgagctatgtaaggaaaaaaatctgggctgttagagtgaaaaagtgtgttttatgtcaattgtgaaaggaaaatgttaggagtatggtttttaaacttgggcttcattttaaacttttttttttaaacccagttatttcacttgatttgctagcttcagagaagagatccgaatctgtgcccagcgctaaaggctcagtgttagcatggcttgtgctggccggtgtgccatattcttgttggagatgaaccgtagcaccagagcccattcttccttgtcagtcttggcccaaagatgtcaccattcctagttatttgtcaccacataattggtgttgattggaaactttttctgagatgggacagaactgctgggttgtctttttccatgtaacttaagcatagtaatataaataaagtaatagttggatgcttttggtcctgtgttgcttttaaaaacaccttataaaagaggagagtatttgataagcaattttcatagtagtaaagttttttttcatctcttaaactaaattgaccatgcatataatattctttgtttaaatgaaagcatactgttgaaacccgcagtgttgcatttagaaaacagttgaacagaatgtcaatgtgcattcatgcaaaaaaacatttaatctgcatctgttttagaaaagggggaaatgaagcaacttgtctaaaaatactgctttacaaagcatttcagcctttccccctcagttttgcattgattttttgacaagtctgtagagcctaatagtttccatcaaaggcctagatctcttatttagcatttttttcagctcttctctcagaagttcagctgttgaaacgaaaactgtactttgtaccctcacatacaaagggatcaaatttgacctggtgttattttagccccaaatttatgacattacacaatattaaaatgtaaatgtttctttacccaaactacttctagatattctagtatttgcttctggtggaattaaatgacggtaaaattggctaattatttgaatgaatgaatggatggatgttttgcatgctcaatttctaggtcctttgtctagaaaggaaatttgcctcagttgaattagtgaaatatttctgtcgttgatattaaaagtgacttctgagtacagttaagttcctcctatttgccactgggctgttggttagaagcataggtaactgattaagtaggtatgatactgcatttgaaataagtggacacaaactatcctttctccaccatggactcaatctgagaacaacagcattcatttccattcatttccatactggcttttgattatatgcagattcctagtagcatgccttacctacagcactatgtgcatttgctgtcacaataaagtatattttgtcttgc

SEQ ID NO: 9131 - DNA, 2412 bp, Homo sapiens
agtccctgtggactcccatgggtcataccagccagcatctgttcctgaactgtgtttttcccatcatgacggaagaagagagtgagccgcaattgttctgaaaatgtcaaacgaggcttctgttttgcacctgcagatcaccgagttggttttcttttcttttcttgcctttttttttttttgaaatttgccgagcagtggagccctctgacaatttgcaaggccctctgagaaaggaagctgcttagagccagggggttagtgggtgaggggagcgagtgctgtttttgagatcattatctgaactcaggcagcctagtagaggcagtggtgggattccaatgggtcttggtgggtgggaggtggggcatgtgcaaagcaagcaaggaacatttggggtaagaaaacaaacatgaggcaaaagaaaaaatacatgtttttaagaaaacattgagcagagaactgcagccaggatgcgctcagcagacattcactctggctgctgggacatcagaaaacaaagtcttcatctctctctccagtttcacccaccccaccctttgctttcatttcaggtgtgttggtctatatgacagggaggagagtaaaggagagcaggagcaattggctgcctgcaaagccagctggaggtgaagtgcaggaaaggaaaggtcaccccattctactccatggcctctctgctcccagctgtggtaggctcacatagccagtgtgatcggtttttaagaggcagtgcttttcagcttttctccctgatatatccattttgcttcccagcactttttaggagtagtgagagcacttcctgcccttgttggaagccccagggtggacactcagcacgaaggtctctcccttaactgctgcccttccaagacttgctcccgagatggagtgggcgtggtcttccaggctggcccttccttctcctcaccgccaccttccctgccccagccccagcagccatgggtacatgggtccccagctcacctatggattcccgccagtctgcccagctgcagtactcacgccccatgggggatcttggtctgtttttcttgtgggagcctagtggagagcagacgtggctttttatgtgtcttgttggggaggtgacttgcatggtggggacaaggctgtcgtggcaaccttgggatcgagtttgagactaaaggatgtcatgagatccctggcttctccccatgttgttcccggacaagggcagaagggaggcatggcaagggacctctgctgtccttactcaacagtggtcctcatccctccccacctcccactgcttcctgcaagggcaccagttgtatgagaaagttggcctttggacttaggatttcttattgtagctaagagccatctgaagcagcaggttgcaggacaaatgcttcagtccgccgagagcagtaccgtgtggccaagaggtggactcagagccttccttgagctaaactcggccaaccaaggcacgcagcatgtcccctcaggtctccagtcagtccaggttgaccctcagttctggacgtgtgtatatagctgtatttaatacctcaaggtcattgtggctctggggatgccggggcaggaggacgagggtgcgctgtggacacagcagtccgcggaattccgttctgggaagccaatggtcgccggcaccccttgcttcctccctctgttgtctgcctgtgtgacacacatcaatggcaataacttcttccaactcctcgcagaagtgggagaggccggcagcctgcaccgagaggggctttcctctctcttgctccccgcttcgttctgttttggctgcagagagtggttcatccatactctcattccctcgcctccccttgtggacgggggtcttgccttttcaattcctgtgttttggtgtcttcccttatctgctaccctgaatcacctgtcctggtcttgctgtgtgatgggaacatgcttgtaaactgcgtaacaaatctactttgtgtatgtgtctgtttatgggggtggtttattatttttgctggtccctagaccactttgtatgaccgtttgcagtctgagcaggccaggggctgacagctaatgtcaggaccctcagcggtggagcctgctggggggacccagctgctcttggacaagtggctgagctcctatctggcctcctctttttttttttttcaagtaatttgtgtgtatttctaactgattgtattgaaaaaattcctagtatttcagtaaaaatgcctgttgtgagatgaacctcctgtaacttctatctgttcttttttgaggctcagggagaaactagcatttttttttttccaaactactttttgtcactgtgacagttgtaaataaagtttgaaaatgctttccactctg

SEQ ID NO: 9132 - DNA, 3605 bp, Homo sapiens
gattataaggtttgccatgtgaaaacctagagcatattttggaaatgttctaaacctttctaagctcagatgcatttttgcatgactatgtcgaatatttcttactgccatcattatttgttaaagatattttgcacttaattttgtgggaaaaatattgctacaattttttttaatctctgaatgtaatttcgatactgtgtacatagcagggagtgatcggggtgaaataacttgggccagaatattattaaacaatcatcaggcttttagcgacaaggaacacacacatttttcttaaaggcccaatcctaacagactccccgtaccagaggcagatctggaactcgtcaacaacagcccggatcacatgctgttactggactgcccaggtcacctcattgaggtgagcgctgtccctccaggtactcaggcaggtggtgcccaggctccctcccttggcgtccttcttcctgcgccaaacccatctcatccttaagatcagaaaatggaaccccctttgtcgtgaaaccgatcaagcattttgacaggaagcccttcattattcataacattgtatgctgaccaagacgtcagaagaccacctgtgcccttttctctcgtggaagataaaacctggactcagggagcaaccacaggctctccactttgaaactttagtttgaattttaaaagataggaagtaatacagtttaagttcctttctcacactcagtattgcatgcttagtgctggttttcttacaacattttggcaggtgtagctttttctgttaaaaatggtatacatgaagtcacatacttttttaaaggaacactcagaacattctgtcattccagtcagaaactgtcttttgaaatatttctttacaacctaccaaaaaaggaaggttgttttttctacatgtgcttgggtatctaacatctaccattaaaacaacaaatggcttgcagacagggcagtaatggtttatcctaaattactcaaccccttgtagccttgacaaattttaccttaaaaccaaaatgaaacacaaaaattaatccttaataatgatagcaagtgatctttctttttagttttagccttcctttttcaatagtaatatttaaacccacttttgaccaattgtttgcccaaatattcttgtcatttggagtcagtggaaaatccagcacaccaagcaccagtcttcttctgaggcaaaagaaaagtgttgtcattttcactctgttggagctgcacacttttttttctttttttttttctttttttttttgtcgtgtaagaaggatgctggtcagagctgcagaaaatatgaggcaattaaaagtctttagctgttagcaaacctgttagttttacttctgcattgaaccagcctcagaagctacttactgctttatgtactctttgggcattaatgccttctctgtaattatatctcgtttttgcttgacagtgacctacccaataattgcatcgtgcattgccatgaaaggtaaacacattgtgaactgaacttaccaagcagattctgtgagaaagcactggttgaggctgaacactgttgacacatcatttttattggaagagtattaactggtgcctcttctgaaacacaccaacccatattcctctgctcccccaaagctgtttctgatcctgctgggagcaactaactagttattatgcacatctgctccagacccagctctttaacttcatggttttacagcttgttttttctttttcttttctttttttttttttttttttaaaaaagcacctttttttgttgtttccccttaataaaagaggtttctaatttatgtttctctaagatttcctttggttgtatttagaaacacaaatagttttataatcaggattgcatttgtgctgggtaaaagaggagagctgtgctttctaccccaaagttgttggtaatggagccggtctgcccttcctacaaactcaagaggctcattgttcaaggtgtaacaacatttaattgcatgtcctctaacgctttgaaacctttagagggaagatcctcattttttacaattttgttccttttcatcatagaaaacatgtttaagataaaatacaaactttacctaccccaaattcataaagtacatttagtgctgtatagcactaaaacttagagatacagacactgtacttactttttaagaattagagacagtaactccaaaaataattgtccttttttctttctttctttttttacaataaggctcttgaaaattgtcattacttgtgttttcctatacattcatctgtgtgaaagcctttttcttctttgatttaaaaaaattaactatacagttaatggtttagaacttagaactacttagaattaatgctaaagtgtcaggaagaaattaatttagcttcaataattgtgactggcctcaggaattctcccttccacacctgcccacctcacctcactgcaccgcaccgcaccagagccagagcagctgcttgtctgcagcaggacacagttcctacatacgtttcagttctttcatggtaagctcaatggactttgaattgtttacagtgctgtatgtccaattgttaaatgtaccattctgaacgatgttaaagcaagtgtggtttatttatggcatgaaccatgtaacttgaaatatgaacttacaaggaggggcactcattaggtaacaagttcttacaccaaacttccttgatgaaataagccaaaataatcctaaaattcattagaagaacttgataaaagactcaaataaatgttagaaagagcccgtaattttaggactcctataaaattcttccttgtttgttaatgctattaaaactcagattcaagggaaataccagcttccacttgagtcactttgaaatagttaattcaacagcaccatgttagaaatatattggcagccaagactctgaactctgcagaaacatttgtttcacccagacttcaaactctagccctgactatgatgcccctgtgtgcatttacaataaagactccaacggagggagcctgttggtgttaaattgtttacatttctttatacaaataatgtgctttcagtgccttagttacagctccctttctgtttcttgttccaaggattctgtagtatgtagtgtgtttcttaggtaaagtctctttttgctactgaaagggaaatggtctctaaacactggtcactgtagcaggtaaacactactctaacgtggagaaatgagcttcatgctgaggtagtggttgccttagagctgttatttatgctgtagaaaacgaaaatggttttgctacctgataagcttcagattagatatagccctaaagttatcctgtacctgcattaaattttcattttagaagagaatcttggttttggtaattcatttttttttaagatcattatgtgcaaaacaccaagttttaaaaataactcacagaatggccttagttttcaatgtctgatggtatatttgtgagttgtgttatctgtaatatacatcccagaataaaggagtgaattaaatagttt

SEQ ID NO: 9133 - DNA, 1689 bp, Homo sapiens
tggggtggggggacattcagacgggcagtgttagaggaggagatgggagcggtgactacacacacacacacacacacacacacacacacaaacatgcacacacacatatgcatatcttgacattgctctgtaggtgagagaggaccatgacgcccatgtttgcagctgatacttgtttgggcacacctccaagttctcgggattagaaggacaagagcactcccaggccccagagtctaagcctaagtctctatcgctcttcccctctcctcggccactccccagataccagacctgaggcaattcacttgccagcacagatggccaacccacctccagattccccagtgcttccacacccgggctctgagcaaatggaaaagacttttcatttagtagacaattcacttctttttctgtgcttcccctatctgctttggcttcctaataagaaatccattcaagagctaggagatctgagggcaggcgggcagctgcagggaggagaggtgagaaaggaagcgtcttctagagacattggcccaggagctctgttctttcctaatctaagcctctgtcttcttcggcaaaccttgctttgaactctgccagtatttcattttaaagaatcccagagcgggagagagaagagaaaaaaattgataagagtgaggaaattgtcctgtagtctattgaaaaccagtcaaggtggttttagttcatagattttgttagatgttctttccacctggcctatgatgtttagatgttcatacttgactcacatttacccagcccctcctgcgtaccaggagctgtgttaggcactttatatacattattctatgtggccctcactgatgccccagggaagtatgcattagccttcccattttgcagttgaggaggctgagtagcctcagaagggtttaggcgaccttctgaaactcacagaagtcacgtgatggagagaggattcaaagccagggcctcagaccctcacacacttgtctgtgctatgatgtatgcaggatcccagcattgatacccaatgacaaactatggagaacaagcaaagtatgcaggccccctgcagcctcccaggacaggctggcaagggaggagggccggccagcatttggtggcccatcagtctggccatctgtcacgtcacagaagcaaaccgtgccttctggctctgcgccccatattcccagcatcatagacatccaacagcaccagcaggagagtgggctagcctgctggatgctgttcgtgcctgtccctgctctgcctcccacccagttgcctgaatcatcccagctcagatgcagccactgtctcttgtcaagtgggacctcatactattctcagaaggctaacttgagaggtttggggccttgttccccagagggtccccagggactctgcagtgtccttggcaaatccccactgtactcaatgccctacattctcttctgtggtctctcccctggcttgcttcatggccactgaaccaatcactttgtatgctatgctcctactgtgatggaaaacaaaatgagtataacttattttatatccatattcagactatatagagaatattctatgcatctatgacgtgcttactactgcagtgcatttgtcattagtcttcatgttaatacagtacatttattctttggt

SEQ ID NO: 9134 - DNA, 3140 bp, Homo sapiens
ggaaatacctttgtaaacctgcagaacattttacttaaaagaggaaacacaagatcttcaatgaacgtcatcggctacagaaacagcctaagtttacaggactttttagagtcttacatatttgtgcaccaaacttgaagatgaaccagaaaacagacttaaacaaaatatacaatgcaaatgtaattttttgttgtttaaggccttgccttgatggtcacagttatcccaatggacactaagttagagcacaacaaaacctgattctggtcttctttaccaatataatcataatgtaaataataatttgtatattgtgttgcagatgaaagtattccaggaacagtgaatggtagaagacacaagaacatttgtttgtttgtcttctgatgttttttcttaaaatagtaatttctcctacttttcttttctactgttgtcttaactacaggtgattggaatgccaaacactcttaagtttattttcttttttcgttttataaattcagtgtgccaaatgaaacttttttcctaagtaactgtaataggaaaaagtttattttgagagtttcttcttcataaatctacagacattaaacaattgttgtgttctttttaccttttatttttctattaccttgctaccaaacagtttagatagcaatataatagcaaaaaagcaaatatggtaaaatagagaaggtttgaaggtttgagttactctgtcatataacatgtagatcagtcttcatgtgacctgcagtatttttttttctaatgtatttgtcagaaatctgttgtagactgttaacttcttcctgatggaatttattttctgcaagaattattctgatatttaagagagccaattttaactgctgtgaaaatgtttccagtgcaagagaagggaaatactaggaactaagacatttctaatttattgcttattactttcttaattttacaggataattataagcaagtggaactaccatcttttattcttaataattattaatcccttcaatgaaactttaaaaaaactgaatttttatacatggcatacatttttctagttccttctgcttgctttattaactcaaaagttctagttctagtctgttgatctgccttttgttctcccaaaatgtacagtaattccatttgtttgtataaatatgcctggattttcattataaaaatgtcattgtagggagtagagactcatatcatggccttttaaatattgtaataaaggcaaatagatatttgcccttagtttactggttaaaagtttgtttacagaacttttctctggtgcttaaatgatgctatgtaaaatgtcatgagtggaaagaatatttgtagtagtaacaagaatttttcatttaggaaagatttcttaggttttgaaagaatacattaaaataaaaaacttgcccctactaggtaagaactttataatgaagacatacattcttcttaattttactcttgctcttgttaaagatttgtttgaatatagaagatgcatgatttctgggtttttttttttttttgagacagagtttcgctcttgttgcccaggctggagtgcaatggcgcaatctcgactcaccacaacctccgcctcccaggttcaagcaattctcctgcctcagcctcccgagtagctgggattacaggcatgcgccactaccccagctaattttgtatttttagtagagatggggtttctccatgttggtcaggctggtcttgaactcctgacctcaggtgatccgcctgcctcggcctcccaaagtgctgggattacaggcataagccactgcgcccagccagaagatgcatgatttcttaggatcatatgctgtttgtagccataaggtaaatcatgtctcttccaatcatgactttggaactccctgaataataaaaatgagagttgagataaataggggaaaaaaaatttttttcaagccagagctatgcatatgttaggtgatgggtagtatccctttaaggtctcaaacattacaacatcaattatgaaatactgataacgaaaggtagtaatgaaatatatatgatgaaaagaattgagaagttctaaattaagacatttcagttaagctcataaaatttcattgttttcatttaaaagattaacgttattgatacttggataactggctaatcatattaaaggactatgtggttccagctcaacttttaatatattgtctcctttaaaactatcatggttataattctattgggaaagacttttagataacaaagatttcaaatgttaaaagagataaaagtcaggttaatactatcttaaacactgagtcagaaaatcattactgtatagaagttgctttcctgatcaagtctgaacttcagctagtgctagagaactattttctatgacttaactctaaccaagttttattttaagctgtttctttgatagaagggccatgaaaatagagtaatgatatagtaggagataagggattggtttggtctttttcaataaagatagaagttgctgaagttttctgaattaataatgacttagattgtgaccttttagattcggtgttgagctctgtgttgtattacttcctaaaagataatgcttaaacattaagcattagtgtgctcttcatgttaatatggcagagttttgtaaactaaattaaaacttactgatatattggactttgagccaagggaaagaatgagtactatctttccagatatcttaagggtaaaagcttattctaagacagtctgtccattgagaatattagatttctgacttgcaaatatgtttgtactccagaagaattagaggaaaagcagatactagaattctaatttaattacatatacagccgtctttgtttatagtgtagaattctttatattttgtacaaaaactaattcttttggtaaaatgaaccatttacagttcggttttggactctgagtcaaaggattttcctttaaatgcttgtctcaattttagtctggtcttttgtacttttcttcagaagaaatgaattaaagggtacagttgcataaagtgggtttttatcctaatgtattggaaataaatgataaacttt

SEQ ID NO: 9135 - DNA, 1027 bp, Homo sapiens
tagactctaacttatttttataaggaatattgactccttggcttccaatttatttagtaatccaactttgcattgactgtttaatcatttactctaaatgttagataatagtagtcttgttcacatttcatgaaacctatgaaactatatttttgtaaaatgtatttgtgacagtgaaatcctcgtaaatgttaaaggctttaaataggcttcctttagaaaatgtgtttctttaaatttggattttggtatctttggttttgtagttgactgcagtgtgatgtgaccttacctttataagagccacttgatggagtagatctgtcacattactaagatacgatatttctttttttttccgagacggagtcttgctctgccactgtgcccggccaatacattattattaacttaaggctgtactttattaaggcttccttagtttttgttttgttttgttttttgagatggagtctcactctgtcgcccaggctggaatgcagtggcatgatctcagctcactgcaacctctgcctcctgagttcaaatgattctcctgcctcagcctcccgagtagctgggattacaggcacctgccaccacgcccagctaatttttgtatttttagtaaagacgggggatttcaccatgttggccaggctggtcttgaactcctgacctcatgatccacccaccttagcctcccaaagtgctgggattaggtgtgagccaccgcacctggccgatattttctttaatgaaatttataaatatgcttcttgaataatacacattttgggaaagggaaaaatgtctgttcaaaaagtaaaagtctcttttatagcttttccaaacttaattgctaaatttttctttgaggttctcctgaattatgtcttacaaactaaaagcaaaaatttttagcagaaattttggaatacattctatctagcacaatttgaatttttaattatcaagatttttgttaaagtttctctcctttaaaaattttagtacatttgtaaat

SEQ ID NO: 9136 - DNA, 946 bp, Homo sapiens
tccaagttatacatgaatagaaaaagatggtgttaaatttgtgtgtaggctgggaattcttgctgaaggaattggagaaaacctgttgctgcaaaattttacatgttccagatggaaagggaagtctaagcgctttttaaaacaatttttttttgtatttaattaagcaattgcagttatctgggatttttgggtcagaattttaaattctgtttgattctccatattccagtgaataaaatacaaaagcattgtgtttttaagattgtgtcgatattcacctaaaaacttgtgccaaaagcacctggattggtaattatatttcacttaaagggtaaatttgacaatatcttgataatcaaaagtgcaatttttttcttcaaaatgttttctccagcatcacagatcctgcagatatatatttatatttatacatatatatttatgaaataattcttactcacaaaatatatttctgataaacattaagatattaaatctgatgcacaaactttttaatttggccattaatcttttttatttaaaaatttaaatttgtttttaaaattgtatatagtttttaaaatctcacacatgcttcgatacttccttgttaagaattcttaataactactaaaactgatttttaatagttgctgatatatatttggtttgtttgggtatacttttcaaaaccatttttgaatgtccaaacatctgatttaaagtttctgtttatctttctgaccaaaggagcaagaggtataatggatatggcattcattaaaatctttactatgtacaaaaacagtaatatttacagcatcagtaaatatttttaagtggtacttctaaatcataaaagttggggaaagagacctttaaaatcttgtggtgttgaacaatgttatatgaagtagaaaaaataaaatacttcccagttgtg

SEQ ID NO: 9137 - DNA, 994 bp, Homo sapiens
gctgcattgatgtggacttcatagacacaaaggcttcgaagcacaagccaaatatgtcaatatttgtatgtaagaaactaattatgtaataggtaatgaaactgaaactatactatgcccttaaggagatccagtttaattcaaggtgatcttttatttacctgtacaggagtgtaaacttttttgtgcttttatttttcaattgtgagaaccactgattggtatgttcaacaaatttgtgtatacaaagaaatggataaatcactgctatataagggaaactaccttaggaaagaatgtttactgaatgtttattttattttattttttttttactatagagtgaggggttgttaacaaagaatatatattggtcattcttacaactactatttaaagtcagcaacttttcactgaatttgatagattttatgtttggccatatcttcatgctcacatttgatttctgaagacctcctacatacacttcaataaaagttaaatggacatactccctcttttttgatttactggtacatttttaaaataataaatctgccataaaatgcattatatctggagacttgcacttgtatggatgaatttattacattcaacatatttaattttatgccttctaattctaagatgcagaaaaaaataaatgaacatgattttattctatgccaacatttgggcctctgaatgtatctgttatttgaatttaagtatttgaaaaggaatggtcaatttgaaagtcattctaaactgattttttttttctaaagggctccttttttcctggactatgtggttttatgactaaagtcacatgtatgtattaaacattgaggctctgtagaggagagaggatgtacctctctggtgctgttacagtacattctgtacctgccatacaggctcattttcatgcaaattcttcctagagccaaataaataaagacttaggtgaattagtatgtcttgtttctaa

SEQ ID NO: 9138 - DNA, 111 bp, Homo sapiens
ttctgctggaagcagattctggaaaaggtgctttcacctgctggtaaaagatacatctgtatatctgaaatgcaagatattgatttttaaaataaatttgttttatgactt

SEQ ID NO: 9139 - DNA, 961 bp, Homo sapiens
aacagaatctacataacctaagcccatatactctgcactgtgtaaaggaaaagggagaaatgtattatacttgagacattgcacctaccccggaaggctggaaatacagaaacagcatggaattgcaagtcctctgaagacaatgagaggatttaggatgagcccgataggtgtggcagaccaaatggacatttctctaaaaaaccagtatatatagtctgttcatatgtaaaattcaatggaagagaggtggaacagtgctgttattttaaacagaaggttgtattattatgttgttttgtttttttactattgcttgattaaatttggcatttaaatagtggtggaaatattttatataattttcattttttggttgtgcagttccttggctactgtttttcttttacttcagttttttaaaaatctcaaatgaaaaagtcttcgatacaatattgttaagctgtattataagtattgttacacagggttatgcaattcccggcctggagcatttttgaaattcaaattgtctgtcctgtggagcaggcagtgattttgttccaaaactttgtatacacatttggagaaaagtactttatattttcagtgttttgtctgattttaatgtccgttcttagccaagctgctagcaggtgttaattggatccctttccttcactgaaatggaagagtttataagcttacgttagtattgtaatatgtaaagtaagcccaacaaaaatttttaaaaatttgatgatccccaatatatctaccattgtatgttaaataaatcaccatttttgtagaaaaaattctacctgagagtaattgtcaatgagtacatgtgtataagttgtatcccactctccccacttttatcttttccagtggtcttctgttaatgtagtgtcttttacaagttaatcattaaatttgttagatcttgttatgggct

SEQ ID NO: 9140 - DNA, 1854 bp, Homo sapiens
cttcaggctgcggaaactgaaggcaataatgttggcttttggaaggggcaagacgagaaactctgaagaaagctctgactctcaggaagttatctggaaagatacctggatgtttactgccttgggacactgtgggatctccatgtttggactatgggacagagaattgaccctaactaactaactatgaactatttatttcctcctcccctacccctagttaagtgccacaaagactgtgttatgtagtcagtacttttttctcatgtatctttctctagaccatttatatacgggtgaaatgaaagcttttttgcatgtacttgatactcagtctgtaaactcagacttcgctttttttgtgagactatcctttcaatatttttataaacttttgtgtgtgctgtggcagggaacagttaacaaggagtttatttagaggggtttttttcattttttgtttttcttgttttgttttgttttgttttgttcttcttggtgtgctttttggatgggaccagaacttaacattttcctgaggactaggaagctcatcagacactggaatgcagtgattcttctaatgatggtcaactgcaaggagaaactgtttacatccttcccactacacagttgctatgatatgtaacaagtcacacatgtatatatcacacaagtcttaccaattctgcgtcactaggaagctatagcatggtcgtgaaagctctcctaatacttacttaaatagccatggaagaaaattatgcttgtcccttctgactgggttaagccatctttcttaagattcctgaagtagaaatagcaattaagaaattaattcaagttttgacggttaacatttagcagaaaaacaaaccattgaataagctactaggtgaaatgcaaaacaaccatcaatttttttaaactcaataattttgtgaaaaaaaaaaccaccaccaaacttttggttgtaaaagagaacccttgttcccttcctaagaaactgccttccacaattaaagaatactcatagaaagaaaataatcataaatcatatttgattaacatttcatttaagcttttaaaatatcaattttttaaatagctcccatttacccaaaataactagttatgggtctatttcttccatgattagaggagagagaacttgattcaagatactgaaaaatagagctgggactgagcctgtgaatgacaggaatgatctattaccaggtgactagtcggaaactacacagacgtgcactggtctgcatttgggggctaaagtgtatatattccatttaaaatggaatttgtttgtatttggggcagtcttcagtaaagcctttctcctttcttttctccattgaggacagttctgctcagcaaaattgttgagtacctgttctgggcaggtcccacgctatatgcacaaagttaagaaaaacttggtcttagcccttgggagctgacagcccatgggcattaaggcaaagtagttccagtgatttaaaatacggttccaaatacgctaaaaccaacttgtgccaaccagatttacagattggaaatactgcagatgatgtgaagttatcagttggaggagctgtgattaagctggataataagagaacgtgccatctgtaaagcactcagaaggcagccatccctagatgttggtttcatgtatattacactatctactactatccataaatgcaataatatgcatgttaacaacattaaaaacagcaaacagcaatctaagtacagaaaagctttttgtgtgtttaaaaaaattgaagaaaattcaggaagaaacgtgttaataaacattgtactgttctt

SEQ ID NO: 9141 - DNA, 2433 bp, Homo sapiens
agaaaggcaactaggatgaggtttcaaaagacggaagacgactaaatctgctctaaaaagtaaactagaatttgtgcacttgcttagtggattgtattggattgtgacttgatgtacagcgctaagaccttactgggatgggctctgtctacagcaatgtgcagaacaagcattcccacttttcctcaagataactgaccaagtgttttcttagaaccaaagtttttaaagttgctaagatatatttgcctgtaagatagctgtagagatatttggggtggggacagtgagtttggatggggaaatgggtgggagggtggtgttgggaagaaaaattggtcagcttggctcggggagaaacctggtaacataaaagcagttcagtggcccagaggttatttttttcctattgctctgaagactgcactggttgctgcaaagctcaggcctgaatgagcaggaaacaaaaaaggccttgcgacccagctgccataaccaccttagaactaccagacgagcacatcagaaccctttgacagccatcccaggtctaaagccacaagtttcttttctatacagtcacaactgcagtaggcagtgaggaagccagagaaatgcgatagcggcatttctctaaagcgggttattaaggatatatacagttacactttttgctgcttttattttcttccaagccaatcaatcagccagttcctagcagagtcagcacatgaacaagatctaagtcatttcttgatgtgagcactggagcttttttttttttacaacgtgacaggaagaggagggagagggtgacgaacaccaggcatttccaggggctatatttcactgtttgttgttgctttgttctgttatattgttggttgttcatagtttttgttgaagctctagcttaagaagaaactttttttaaaaagactgtttggggattctttttccttattatatactgattctacaaaatagaaactacttcattttaattgtatattattcaagcacctttgttgaagctcaaaaaaaatgatgcctctttaaactttagcaattataggagtatttatgtaactatcttatgcttcaaaaaacaaaagtatttgtgtgcatgtgtatataatatatatatatacatatatatttatacacatacaatttatgttttcctgttgaatgtatttttatgagattttaaccagaacaaaggcagataaacaggcattccatagcagtgcttttgatcacttacaaattttttgaataacacaaaatctcattctacctgcagtttaattggaaagatgtgtgtgtgagagtatgtatgtgtgtgtgtgtgtgtgtgtgtgtgcgcgcgcacgcacgccttgagcagtcagcattgcacctgctatggagaagggtattcctttattaaaatcttcctcatttggatttgctttcagttggttttcaatttgctcactggccagagacattgatggcagttcttatctgcatcactaatcagctcctggattttttttttttttttttcaaacaatggtttgaaacaactactggaatattgtccacaataagctggaagtttgttgtagtatgcctcaaatataactgactgtatactatagtggtaacttttcaaacagcccttagcacttttatactaattaacccatttgtgcattgagttttcttttaaaaatgcttgttgtgaaagacacagatacccagtatgcttaacgtgaaaagaaaatgtgttctgttttgtaaaggaactttcaagtattgttgtaaatacttggacagaggttgctgaactttaaaaaaaattaatttattattataatgacctaatttattaatctgaagattaaccatttttttgtcttagaatatcaaaaagaaaaagaaaaaggtgttctagctgtttgcatcaaaggaaaaaaagatttattatcaaggggcaatatttttatcttttccaaaataaatttgttaatgatacattacaaaaatagattgacatcagcctgattagtataaattttgttggtaattaatccattcctggcataaaaagtctttatcaaaaaaaattgtagatgcttgctttttgttttttcaatcatggccatattatgaaaatactaacaggatataggacaaggtgtaaatttttttattattattttaaagatatgatttatcctgagtgctgtatctattactcttttactttggttcctgttgtgctcttgtaaaagaaaaatataatttcctgaagaataaaatagatatatggcacttggagtgcatcatagttctacagtttgtttttgttttcttcaaaaaagctgtaagagaattatctgcaacttgattcttggcaggaaataaacattttgagttgaaatc

SEQ ID NO: 9142 - DNA, 425 bp, Homo sapiens
attcagagcaggcagagcaccagcaagtgctgctttactaactgacgtgttggaccaccccaccgcttaatggggcacgcacggtgcatcaagtcttgggcagggcatggagaaacaaatgtcttgttattattctttgccatcatgctttttcatattccaaaacttggagttacaaagatgatcacaaacgtatagaatgagccaaaaggctacatcatgttgagggtgctggagattttacattttgacaattgttttcaaaataaatgttcggaatacagtgcagcccttacgacaggcttacgtagagcttttgtgagatttttaagttgttatttctgattagaactctgtaaccctcagcaagtttcatttttgtcatgacaatgtaggaattgctgaattaaatgtttagaaggatg

SEQ ID NO: 9143 - DNA, 296 bp, Homo sapiens
gattattcccaataaagtggaaacttgaaaaatgttattacttcctagggatagacaatttagcagttggaaatctcaaattttttatgccagtaaagaaagggggactttatataatgttttgttctttttgtactttagaatatgaatgttcattgacttgaaaaaaataatgcaatggcatttcagaacacaagtatcacagagatggacagttacaatttattgctatattgtgatacgtgaggggtttaaggacaccaacaggtaacttcttattcccctcttcactttgg

SEQ ID NO: 9144 - DNA, 811 bp, Homo sapiens
tatttcagcttggacattttacccttcagtcggcccaagaaatcaaaataaaggaaacacatttcatatactgcaggtaacaaaagtcaaagtattttatcttttcacagcaagaacagtccatgttgtatataatacaaccaacattatagaacttttagggttgtgactggctttggtgcaaatgtgtgctcaagctaataagttattgtgaaactgagtttcctttaacttacaaagctagttgccatatttctattttattttaaaaagtaaacatgcggctgggcgtggtggctcatgcctgtaatcccagcactttgggaggctgaggtgggcatatcacctgaggtcagcagttaaagaccagcctgaccaaaatggagaaaccccatctctactaaaaatacaaaactagccgggtatggtggtacatgcctgtaatcccagctactcaggaggctgagacaggagaatcacttgaacctgggaggtggaggttgcggtgagctgagatcgtgccactgcactccagcctgggcaacaagagcaaaaatccctctcaaaaaaaaaagtaaacatgggcactgattgttttaataaaaatgggaaacagactaaatggctattcacaggaaactgataagatatatgttatttttttaaatgagctagggcaatatgttttgacagaaaactctctaagatttagtaagtgaaaaaaagtaggatgcaagagtttttatagttgattccatttttgttgaaggagaaaaactaaataaatacgagtaatttcatagaaacgaat

SEQ ID NO: 9145 - DNA, 494 bp, Homo sapiens
tactctgatttagtttaggataattggttctagaattgaattcaaaagtcaaggcatcatttaaaataatctgatttcagacaaatgctgtgtggaaacatctatcctatagatcatcctattcttatgtgtctttggttatcagatcaattacagaataattgtgttgtgatattgtgtcctaaattgctcattaatttttatttacagattgaaaaagagggaccgtgtaaagaaaatggaaaataaatatctttcaaagactcttttagataaacacgatgaggcaaaatcaggttcattcattcaacgatagtttctcaacagtacttaaatagcggttggaaaacgtagccttcattttatgattttttcatatgtggaaatctattacatgtaatacaaaacaaacatgtagtttgaaggcggtcagatttctttgagaaatctttgtagagttaattttatggaaattaaaatcagaattaaatgct

SEQ ID NO: 9146 - DNA, 147 bp, Homo sapiens
tctggaagataaagagcctttggtaccgcaagccctgtcatctgtgagtgtggcacagtgaaggcctggagagtcatgacctaggccctgtgaagtcaagtatttttaccaagtaaaaagattggcaataaaacatttccacatagt

SEQ ID NO: 9147 - DNA, 874 bp, Homo sapiens
ttcgaagggcatgaacatttttatgactcttggcctaaattactaggccaaggttttttcaaagggatgcactaattttcactatttccccacaccctttcaggtgataaataattgacttgatttgtttacactgacgccaagaattcttgggaagaaggatcaaagtgaaaagtggtagcccatggtggggaggccacactcagtgcagttgtgaagtcagcagcatttttaagcccattcattgccagtagccctgagatgagcattcccaagctgcttcccaggtccctcctccactctctcagggacatccattctgtaccagccccctcagatactcatgcccttgccctcccttctccatgctcattaaaaccagcttaagagcagatatgacatcagtcacttaccttttcgtgtggctctaaatcaaagtgtcacctctcccaagcacatgcttgcatcttagctctgattgaggaatgaaaagctttgttctctgttaaaagaactttgagcttagatgccccagactgagaaatccaccaaaagctggacctttgacttgagcggcaaaggacccccatagtcaggctgtgatttgaggagcatcaagaggccagagtttccaagttgggacccagaaggtggggttggcagggggagggtaggagcagctggagactctgctctaccaggggaatacggaggtggggaccaatcccagggtaaggaatgaaagtaggagccccagaagctgaaaacatacttcaccgatgtcagcattttacccagagccattccaaggtgaccataactcacttaaaagcctgaaagctgttttatgccaactaataaagtgcagtttaat

SEQ ID NO: 9148 - DNA, 818 bp, Homo sapiens
ggaagtgtgaagatatgatccagtccagggctaggctcagccacctgtctcctgtccagaaaaaaggtgaagattaagaagctttcagaatgattctatggattaaaatcatacaaatggtggctgttctgagaatcagtctgggtattgatttccttttccagtgactggctccaggccatgtctaatgaccagctcgattccctgtgcagttcagagggcaagtgaacccaaccaacaatgtcgtcatctaagccctgaccctagccagggactcccatgctgctgttggctccatctctccacactgcctctttcttttcaactttttgcccttcctttctttaaagctattctcacattgcttttatttcctcctccttcacctccaaccactgtcagcagcactctggagttttcaaatgtcacattagcctcaccctgcatgctaggagatggacctgtctctatacagcagtagatgattgataagtgaggaaactgaggcttacagaggttgaagaccaacaagctaataaataaaaagttgaggccgggcacggtggctcacgcctgtaatcccagcactttggaaggccgaggcaggcggatcacgaggtcaggagatcgagaccatcctggctaacacggtgaaaccccgtctctacataaaaaattagctgggtgtggtagcacgcacctgtagtcccagctacttgggaggctgaagcaggagaatcgcttgaacctgggaggtggaggttgcagtgagccgagatcatgccactgcactgggcaacagagcaaaactcgatctc

SEQ ID NO: 9149 - DNA, 70 bp, Homo sapiens
gaggccaggaagtgtgaacatactgatagaaaaagactatattttatccctcataaaatgttttaaatgt

SEQ ID NO: 9150 - DNA, 710 bp, Homo sapiens
ctgtcctcactgggcctgtccacagtgcgagcgactcctgaggggaacagcgcggagttcaggagtccaagcacaaagcggtcttttacattccaacctgttgcctgccagccctttctggattactgatagaaaatcatgcaaaacctcccaacctttctaaggacaagactactgtggattcaagtgctttaatgactatttatgcgttgactgtgagaatagggagcagtgccatgggacatttctaggtgtagagaaagaagaaactgcaatggaaaaatttgtatgatttccatttatttcagaaagtttgtatgtaacaattacccgagagtcatttctacttgcaaaaggattcgtaacaaagcgagtataattttcttgtcattgtatcatgcttgttaaattttaatgcagcatcttcagaacttgtcctgatggtgtcttattgtgtcagcaccaaatatttgtgcattatttgtggacgttccttgtcacaggaagattcttcttctgttgccttattgtttttttttttttaagtctcttctctgtctttgtactggaatcgaaatcataagataaacagatcaaacgtgcttaagagctaactcgtgacactatgcagtattgtttgaagacctgttgttcaacctctgtctctttatgttaactggatttctgcattaaatgactgcccccttgtt

SEQ ID NO: 9151 - DNA, 808 bp, Homo sapiens
cctatctgagggctcggctgaccagctgactatcctcagcagctgggcttgcctgtggagggagtgacttgcactggcagcactgcatgtcacctgggaacccctgcagacaaagctaacatcccagacagacagatgtgaccaggacaaacgtgcaataatgccaaatgttaaaatgtgagtttaccagcctagctatgggactgctggctcctagtccaggaatcatgggggtatgactgcctctccaaccctgtgggctgtaagcaagctcaggctagtctccccactgggggctgtgcccctccctgggacggttccgtgggcagccccatcactgtgttcaatagtgtgagaatgtagctaaagcccctgctgctgctgctgcacatgccacagcaggcggtgggggctgcgtggggacaatccatcgtggagtgttctctcagcttaggtctggacaggagacttggcgggagatgctccaggatgtgggtgattctgtacctggggaggctatctctgacctcccgacaggggacactcccaggccagcccaggggtcaggggcagaggtgcacacctcagcatgagccaagactggggtcagggagcaggtgtggtttgagccaggacctggggcgggggtggggccggggcctttctgcctcatttgctttcaatgaaagcctcaaagcagccaaaaccaggctttcccccttcctcgagtttgaatatccagaatcttttgtacttcttgttggttaaattgtttatttttgtaaaaaataaaataaaattagttaat

SEQ ID NO: 9152 - DNA, 2339 bp, Homo sapiens
caccctggcttcagtgcaactcttttccttcagctgcatgtgattttgtgataaagttcaggtaacaggatgggcagtgatggagaatcactgttgattgagattttggtttccatgtgatttgttttcttcaatagtcttattttcagtctctcaaatacagccaacttaaagttttagtttggtgtttattgaaaattaaccaaacttaatactaggagaagactgaatcattaatgatgtctcacaaattactgtgtacctaagtggtgtgatgtaaatactggaaacaaaaacagcagttgcattgattttgaaaacaaacccccttgttatctgaacatgttttcttcaggaacaaccagaggtatcacaaacactgttactcatctactggctcagactgtactacttttttttttttttttcctgaaaaagaaaccagaaaaaaatgtactcttactgagataccctctcaccccaaatgtgtaatggaaaatttttaattaagaaaaacttcagttttgccaagtgcaatggtgttgccttctttaaaaaatgccgttttcttacactaccagtggatgtccagacatgctcttagtctactagagaggtgctgccttttctaagtcataatgaggaacagtcccttaatttcttgtgtgcaactctgttttatcctagaactaagagagcattggtttgttaaagagctttcaatgtatattaaaaccttcaatactcagaaatgatggattcctccaaggagtcctttactagcctaaacattctcaaatgtttgagattcaagtgaatggaaggaaaaccacatgcctttaaaactaaactgtaataattacctggctaatttcagctaagccttcatcataatttgttccctcagtaataggagaaatataaatacagtaagtttagattattgaattggtgcttgaaatttattggttttgttgtaattttatacagattatatgagggataagatactcatcaaattgcaaattcttttttttacagaagtgtgggtaacagtcacagcagttttttttaccaacagcatacttaacagacttgctgtgtagcagtttttttctggtggagttgctgtaagtcttgtaagtctaatgtggctatcctactcttttgggcaatgcatgtattatgcattggaaaggtattttttttaagttctgttggctagctatggttttcagtacatttcctactttaagagtaattactgacaaatatgtatttcctatatgtttatactttgattataaaaaagtattttgttttgattttttaacttgctgcattgttttgatactttctatttttttggtcaaatcatgtttagaaactttggatgagttaagaagtcttaagtatgcaggcgtttacgtgattgtgccattccaaagtgcatcagaactgtcattcccttctaatatcttctcaggagtaatacaaatcaggtatttcatcatcatttggtaatatgaaaactccagtgaactcccaaggacatttacaacatttatattcacacgctgtatggaagggtgtgggtgtgtgtgaaggggcgagtggagacactgtgtgtatctctagataagaagatatgcaccacgttgaaaatactcagtgtagatctctatgtgtataggtatctgtatatctttccttttgtttacaactgttaaaaaacctcaaaatagttctcttcaaaagaagagagattccaagcaacccatctttcttcagtatgtatgttctgtacatacttatcggagcgcgccagtaagtatcaggcatatatatctgtctgttagcaatgattattacatcatcagatcagcatgtgctatactccctgcaagaaatatactgacatgaacaggcagttcttggagaagaaagagcatttctttaagtacctggggaatacagctctcagtgatcagcagggagtttatttgaggacatcagtcacctttggggttgccatgtacaatgagatttataatcatgatactcttcggtggtagtttcaaaagacactactaatacgcaggaagcgttccagctatttaatgctggcaactactgtttaatggtcagttaaatctgtgataatggttggaagtgggtggggttatgaaattgtagatgtttttagaaaaacttgtgaatgaaaatgaatccaagtgtttcatgtgaagatgttgagccattgctatcatgcattcctgtctcatggcagaaaattttgaagattaaaaaataaaataatcaaaatgtttcctctttct

SEQ ID NO: 9153 - DNA, 93 bp, Homo sapiens
ccttatatgttgtgcttctgaccattttctcttttcctctctttccttttttttttgtttgtttgtttgcaataaacataagttcttgtgtac

SEQ ID NO: 9154 - DNA, 2389 bp, Homo sapiens
aagctggggagcctgaacattcactccttgtcctccatgctgtggctgtatcagctccctacaagttcgtttacacctggcagcacggcagccacacaccggtattccaaaccttaacaatgaagggggttagtctcttttatttgattcttaaatattcaaataaatattaacagtaaaacataaacacaaaatttgccaacacactaattttcttatagagtaaatgagtaagaattcatcattttttccatctcccttctcccttgtcatcagacacattgtgcaatgtggcttttcttttcttttctttttttcccctttttaatattctggcaatctttagaaagggagattccaaactcccatttggtaaaccagttgattatttggaaatgttcactgccaaaatagtaagtgctataactaaatgcgcttttaattaatgatatagtgtttggaaaggagtagaacatgcagcataagaaactgctgcagagtggtgcgaggagtacattttcagagcaggtgcagtacatcttccggctctatgaatcattatgtgagaaagcaggataacattaggtaacctgagcctcctgtgtggtattagaaagtataccgtcaccttttcacatcactggagtgtaaaatttaaaacaagatggtgattcctgacattccttggctgtcagtgctgcccagattcagaagaatattgcccacatttcactgtatttggtgctgggtcattttgaccttgctttgttaataatatctttaaaaacaaagacaatccttaaagctttgctcctcacacattaccttctaattatagtttgaaaatagattccctacacatacatacatatgtatgcacagatagggtcttgctatgttgcccaggctggtcttgaactcctggcctcaagcaatcctctctcctcagcctcccaaagtgctgggattacaagtgtgagccaccacacctggctccagaaattttattttatttttttgaggcagggtctcactctggttgcccaggctggagtgcagtggtgccatcatagctcactgtagcctcgaccttccgggatcaagcaatcccacttcagcctcttgaatagctgggactagaagcatgcaccaccatgcccatctaatatttgtatttttagtagagacaggatctccctatgttgtccagcctagtctcaaactcctgggttcaagcaatcctcccacctcggcctcccaaagtgctgggattgcaggcatgagccaccgtgcccagcctcaaaaatattttttaaaagaaaagagaaaataattcttctgtcaaaggaggttaaattttagttgatagagtacttaaatgcattactttattaggttatgtaagtggtcagtgcattccagtatgtgtcacaacagtgtagttcatattcatgataaaaatgaaactgtgataagacatgaaaattatattattaaaatgttcaattgtaatggtaatcatgagtatacttaattttatttatgtatagaatatttgtatttattttttggacatatatttatcactttgtcattttttttaaccaatttgagaaatgttagctgctgaattaatttgttgcccgagccttcatattttcttctttgctgccttctccctgtggcaatgtactgttctcacattaagccttttaaaaatgttccatactgtattagcatccttagaagggacagaactaagaaatacattgctcaaataatattttactttattgataatgacaaaaagaatattttttaaaccccatcaaaatagatttcaattgactgtttcccctacatcttttgagccacagtcgcccatcgaataagcaaatttgtttttgagaataaactggtaaccagtttgtgatgactctcagaagccttttggctgggttacagaagagtttctaagttcctagagagccatttaataattagttggtgagccagaggcttgacagagctgttacttatgtgtgagggctttattctcaggcagtagtttattcatcatttggtaagcccctccccacactcctctaatttaaacaagtagtgaaggcttatcttaaactgtgtagtaccttagacttggcatttatttttgatagagcagagataaaatattttgatggaaggaaatcaattttctgtaactgatgatgtgaaaattttattttctgggaaattatatagccattcaaaaattcaaagtatgttattatgattggttacaagagaataatgttacatgtttaattgtaatatttgtctcctatcattttcttccctttcagtcataataaatgatttacaaaaccca

SEQ ID NO: 9155 - DNA, 431 bp, Homo sapiens
aattcatttgatgtagatgaacctgttcactggaaaattacagcaatttattaaaacctcagtaagagcaaaacaaggaagaagattccttatatcttcttgttagacatcttctgtgattgttatggcatattacaccaatcagagaaatagagttttaaagtagtggtttgatattgattttataatctctgtaaaaatgaagataaaaagccagattgtacaaaagtcacctgacaaagactagatgaagctacaactttaagcaaggggtagagttgtaatagccttcaccatcactctgtattttacattcatttcgtttctgtcacttattcagtatctttttatcatctgacagctaattaaattataaagttgctatgatggtaacacaagttcttcaaatacaataataaatatcatcatct

SEQ ID NO: 9156 - DNA, 296 bp, Homo sapiens
acatttacttaatttcatctgaaattttaacacaaaacctggggtgccttgggaattccttacatttttctctatgtatttacttagagtatcttctttactattaaaattatttaagtagtacatctatttaaataacacactaatagtatactgtagaaaaaataaaaatttgatatgaataaagaaaaatttttaaatcacctgtcatcccaccacccagacatgacttagtgttcacataaacctttttgattttccagttttcattatattaaagatgagtggtgattctt

SEQ ID NO: 9157 - DNA, 241 bp, Homo sapiens
acctatttcaattattgtatatttatttcttcttttccaaatacaaataagattatactgtgaattaactattgtggcaatatgtgaagaaagttaaactgtataatttgttaaaggacaagctggatttcttggactagtgcatctccctgtatatcttgaagctttttaaaaggaaaaattattgtagaaccacgtgtaattttttttaaaataaaagaatcttctactacctacctct

SEQ ID NO: 9158 - DNA, 552 bp, Homo sapiens
ttcacgccagacgtctgcccgctggtgggggacctgagcagacccttcaactgcactccctcctcaggagccccttcctggggacagtgaggacaatgaccctacagatgctcagctacatccggcccagggtgctgcagtggcacagaccagccacaggatggcagtagaataaagacagtcgaaagggatttctgctcactggcaggagactgcgatgactgggagaaaacctgcactcggtggcacctacaacgttgctaatttatttccttttgatatgcatttatataggcaactcgatataggatgggagcaaactaggaatgaattgggtagctagactgtgcaggaattgttggaacctggagggaacaataacagtagctagcagatttggcttcatcttccaggggccccacactccgtggtgagccaccatcaatacagaaagtgacctaagatgtaccagcaagatgccatcccttctttttgtgtggggtcatgggctccaaaagccaacgtgaacaattaaaaatgtattgagcatct

SEQ ID NO: 9159 - DNA, 2257 bp, Homo sapiens
ccttaaaaaccttctaaaatgcttttgattctgaaaattgggggaaaaaacttttaatcacaattttcttcaatacaaggggaaaatattcttgcggattcccaacgttttgtgatatgagcagaaaatcattagcatttcccatcatttgttcatatttgtgttttctgacagttgccacttgtagcattgcctgtactacagtattttttgccaacctcaggcatactcgttacatctgtattgaactttcggccctagaaaccagtggagttatttcaccacaaatcaacaatgtgcctgaggtgcatgggaaatatagttagctatactctgaaaatacattatgttttttttctttaaacaaaacacacaacatgtaagcatgtaagagtaaagaattgtatgatatgttccttttttcagttcaccaagttggaagccttttgcagctctgtggcttggaatttcatttgagcaatttctataggatatgtatttattattgattgttatttaatttttttccaattttacctgtattaccaaactgggttctccaataatgtccaaattgtaatgttgccttgcttcaagataaagtgtatttgggaataatattataaacccttacaaattttatgcatgtatctactgcatccttcaactctcactagaaaatcttttgaaaccaaatggattaatttatggctatttataatttgctttgacatctcactgttggaaattttttaaagatgagatttgcctttataatgtaaattgtgatttttgttttacatgtgggtttctatagttttaattttttcagcttttaagatacgagttttgtgtaatttggtatttttaatcatttatgttattttaaaagctcagaatatcacattgaaattactataaatacatttaaaattatctattttagatctaaggaaatactacagagatattttcatgggttcagtaacttttcattttataacattgggcacggtacagagtgattgtcacataaggtacttgaagatttattagtttaattctatttttacagtaaccttgaattcttctgagttttgcatgtattaaattcaattaatgctgaacatgaagagtaaagtatttatctgaaagaagtttctgggttaggagaagtaatgaatgtatccatttgtacatggtttacatgttgtggatgctttgtaaacattttcctgtatgtttaaattgtgtttcagcaggatgtaattgcccttgtgtgtagttaaaatgagtcatcatctggtcctttgtgaaatggaattcatggtattttctgtaacgttttcctgaagctgtttctggagagccacacatttaaatacagacagctttcctgatcatttgatttattgtgcacctgatttttggtctaaaaggaattattgccacaatatattttatttattctttagattttagccttgtaagttaaagtgctttacatgatgatgtgaaaagctgtttgtccctttactgggtttggggggttgttaaaagatagggaatgaagaatgcaaaatggtttatcgttcaaactgtccactctgatccaaccctgtactgatagtacttcccagtatgatattgtgatgtttcatacaatgcagtgaacataaccaacttgttacctaaataaagaattgataaaaacagtgtgacatattactatttggtatgattcagtttttaatgttattttaaacttcttatatggttggcatatttctgaaaatttaattccaaagaggaattaaccaaactgtacaggacaatattaaccccttctgtactctagaaatatttatactccttttaaaaaaacctgcctttggccgggtgcattggctcacacctgtaatcccagcactttgggaggccaaggcgggtggatcacgaggtcaagagatcgtgaccatcctggccaacacggtgaaaccctgcctctactaaaaatacaaagattagctgggcatggtggtgcttgcctgtaatcccagctgcttgggaggctgaggcagaagaattgcttgaacccaggaggcggaggttgcagtgagctaagatcgcgccactgcactccagcctggcgacagagcgagactccgtctcaaaaaaaaaaaaaaagaaaaaaaaaaacttttccggcagggggcagggtgggggttactggtgcttgaaacagaaataatgtatg

SEQ ID NO: 9160 - DNA, 1470 bp, Homo sapiens
tgaagaaactgttctgatggcctgcttttctgtccttttcctactgctttaaacattgattttcttttgtactaaatcatatagccaaatattgtttaagtaagtcagttttaggaaatgcttgtgttgctgttgaattataaaagctgagtaaatttcagattaaactttaaatgactgtgaaataagacataaactagttaatggtaatttgcttaaaatgacttgagattattattggaagtttttattaattgatacaggtaagaattgatatttaataaaatgttctcatgcttagactatattacttttcggtagagaaattagtattttgctgtaatgtgttatgaaatacatgtgatatcctagtttgtctactgacactggggtcttgaatcttaaaaaaaggcctccgatgaagcagaggaaagtggatcacagggaaaattggtggaagctctcaggcaaatgagaattaatcataggggaaactaccgacaacttctggaggagatgctgactagttacaggctagctaaagtagagggagaagaaagccctgctgaaccagctgccacagctacttcttcgaacagtgatgctggaaacccagtgacaatgcaggaaagccatactgaatcagaaagtggtcttgctgaattagacagctctaatgaagatgcagggacaaagatgagtggtgaaaaaatatgactttcctttttggtaatatttttgtgatctttgatggtttttaacctaggaagtgtaatgtatgcatttatataactgttttgttatttgaatcttggaaaactagttttattatattcagatagccttgttttttaaaaaggcctttgcatacacctttatgagatagtgtaaaattgactatttatagtactatggatttaatgaaattatatgtcatttcacattgtatgccagaaattaggctaccaattatgaattaaagtcagtagttaaattaatactagatagaattagaaattttgattagagagattatgctatattatggaaaaacttgttaatgtagaattatactgcttcatattattttacctattagtacactcatagttagctttgtaataaatttatgttttctttaataattttagttcttcaaagaatggctgatgctggcctgtaatttttctttcaaggatgataatttgtgtgttgtttgatttgtttatattttacatctctgtagttttatttttagaagttgtgagatattggatgtgtggctatttttcctttctctgtattctttatgaaacataacttttgaaaaacctatgtattattcatacagctttggtttgtatattctgtatagcctaactacacacatcaaaatgtatgtcaaccaagtgtttagaatgaaattataagtgtttaagtccaaataaagcatgtgatgtggaataatct

SEQ ID NO: 9161 - DNA, 84 bp, Homo sapiens
aaatatagacaggccaggcacggtagctcatgcctgtaatcctagcacttttgtcgcctgggcgacacaccaaggctctgtctc

SEQ ID NO: 9162 - DNA, 159 bp, Homo sapiens
gcacctttatgaagagatgaagacactggcatttcagtgggattgtaagcatttgtaatagcttcatgtacagcatgctgcttggtgaacaatcattaattcttcgatatttctgtagcttgaatgtaactgctttaagaaaggttctcaaatgttttg

SEQ ID NO: 9163 - DNA, 477 bp, Homo sapiens
aagattaagcttctcaaagacgaagaaacgtatcaagtgcatagggaatatttttacaaaaacggaaatctgtaaggggtataatcgcctgcctgcgccctttgcagcatttcacgtgtgggctatggactccacctgtcctcacccacgttattccccagctgccctctccagctccctccccgcctctttttacactctgcttgttgctcgtcctgccctaaacctttgtttgtctttaaatgtgtataagctgcctgtctgtgacttgaatttgactggtgaacaaactaaatatttttccctgtaattgagacagaatttcttttgatgatacccatccctccttcattttttttttttttttggtctttgttctgttttggtggtggtagtttttaatcagtaaacccagcaaatatcatgattctttcctggttagaaaaataaataaagtgtatctttttatctccctcc

SEQ ID NO: 9164 - DNA, 491 bp, Homo sapiens
tagccaaggccgccctcctccctctccttcccctcctcccccactccttcccctccgcctcctagccctcctcctcttcctcctcttccttctcctcctccatccccagaacaaaccgaaatcaggatacccaaccatacacacatacaagtccacacacactcccaccccagccaaaaatatataaaaaacaagaaaataacaaattaaccgcaaactatcaacaacccccaaccaccatctaccactacggccaccccaaaggaccccgacgccaacagacagtcaaacgctgatgttgcgggcagaaaacataaaagaggtgacaattgtatactttctaggacaagcacggcttctcctttcggttcccatggacccggcaccccacctgcatgacgatttatttgtatctgggaaaatattctctctagttaaaaatgatttaaagagtcgactatacaaaaatcaatcaccaccacgaggacaag

SEQ ID NO: 9165 - DNA, 3108 bp, Homo sapiens
gagcccactgcagttggactttgccgatgctgcaagaaggggtgcagagaagactcctgtgttggagacactcagcaggtcttgaactacttctcctcctcggagccccagtcccatgtccactgtctatttattgcattcccttgccccaggccacctcctccccctcccacctggtgaccagaaggcgctctcggttcttgtctcaccagtaatgcagactcattgggtcagcaattagctgtatacactgccgtgtttggaccattggcaagcctggttccactcctcaggggctcctggcagtgaagcaacttcagttcttttactgcaaagaacagaaaaaagaaagaaagcaaacaagaagactccggctctgctatcggacacagatcctgatccctcttgcttcttttccctcctgcaccgcagcttgccatccctgcccttctgtcctggagaagagactggtgcttctccgcacacacgagggagggcgcccttgaggcatgccctctgagggagggagaccagagatgcagggattggccagctgggttggtttgctctggaatggctaactcttgcctgctttggttttagcttttcagcatgccaaagtcatgtaagtttgtgtcttgtggaagaaatcctctttgtggaaaaagaaacagggttttgaactctgttaacatttgaaaaatatattttcaaattcactttctaattggccaaaagagatgagttccagtctgaatacaggtagatattaaagggctaataaaaaatgagaaaccggtcgtccaaggtggatgctgtcaatgcccgagtgacacatgagagctgtatgaattgagagaaaaggcaacaagtagcattcttcatcattcaagttctacctggacacaaaggcgaggaccctggggttccaacaaagctcagctcccagattctctttccagtttcatcctaagttcctagcataaacactatttattttctgcagcagtgtgttatttttgcgcacttatacaaaatggtagtactactgtgttgtggtttttaaacattaaacatgtaaagttatatacgaaatatctgcttttggaataagcagaatgaggctaaacatgggttatacaaagggtatctggaaactgaagagcaacttgttagaaaactgacaatgtcgcaagatgtactcagttttgtttctgtgtgacatgcaatggcaactcatgtggacactattgaagggatgtgacattacctcctgtagatatgctaacagtgttattctttcatttccaagggttctctgtggctttgtgtatatgtttcccagaggtcatttgattacctaatttactgaactgatttagcagggaatggaatccattccaactattgcacgtggatttcccagctgcccctaaatatatatacttgtgagtggcaaagtggcactaatgaagcttttgccttttgtacatttgagatttttgtatatagtgtttgctgcaaggcctgtggaattaattcgttgcatatagaggtatcaactgctgcatgttcaggcatattataaaactttagtctatgaaagaataattataataatgtccaggtgcaatactctgtaagtctattggttcaagttaccgagagataggtgtgttcctttatgggggatgggggggtgtgttggggattctttgtattgtttatttcattttggtttattttaaaagatgtaaacatatattaagctatattaaatctcacatacagttcttctgtgctctattataccctgatagagatgggggagagaaaggaatgtttttgatggtggtttcaaagctcggacagtaactatcttgagcccattagagagtctgtgtccatatttgcatctggctggtcatagcctttgttactaatgatgacattcagttctcttttgtttttattttttaaaaactcaggtgtaattattatctgttcttaagataattgcaaatattaaatattatgatatatcaattcatgtgtttggcataccagtgaatgatgaagaacatgagattaatttaatttatcttcggtaacttgacattctggagagagactatcttctggagttgagtacaagcacagaaacatctttacggtggcatcatctcattttttaggaagacatgataatactgcccatcatattcatgtgtaactactgttctttcttctgctttcttcaccataataaactttggacaaccaagcaagctctaaccgcaatgccagatggccttgtccgagggcctagtgtttgcacggcagtgggaactgggcctttcctacaggacaactggcaagtttgctgggaagtcaaataatacattccacctggcagctgaaggcagccagtcagtctgtcccagaaagggcccttttcagcacccaaagctgggctggctgggatgcctctggctggtgaagttctcacataggctgatttaaatccagcaaaggtctatagaaaaaggcttgcgtgttcgttgagtaatcattgtttcattttcatttttacgagagtttgaaaatagacacactgttaacacttctgccagttttttctgatctttccagccccaccccctttctctttctctctctctctcaaagaaaaaaaaaatgggagtgcaaaaaaaacaaagccaaaaaatatatgaaggatagctgttcttctgtgttctctcattatggactttgtgaagtagaaacataattttttttcctccaaaggtgaaaaaacaatgcattcttgctttaaaaaaaaaaaagaaggctaaaaaattacctctttttaaattatgtgcaaaataattctggctaactgtaaaatgtattcaattttaggattttttttttttgtattgtgatgctttatttgtacatttttttcctttctggatgtaattttaatctcttgccattcattagtgttatttcattgtaaacgttattgtgccaaatgtactgtattcaaaaggatgtgaatgtgtattgtttcagaacctaataaatacaatgacgttaagtctt

SEQ ID NO: 9166 - DNA, 2036 bp, Homo sapiens
gccaggccttctacctgggcagcacctctgccgacgccgtcccaccagcttcactctctccgtctgtttttgcaactaggtatttctaacgccagcacactatttacaagatggacttacctggcagacttgcccaggtcaccaagcagtggcctttttctgagatgctcactttattatccctatttttaaagtacacaattgttttacctgttctgaaatgttcttaaattttgtaggatttttttcctccccaccttcaatgacttctaatttatattatccataggtttctctccctccttctccttctcacacacaactgtccatactaacaagtttggtgcatgtctgttcttctgtagggagaagctttagcttcattttactaaaaagattcctcgttattgttgttgccaaagagaaacaaaaatgattttgctttccaagcttggtttgtggcgtctccctcgcagagcccttctcgtttcttttttaaactaatcaccatattgtaaatttcagggtttttttttttttgtttaagctgactctttgctctaattttggaaaaaaagaaatgtgaagggtcaactccaacgtatgtggttatctgtgaaagttgcacagcgtggcttttcctaaactggtgtttttcccccgcatttggtggattttttattattattcaaaaacataactgagttttttaaaagaggagaaaatttatatctgggttaagtgtttatcatatatatgggtactttgtaatatctaaaaacttagaaacggaaatggaatcctgctcacaaaatcactttaagatcttttcgaagctgttaatttttcttagtgttgtggacactgcagacttgtccagtgctcccacggcctgtacggacactgtggaaggcctccctctgtcggctttttgccatctgtgatatgccataggtgtgacaatccgagcagtggagtcattcagcgggagcactgcgcgctatcccctcacattctctatgtactatgtatgtatgtattattattattgctgccaagagggtctgatggcacgttgtggggtcggggggtggggcggggaagtgctctaacttttcttaaggttttgttgctagcccttcaagtgcactgagctatgtgactcggatggtctttcacacggcacatttggacatttccagaactaccatgagatggtttagacgggaattcatgcaaatgaggggtcaaaaatggtatagtgaccccgtccacgtcctccaagctcacgaccttggagccccgtggagctggactgaggaggaggctgcacagcgggagagcagctggtccagaccagccctgcagcccccactcagccggcagccagatggccccgcaaggcctccagggatggcccctagccacaggccctggctgaggtctctgggtcggtcagtgacatgtaggtaggaagcactgaaaatagtgttcccagagcactttgcaactccctgggtaagagggacgacacctctggtttttcaataccaattacatggaacttttctgtaatgggtacaatgaagaagtttctaaaaacacacacaaagcacattgggccaactatttagtaagcccggatagacttattgccaaaaacaaaaaatagctttcaaaagaaatttaagttctatgagaaattccttagtcatggtgttgcgtaaatcatattttagctgcacggcattaccccacacagggtggcagaacttgaagggttactgacgtgtaaatgctggtatttgatttcctgtgtgtgttgccctggcattaagggcattttacccttgcagttttactaaaacactgaaaaatattccaagcttcatattaaccctacctgtcaacgtaacgatttcatgaacgttattatattgtcgaattcctactgacaacattataactgtatgggagcttaactttataaggaaatgtattttgacactggtatcttattaaagtattctgatcct

SEQ ID NO: 9167 - DNA, 3603 bp, Homo sapiens
gaaacatcttcagtggccaaggaaactgtccatttctctcagaaagcaaatgaaatgctacagctatacccagaccttttataggtaatgaagcagttcaaaacttgaaagaaaacaaaacctgtcctcagaattctataaagtgtattaagaatgttccttaaaggtttaagaagcagtaagcagcatctgaagccacaatctattataaatactttatttcaactagaaggtacaatctctcaggggtttcatagtttaaaaagctacaatcacatcatgttgtaactacgtaaaaaacagagctgtaaatggaactgcttggctttgaccatacacatttctgcccagcccttacagaatctgcacaaagaaatatctccctttgctccagttaattgttcttgtatgtaagttgctttctattccagtatatccagagtggtgaaataacaaggccagccacgtagccaaaggtcgctccaagcgtacaggagatgggccatacctgaggagagaatgtatgagatcaaaaaagaacaaatgttttattattacttgagcacaagtgtaacctaaatatttctatattaaagcttaatgtgctttcttaaagaatgccaaaagtgtaataaggtcataactgcatttatcatgaacactaaaaatgtacacattttagttaatgtgcattaaactgtaacaaggcttctggcaattgtagatttagtttgacgctccccaaagtgcatgagacacatgctaaaattacaaattaaaattttgggtcagactttgccataatgatagactcaatttagctctctgaactagttggtaattttttttttttaattcccactttggctgtgtacatcaaatgaaatgagaagtgtgtatgctgaccaaaccacaagaaactttctttaagttgtgttaaagaggaaagacctagaatccaagcgtgttacatgaaaattgtaacagagcagctgcttccacctttcagatatagatgttggaaccacagcagaagttatagagcgacaacttatatacacacctagaatgtaagttaaacaaaataccggcttccagagaccccttttctccagccatattacatcaggctagaagtaattaatgttgatttatttcatctacaagcagttggtccctaagtgaaaggctctgcttgaaaaaaaaaagaaaaaaaagttggaggaaaattttcatgttcttctgtgaagcttatttggtacactggagccatttctaatctttctctggggggaacaggccacagaactgtgttagaggtgaaccatcttaattactagttctattacctaattcagcttccttgtttggtctgctgtggatctgccttattgcatatgccatgcatcagataatggatgcatcagataatggtgttagacaaagcttcattgtgaacaacctaatgcattttagagaaacaatctcatcacattttttctagcctttcctacatttaaacttgctgttgcccaaattataattttttaaatgtctttggtgggcttctgttaattcacatgacttgagcttatagctatgtctactgcacagattgggtaatggaacactaaacttttatacttgaaaatgacagccttaaatgctcatatcagtcacaaatctaggatgtactgtcttgttgtatgtgagctttgtagagatttttaaaaatataagcatcaccttcccattgaagagtggagagagtctactggatgactggccaggaactttctctctgaatcggacatttggatgtcttctttcttccaagaaatggtggttcacattaaagtatcatggccttatgtatgctcaaatggaatcttatgtaactttcttatttaattttggtctgcttatttttagataaaattgaaaggaattgtataaatcaattaacatattagctgagttgtccaacacatggtataaacgaattacaacagtaaactattacacatttccaacttgcctttggggatttatgaggattttttttggtggggggagggggctccaattcatatctctgaaacccttcacacttggtttactaattcaaagttagaagtctagaatttgccctgccctaacagaaacagattaggaatttgtctacacaaactggtgtcacctgtttcttgactgggatttggtttcctcattataaatatgggaggtagaacagagatctccaacgtctctcccatttatcacagtaattttcttattcacagtaatcattgttggatgttaccttttcagcttcacattctcaagatggtaaaaatcatgtatatagattatcagaactctaagcaaagatgactgtcacatctgaagctgaggtgccttaggtactctactgaccttgatgggtttggagttccccattgcttatcaagagctttttaattgctttggttctttagtttttctttttgcaaaaatccttcctgtcactttaactaaaaaccaaagatttgttttctattgataagcagactagagaaaaactgccttattttcagaagcatgtcttcattcaaagcttaggcttcaatagaaattcagactaatcactgaaatgactatttcaaactagtgaaatatctgggaaataaactgcttcaaaaatattttactgacatgaattttgctagtgaatacaaatacactgcctcaaataaggccatgtatgaatgaacttacaagatatttgagttaatcagtgtttgcatatagagaattagttctaaagttcttaaaaataaatttaggggctccctgaaattttatttaatactttgctaacttacactcttgttttatctccacaggtacattttaggttagctcatggtgaattctatttacaataagtggagcttggattaatgggttttgttatgaattatcttagtgactttagacactgtttccatttgatttttaactatttaaaataccaaattaaataccagtttgttggttgttacttttaaatgattgttactttaacagtgtcccttcttaacacatggggttacaaataaaatactatgcatagtttactatctacgtaaagcactgaactttttaccttagtagtttttatttattaccctatgtaaacatttaggataatactctttcctctatttatgctgagagtctactaatcattggcaaagtatgagtccctatactctgttaaaaaaagctcactgttaaagtatagggagaatagtaatccctcatgaatcccagctagattccaatttgggttactaaattgtattttaatcattttgtaatttcagtatggctctttgttctcaaacacatacataccaccacgcacattcttttaaacagctgccacacctcacctccaacagaatgccaaaaatgaaatgttaaaaaattttgtctaatgaagggttacggcttggaacacttggttattcatgttatgtaaatcaagaagtgcatgccatcagcaaattaaaatgtggactggctttgaagactgtt

SEQ ID NO: 9168 - DNA, 817 bp, Homo sapiens
atgtattgatggaatttctggctttctaaatgattttactttctgccttgaattttcaaggcatagatgtcaacttacagaataacatgttttaagataattaagtttaaaccagagaatttgattgttactcattttgctctcatgttctaaacagcaacagtgtaactagtcttttgttgtaaatggttattttccttataagaattttaagaactaagtggcaaattccatgaaaatatttctcagttctgtatgcacttttatttaacattattcatataattctccccccaccactttatttatagatactgcaaaagtgagaaggagataatagatactttgctctgaatttggcatccagagttaacatttctcccctcactcccttgctggtgtcatagttattagaatcagcagcctcttaactaattgcggtttcataggatatataaatgtttcaagccattattgctgaatggttctttagttattaacctagacccaaatcaaagaccagttggatttatgatattttttatttgttcttgcagccaaagtgccagtttctttaatatgtgaccaagaacacaaggagcatccatatggccaaataaatacactgaattttagaaaaacatattactttgaattcaaattgtcatgaaaaccagaacagtgtttgtccatgttgcatgtaatgaaaataaatccctgctctgagaaaagctctttgaagcaaaaaccaaacttttttttttttttttttacctcctgtcttgccccctaaaagaaataaatagagcaaacatct

SEQ ID NO: 9169 - DNA, 2646 bp, Homo sapiens
actctccggtccccaaaggttgttaactaggtccgctttcatgtgcatcagacagtacacctatagcaagcacacgtagcagtgttaggctttttcatacagtatgtaagcttagtgttagtatctgtcagatgctacctgctgttacttattcagataaacatggtgcctattggaacaatagcggatagagctacaggtgttcagtaagactacaaaaacattttgcctatttcgctaacagtttggtttttaatggctgtggtatttgagtgaggcaactctggggcatttgttatgaagaattctatttcttactgaagaacaaattattaatattggatgagtatttcaacagtgtgactaatgtttgaaattattttttctaagagtttttctataaccttccaaaagtcgtgatgtttgtagttactataaatcaagctttggaagtccaaaaagaataaaagactgccttccttttagaaaaaaatgcaattttctggccacaagggcatagtgcagttcacttacgtgttgatgtagtttataatcagacgccttttctcttctgcaaaaggtactgttaagtaaaccagattttctaaataggcattcttaaaatttcagacttacaaagctagtagtagaattttattgaaaggcctaggtattaattttttaaatgagtgctttaacttaaaacaggcgtttggaatagctgctgcaatgtagtcttgtgtgtgatttttttttaagttgatgtgcagtctaattgttgtttcataaaagttggatctgttcctatgcccaggatgattttgtgaaccgtgaagtacgtgagactagaagacgcccaaacaagtcagataatagtaactacaatggttgctgatgttgagattattgttgaactataattaataatttggatggcagaatttatctcttttttgtaaactctcataactgaattgcttaagtataatttatagaatttcagtgcagttcattcttaatggaaaatctgaaacctaaattgcagatttaaaaggtactgtacaaccattatatctgtaaataacttagcacctttttgtcacttagaataatatgtactactacttgagtgagcgcttttggaagttatatcaagttctagtgtttgcttcttagtaactgaactgaatttacagttctgtcctagacattttgcactaaagtagccgaatccactctcatgtcttttcgttaatgtgctctgtaccactggtgagtgctccatagtttccttacctgctgctacagaatgttattttacatccctatggctattgccaaggctacaaaaaaggaaagctatatttgtatgcaacactaaccttttgactgctaatgtatgtttctgcttgctgtgccttgttatggctgctttttttgtgctaataaagtatgtttggtgttctccttgtatatctgctgttttatacatttgcaacaatttctcttgtaaatggaatggtttggggtttttaaataagcattaactaacaacctttctatagttaatgcagagttaatgaacagtctaatattgacttatcagaataagctaactctaaatttaatgctctacatcttatcagtcataattatatatactgtggaacagtatctgtagttactgcaaattactgtacagtttaggttataacagaaaactgacagagaagtaataaacctattgatttctctgcttataaatgaaagattgaaactatccaatgacatattatagtaaatgagtatctgtaacctcccactgcatcagaagcaggttaaatgaagtcttgtgaatttgtaatagatcagtaccatttattggtttggggaccatcttaattaaaaataaatgcccaaaatgtagaactttaaccaaagacttgtcccttttaaagcaaaatggggattgaagggacttataatttctgttgtttctaattaaagtccctgaagatcatataccaaagtgtttgagaacttcatccaaacctactttaaagcattatgtgcaattaagttgttatgacataattatattgcctaattgttgggtcttttttcttgagcttataatgtacctggaaaataaacctcttgagaaaaagaaaagttcatactgattattggaaaaggactatatatgtgagcaagattgtgttttagagaggaaacttgaaactccaagaaagcacttgatgtttttatatgcttgtagcaaattgatgttctaactgtagttttatagaaagtattaatgcttttatgtatttcaaaactttcatatgttaaatggaaattgttttaaatgtgtttgagtttatgtaagcatgtatacactgtgctaaaagtcacatgtttcagtttgtgtataatattaatatgcaatttttggtttaaatttttgtcttaaaatattagtggcttacattttaaaaaagaaaaatcaccagcatgaacttgcacctaagtctatattcactgtgtccttttctgaatcccattgtagcctgtcaactaaatttgagtgttaacggtctttttaaagtgcatttaaatacaaaccaggaatttctttagaagttg

SEQ ID NO: 9170 - DNA, 2212 bp, Homo sapiens
cgacgctgcagccgcagggagggaggggctggccagagggagaggcagcagggaacgtgggtcagggtggggcaacagtggcatcaggtgcggggcctcagggaaatacatctttagtgaacgcctctgcagctgcagccctcgttctcttggctgggccaagagggccttcctggatttctttgttggtgccttgggaaacagtctgacttgaaccctaagtgcctttggagagttttgtggtgaccagacttgctccccaagagctgggcagcggggagcctcacagctgtccttcaccctcacccatgcctctggcttggagtctgggtggggggttctcactccccactctcagcacagtacagacttctggatctctctcaggtcttgcccagggcggtcacaatgtgaagaaactgcgggcaagtgggaagactatgagatttctgggttcccttctcagacttggagttagtagatgattcctgcattgcccctgcttgccctctgagaccagctgggccccaccttgctctttccccctgctaccaagtgcctttggggtctgaccaggggtactgagcaccggccctaacacttccatctccacccaccccatctccctggcgatgtgctccagcccaagcagcctccgtaggctttagatcctgtggttgctagatccagtcctttctaataccctgagtcaacacattactcctgcaggtcttaggctacaatgcaggtcccttgagggccaccaacatggaggtaggcagtttctaggactgtccccagtacatctcaccacccacagccctttttttgccttgattcgagcctcaccctggccttttggcttcccctgcctgagagagacctgaggaggggacagagcccagcccctctcctgtggctgagcaggcctctgtgtccatgacacctgtcttccgggcctgggggctgtgggtgtatgtcctccctactggcttccccggcccctgctgcatgatgctcttggaactcttctccaaggagtcagtcccccaggcctatcaggggatccttttgtatctgcactttgggttttagtttcaaagctccatcaggtacagcttgcatttcaggatgtgtggaaagctcgggtgagggctgccctggttcatcatagctccaccttcctcggaaggagtgggctgttggagaccccccatccatggcacactagctcagcactgcatttcccgagatgattcccaagacagctggtgcctcctggctttcctgtgccaggccaaggggcaccacagaggaccctggatcctttgcctcttcttggttgaaggatctctatgtatgtgtgtatataaatatagttttttatctatatatataaaatagagatctattttttttctggaattctgttagaaaagtaaagaaaaagcaaatgctgttggtttatctcagggtgcccaaagtggttatagtcaatttttggtactaggaaaggcacccaatgcatttcctgacttttaagcatttccttgttggaagcagcagagggccaggccaagttgctgacagtgactttgcaggttgaataaagaaacccttggaggggaagcaggcttgtctgaagcagcatgtatattcactgggcatgtagctcccacaccagccttgagccaggccctggacaggaggggctgttgcaggatgagggaggccagagaaggcatcgaagccaagacctgggcccacctggggagggatgtgggaaaggaaggatgggagggaggaccctctgggaaaatgtggatttgagctggtgagagtgttgctaaggctgggctaaagcctggagagggtaggaggaggcaagaggggtccaggcagggctgatcctggcctctgacctgtccagggcgacccctgaagcccctgctgcctctgggcattgctgggagaggccaaggcaggactcacgtctgaacagagatcccctcgggcattgctgatgggccaccttcagctgcagggaagaagcctaggagaggaggcatgggagggacctgggccttgttcagattggccacctctgctgagaagtccataccagtacacccctaataagttatgccacataccaacgtactgtggatattataacctgcattaaaacaactctaaagaacgctgctcattt

SEQ ID NO: 9171 - DNA, 405 bp, Homo sapiens
ctatataatttgaagattatagaagaagggaaatagcaaatggacacaaattacaaatgtgtgtgcgtgggacgaagacatctttgaaggtcatgagtttgttagtttaacatcatatatttgtaatagtgaaacctgtactcaaaatataagcagcttgaaactggctttaccaatcttgaaatttgaccacaagtgtcttatatatgcagatctaatgtaaaatccagaacttggactccatcgttaaaattatttatgtgtaacattcaaatgtgtgcattaaatatgcttccacagtaaaatctgaaaaactgatttgtgattgaaagctgcctttctatttacttgagtcttgtacatacatacttttttatgagctatgaaataaaacattttaaactg

SEQ ID NO: 9172 - DNA, 272 bp, Homo sapiens
aaaatcccagtaatggaatgaaggtaatattgataagctattgtctgtaatagttttatattgttttatattaaccctttttccatagtgttaactgtcagtgcccatgggctatcaacttaataagatatttagtaatattttactttgaggacattttcaaagatttttattttgaaaaatgagagctgtaactgaggactgtttgcaattgacataggcaataataagtgatgtgctgaattttataaataaaatcatgtagtttgtgg

SEQ ID NO: 9173 - DNA, 92 bp, Homo sapiens
actgactacattggaagctttgagttgacttctgacaaaggtggtaaattcagacaacattatgatctaataaactttattttttaaaaatg

SEQ ID NO: 9174 - DNA, 3852 bp, Homo sapiens
aaatacttaaagtgtggcaatactctttcacttaattctttacaagggatatcaaagccataatggacttcattagttttagggtagggaagggatactaattacttatttctttcaaaacatttttggtttttggtttttaaaatttttattaaacaattgctgttaggatcatgcctgatcagaaatacatgatgtgaagtcctaaaagcataatttttgtgataaatgtgtccaagatttgaaaatttttatataagaaaatccccagcctctgtcttaaacttgtgggacaaaaatcctttcttctgttaatatgtcagaatgtaagatttggcaactcgataaatttttttcattttcttttccaatctgtaactatagttactgaaccagctaaaaattttgctgatgtatttttcatatacttctctcctgacacgcaatccggtaacataagattgaaatttttttactttgtcttaatttgtttctaattttttttttgttgtcgtgtgagcaaagacaaacataaattgaaaaacatcctgatgtttagaaagtttcttttggttacgtaggtagagaatacaacaaagagttctaagacttagaaaagacaattttgtggtgtcatttcatccaagaacactcccaattcctattagaatggtagctttgaagtgtttttacttcagagatcctgcatagcatttattggggccttttattctttcccaaagtgctttgcaaacattaagttttagccactagctgcctttgttgagtataagttatccagtgagaggatatagccaattaagtgtgttatggagtacacccattttgacacacttgtaataagagaatctttcatttgcctgccatgtgtactgtattatgagaatcttataatcggaatggagtgaaatgaaacattttgagtactgatggcatgttatcatacataaagtaggtcatttaggaaaaaacttctgtccaagctttgtatgaattaaattcataagtataccaaattaaatcttaatagatttaatgcaattttacagacacaataccttcatgaatttcaaaattcatataaaatttgatcttatgcaatacacctttttgaggaggcagtgtaacaacctatagtgccattgatccatgagaaaaagattttctggtactactccaaaagtgctttgactaagtatcttaactatttgaacagtctgcttatatgagacagtttttcatagtatcatttgtataatttgattagattattcagaaacaataggatgctaaactaattcattgtatcttttttttacaatggtggaagcaactttctgaaagttcagtcttatgctacatcctaagtcatagacaatgaccttgttttcattattctgatagattgtatacatatgtacacatacatatacacatatgcacagtcaaggtcatgatgttgatttgctttcagctgtttctgtgattataaagcattttttaagagacaaattttaacttttaatttttattttggcaaaactgtcaaatgagaaaaatgattttaaaaacttttttttcaattgacaagactttaagtcagggataacagtattaatgttctctgttctgtttccatgttaaatttaatttaacctggatagccacattaatgaattggtgctgtcaaaatatagtaatttttaaatttgttaataatgaaaacccttaagcatgcaggatgaggtatttgggttttttttttagatcgatcacatctacagaaaatggctaaaccaagttaacttttattatagacagtgaataaaacaccaaaaacccaaaaatgctttaaccacagtataaataatagattatacacatcatcttaataactatttttaagttatttaccatagcctctgtatagaccttaggaacagtgtttcagtgatctggcaccagtttattttgttctgctgaaattctgtatcacaaatgtgctacctggtttttgtccattagataattactctttataaggaaaggaaagagaagcagagttagttccagctctaatagggatcttcaaagttattttgtcttgatgtatgtaacagtaattctttacatcttttgatttttctcttcctttttattcactcttcccacgaatttaaatgtttaagttatattcatcactagcaaggatgataaacacttgtgcactgaaagctaacagggagaggttacacaatattttacagtttcttaaacataatttaatgcatcaccttccacttgctaacataccaagtcagttattttcaagggaagaaccttttaaattatggtcctccatttactacttccactgagagtatgctctcattcctcaggtgttttgagaaacatgactaataaccacacaattaagtagagtcattccaagtcctatggcctggaaattgtattccctataatatacaaattttcctgtaataaagtcaacttagaaactccaaggaggttacatgttttccaacatatcctaaaaactgtgatataagctaacatataatttgccttacgtcaaaagaatatgttttgttgcagctgattccagtttataatagatccctagtaaaaagctttgattcaacacaattgttcatcttcacatcccaaacagaatcactgtttcttgaatatatatttttgaagtttttttgtgcaatatattactaaatcagttattattttacttttccaaattcagagaaagaaaacagattacctgaattcatggaaaaggtggatcacctccctttttccaccttcaagcctttcctgtcctcatagccagcatgacttcttttaacttggattcctttgtatatagtaaagtttagtatatatatatttttttctttttgctactttctgaggcattatgtaaagggctcatactagatgttcagttaaatatactttagcacaaagtcaaactagagaatgtgttaaggagggaatgtatatgtcttggtagaccaggaggcctttgccagcaatttaagcaacagatgtgaatacttcacaaagctgtaaagaccattgtcttaaatactacaacaacttaacacccttttgtgaagatcacagcatttatctaagaaactgtgaggctttctggtttacatatatcttacaggtgtttttttgtatttttttttttttttagtttgaaatgtgtaagctttgatttaaaccaagtttacttcagtatgttaatgatgtagtaaaaatatttattgaaaggtgaattcgagtattttaatgttatacctgccattttttttcttaaagcatattctttgcatctaactgccagtgccattgtcaaaacttattttttaaatcgttgtacatttcttattaaactaagtgcttaattttaaagtattatgttgccatcatatagtgtataaaaatgtataattgccaattgattgtaactattatttatttttaaatgaaagtgtaagaatgctttctgattcaacaaatttgttatcaaactgtttccttatcctcttttctgatgtagcataaaaattgtcccggtttgagttataactgccagtagatgaccagtcacaagtgaaccacttctcagttgccaatctttgctcatattaaaaacaacttacaaatacttagtttttgtatctaatctctgattattaaaatgtttataaagtttatttttaccaaagagatgcaattcattatgagaaagtattgcataataaattttgttttataactttt

SEQ ID NO: 9175 - DNA, 639 bp, Homo sapiens
ttttgaaatagctggttggcgactgttctttccagacctgctcctgctgcacagagccgcagggctgagaccacgtccatgctggctgccttcaggaagctaaagtattgttggacctagtaaactagtcagtgttggaaacggccttgaaatatttaaaacatatttgtaaccagtgaggcaaatacagaagttgatgtcggcagtaaatggaaaacaatacgtatgtcatggatattgtaggtttccttatgctgtttttactgtgcactttttaaaattaggttttaatttcagtatgtaagaacaaatattttgtatactttcaaactcaattatatggtaatcgatttggtatctatggaatagatatatgtttctggaaaaaaatgcttaaattgtcaaactgtcattacttcttattatagttgaaggcattctccagattctttttaaaagatttgttcatatttctctctctctctctctctctctctctctcttctttctctctgagggagagggagccctccaaacttcagatcctgtgggtttagtatcattatcttcagctctttgataccctgtgttagagtaatagctaaaggaagttcatgtcaataaattcatacttatatc

SEQ ID NO: 9176 - DNA, 1693 bp, Homo sapiens
ccagccccaggggacagagacgggaggcctgggaccccccctctccagggtggggcctcccgccgtgtctgggaaagtttgcgggcgccccgggacgcgggcatctccagggccgctcggcgcctccccatctccccgcgcccgccctggccgcccccaggggcgccctggggcccgcagagggatggcctcccggcagggactcctcggctcccctctgttctgagactgctgctgggaccggggtccgactctaaagagaaaactcaaacagcaaaaaaaggaatatcgactcagttccgagggcgggggccggggctcgttctcacccgcgcgcggcccctcgacctctcggacccgggccaccagctctgcgcccctcacgcctccctcggggtctctgtgtctctctcccgctcccggactccctcctccttctgactgctgttatttgggctgttgtccctccccgctccctggtacctcagctcggaccttagcctgtgcctgcagcccggagtcccctcctgccctggaaggcaaggagccaggccacggggccacagccgcgggggccaccacactggcccaaatatttcctgcaggtatgaccattcactgggtattggggttgggtcccttggacccacaaactgaacctcgtgggtacagggaaaaattaaaatatattcctccttaggattgtactgcttctgttggtttggcatctttttatttttaacccttctaactgtgctttcttcgaataataatgatacttcatgtaattagcgtttctaatatctaaagacagaagaaggaagaaaataaacggaagagagagaatgcttgctaaaaatactcatttttgacttcagtccacactcgactgttttcctgggagatagaagttcagtgtagcttgttttcagactaaccgcaaacacgattacagcctcctccaggctagaagttttaatttgcctgacatgcagcacactgtttgttggtattcccagcctggcattcccgtctgcatagctctagtctccctcccaactcccccacccccactttctttctcataaaagggagctgtgaaaacaaggcaatgggagaggctcaaacgagctggaccacataataaaaacagccctacttattttaatcctgaggctatggactcccctggactctgattgggtggaagaattgtttagttcatttgtgtggtttttctgtcagtagttattatggttgaatcagtgtttccatgacagtcttgcttctgtgggcacgatggggagcctgttaattctcggatgggtctggacagatcaagtctggagtctggagagatttttcagggcttgacctgggctgatattgcaaacctctgcacactcactcagaaccagagcagccgggagcagcctgagctggggttttcttccacatgatctgggaagaaaaagctctaccaaggagcgaactgtgtgagcatggttgctgggggatgttgaatgttttacgtttttaggaagaacacacttctcaaaactttagccattcctgtttccatacaaacaataaatgtggttgtaacaaatgtagtagatcagattctgaacaaccccttaaaaaacaggtccaagtattgaaccatttggaaataaagattttattttatttg

SEQ ID NO: 9177 - DNA, 165 bp, Homo sapiens
accttgtgagctcagtacatctattttgtgaacatcagttggattatattgcatattgtgaattcatttttattttgaatatagtccagcacagagctgttcaaatttttagttcactgtatggaatttaataaaattataattcagatgcagatacaattacac

SEQ ID NO: 9178 - DNA, 3584 bp, Homo sapiens
gagtagcaagagtttatgatgacagcccacttgtcaaatatgtaattcaccgaaaccacaccaagtcctgctactgtagagtggaaatgacttctgaatagcggttttaggacaggtctgatggctgtgtttagagaagtttagacctaaaaccgaacaatctgtattttttgcttttcatgtgtttttgtcctaggggttcgatctaaaatgtttctataattcgtgtgatgttttgcttcctattgaaactcaaaggcactgttactcgttgtgtgaccccgcagccagtatgatttttgattactcagtggctgactgttttgctctctggattactgaggtgccgtcttcatttcttcccatctcttcttgctgcttagtgtctgtactagagggtaagggaatcaaaggagacataaaccaaaatagttaattttccctctttcttgcctctgaaatgtggctaggtgtagaatgatgttgaaaccacaggctaaaatgtagatctggaagtatctgtgcttttgaattacttatttacctgtcctcttaccgttggtaaataataattggctatatttggtacctgtctctctcctactgtattgtcattttcaaaatgtgtttgttttctggcgcgtgctgcaaagaagctatttctgttgtcctacatattttagtataaatcactaagacatatttcctttcacttggcaggattcctttcaaaatggaatctgagtattagacactagttaacatatttgtgtatattaaatatgaatttttaaaatttataaatactattttccaaaagtacagactctaaggacatattttgataaagtattatttgtaatgaacacaagcctctcttgagtagaagtctaaatcacattatgattattttatactagttctgctatcatgctgttttatgctaattctgcttattttagagtatttttcattaaaaggtgagcaaagtgaaagatacttggtattttacccagatttctaagtggcaacatttttattcttcagagtcaggtaaatgactataatagtttggtttctaatgaaaagtcaatagcattagcagttataattctgtttataatttcctttcagcatttacagtgaaaagtgagaattttaaaatttatgaaatctatattccaggtattgtttttagtctgaaaaacaaactcccccatgtggtattaatataccttcaatttatgttgagtcttaaacataattaggagatatttttctctatttgctagatttgttttgagtcaaaactgatttagtgttcttccaaacaacatttatgtgttggcctacagagtttatttcatgtgttttttttaatatttaatattatattacattcattgaaatctgttcaaaaacagattaagacaaacatttatgatggtctgtatcaatcagcagattttattgcttttcattattttactgtaaaggcaaagaatgcaataggtgatggttggttgaaaggaattgttattgctgtttttattttttactttttttgagacagagtctcactctgttgcccagcctggagtgcagtgtgtcatcttggctcactgcaacctccgcctcctgggttcaagggattctcctgcctcagcctccaactagctgggattacaggcacaagccaccatgcctggctaaaattcttttgtatttttactacagacggagtttccccatgttggccgggctagtctcgaactcctgacctcaggtgatccaccagcctcggcctcccaaagttctgggattaaatgcgtgagccaccatgcccggccgctattgctctttttaacttcatttgatgccttgcttataatatcatatgcttgaggctcactgttgatgtagagtagggcaaatctgtgtgtgtatgtcattaaaaaaattctaccatctttctttatcatctggtgtgggcgcactctacagtgacttcagtctgctcagaacgaatgtggaggccggccgaaactgatgctgcccacagtcccagtgaagttaggtgggttaattactgccattcctttctaagtgtgttttatggcatcctgcccacaaagaactcacagtctgattaggatgaacttaatgactatttacacctcaaaatatattcagcaaagggttcacttagttgcccctcatgcttcacaggttgactagtatctgtgggtacctccctgcccaggttattcactcacaagccaccgggccttcaggacatctcaagattcagtcttgacaatataatagcaaaagctggactaaagcccaaatggattgtctgtggcaatgcagaagctgatagcattaacagcagggtgttacagcataattgttaattcgcacatctattaggatccttaaatattcattacttaatgttaaattaacattctgtgtagggaggggaggcttattcaattcttctgacctcagaactggcagaaggtcagatgtgactacagaactctaggtgaaaaatcaggtagggttcaaattaagtagaactgcccttgccggaatagtgatcttcaaaaaacccttgcttttaggggagggaagcggggaaggaaaggaatgagggaggaaatattcctttctagcattcattttgcttagatcactccattgtgagtttgaccattttggagtcaaatgagcagacttccaaggagttgaccagtttgtgactagtctggtcacctttccagttacaggatcatattaactgtgtaaatgaattcatgggtagatgatttgtgcagatctgaatttaagaacatttcctttttctgtgggaatcacaagagtttatccactaaaaaaagatatgtaaaaaagatactttccagcacataaataaaggctggaattttacaacctgatgtatatattagacagttctaggatgttagttcccttcattccagagctatgcttgtgatacagccccttttcttataaagtcagttagaaggacttccttaacaatgactattataatgtcttacttaaaatacagttttgtattctgtcaatgcaaatataagacaggttgagccttaatcatgtaacaaaatattttgtagattacatattgatttttcaaaaattaaaaatgtatttcaaactattcttactgtgctgtgaatttatatcttcttctgcaagacctggggctatttttttttcttaaggtatgaaatcaatttcaataaccttaaacaattgaccctctgtcaggcatatgtcaggctccactcttaaggagtcagtgaccatgacctctttgcatatcctggaaaaatgacatcatcaaagtatagttgataatgttataaaggatgattttaaaaatagggtataatcatgactcacaaagatatgaggctgggtgtggtggctcacgcctgtaatcccagctctttgggaggctgaagcgggtggatcatgaggtcagaagatcaagaccatactggctaacacggtgaaaccccgtctctact

SEQ ID NO: 9179 - DNA, 220 bp, Homo sapiens
actcatttaacaaaggatccgagaagaacagggacagtgtgggaagaaatcttcttgtgatggcatatttgcttcctatatttcttctggaatcatgttcgcttggcttcctgattaaaaacacagttttattgctctctgcactgccaaaccaataaatttacagaagagaaagctgtattccactgtaccccttgcagcatcaataaaactgacagcc

SEQ ID NO: 9180 - DNA, 625 bp, Homo sapiens
tttagtcttcagagaattaacttcagtgcacaatgacaatatgatttggaaatacgtttacttaaagatcttatttttaatgtagtgaggatattatttaaacttttattttaactggaaatgtcctgaaacacatatttaaaatattgggatacagtgaaagaaaaattcaaattttaataacataaagatttcctaactttatgttattgaacacttactcactagaagtgagttctttagaaaaatacagtgaaggactcagttcagtcttgtttttatcagagtgataatcatcctgtttcacatcccaatactattttgaaattctaaacaattaaaccaaaattccaataaatataaggttatgccttcaatatattcctatacaattctgtaaccatggtttaaaatacacaagcttaaaataacatgcttagaaatacacaataatatgaacagtatttcagccttaattgtgaatttccttgttattcaagtattaaatgaaatcttttgagtttttagccaaaaattggcatttttaaaatacgaaaatttccttggaattataatgtactgtacctcttcttttttaaataaaggcattttactatatggaaaa

SEQ ID NO: 9181 - DNA, 826 bp, Homo sapiens
aggatattaaagttaggggaaagaaaagatcattgaaagtcatgataatttctgtcccactgtgtctcattatagagttctcagccattggacctcttctaaaggatggtataaaatgactctcaaccactttgtgaatacatatgtgtatataagaggttattgataaacttctgaggcagacatttgtctcgctttttttcatttttgttgtgtcttataaactgactgtttttctttgcttggatactgtgattccaaaataaatctcatccaagcaagttagagtccagcctaatcaaatgtcataattgttgtacctattgaaagtttttaaataatagatttattatgtaaattatagtatatgtaagtagctaatgaagtaaagatcatgaagaaagaaattgataggtgtaaatgagagaccatgtaaaatatgtaaattctagtacctgaaatcctttcaacagatttttatatagcaactgctctctgcaagtagttaaactagaaactgggcacatggtagaggctcacatgggagttgtcctcacccttgttaatctcaagaaactcttatttataataggttgcttctctctcagaacttttatctattacttttttcttcttatgagtatgtttactctcagagtatctatctgatgtagacagttggtgatgcttctgagactcagaatggtttactctaacaaaacactgtgctgtctatcccttgtacttgcctactgtaatatggatttcacttctgaacagtttacagcacaatatttattttaaagtgaataaaatgtccacaagc

SEQ ID NO: 9182 - DNA, 496 bp, Homo sapiens
tagaagagaaaaattgtaacacactgaacaatagatactgtatgttcttaagactatgtatactagaataatagtagcagagtagggtgaaaaggaactttctgttctgaaagctaagcgactgtacgtgctactaaaaatgtctgacactgaaataattttactcaactatgttttcaacaagcaaaaatatagtattctaagattaaaatgtcattacaaaatatttagtgtgaacatttaatttaaacttgtctcatggaatctttaatttcaatgaacattacagcatatatatgttatttggcgagacatcaaataaagttaaccatttaaaaattattttcatatactgttgtctatgttgaattataaaatcctctgaataatttgttactacggttatttgttattaaactcttcaaaaagaaccagtgattagaaataaatgtgatgatcaatataaccataaaatattatcaacaaagagttttaa

SEQ ID NO: 9183 - DNA, 1015 bp, Homo sapiens
attaccttcttcagataaaaatctaatccctggaatatagggaaatttcacaatcatcatcttggccctcacatttacttttctgttatcagtaacttcagaacatacaatttatgtaaatggaaaaagagaaaaaagacaattaaaatacaaccaaatgttattaataagagtggtctccaataagtggagtgagacattatttctatgtcacattctttatgaacacaactttgttttgcacaacacatgatcgtaattaacaaatataatacttttagaagagaggccctgttagacatgagtggacagctttggaatcaaacaaactagagttggaatgttggcttcacttcattccttgagctgtgtgaccttgggtaagtaacttaacctctctagacttcagttttctcaactgtaaaattaggaaaatagcaacttcgtaagattattgaggatgtgattatgcacattgatcagtaagtggtcaatgtaatcatatcatcactgctactataattcaattttcaatttaaggataatgttctcttatatatttaatttttcctcattattctaaaacttagaactcctccatatataattaaaagtgtgaaaatctaaaaatacttctgccagtacaagatgcacagacacatacacacttaattcaaagacatatgggtacttagaatattgaagtattttctaaattgttttctattttactcagatcatttctagcaccaactcaacctttgctttttggatgagtttggtaaggattaattctacttccaatttggtgtgtttggtgtgccaaaatgtatctattataagatatgttatattgcatacaagtggaagtaggtggagtattcctctgttataaagagtatttacaaatttccattgggaaatatcagctgctcactattatctgcagtattgataagactacagctatatctttatccatttattctccattaaagaaattgtgataaactgc

SEQ ID NO: 9184 - DNA, 2876 bp, Homo sapiens
actcctttccttcacctcctgcccttctcttaccttttcagtgaaattccagcatgcaagctcagaaccaacacattactctctgtgcctaatgttcctcaatgtggttgatttttttttttttttaatttatagagcatttcggggggggtgggggaaacacacctaaacactttatctccaagttacaaaagtttgaggtgcagagggaaggccagattttttttttaatgaaattatatagattagatctcagtatttaaactgttcctcaattttgtgaggctgtgttggaaataacccgcctctagtgctgttggtatgcaaggcagcggtgcttaatcaatatttcctgtgctcaccagaggcaaaatgtaccaatatcctgacaccattctctctccatttacttctggtggttaccctgactcttgactcttagaagtgcccgagatggggctaacctttattaaacagatcgcatattatgatcttgctgcagccacagtgcagctccacattaactctacagaccaaaccatttgtatctggcatcacttactaacacacgacatgcggcttttctgcatcaactgctatgacggttaagaatgtcagtatacaagaaggaatagaaaactgatactgttttaaataatctgtaatttcaattttttttttttgctgaaatacattatattgtacgtttgagataattctagtacaaagtataataaaactagatgtataataaaccctttaaatcattggtaagtgtacaagtggtggaactgaagcatttactggacaaagtaatgttactctaatggttacttgctcgtgcgttgccacactgtgttataatttgcttcatttccttgctatttgatacatagtgtgcatttctctgtcactgtaactattgtaatgacaaattttcatcttactgcacaatcaaaatgacattgataggaatgaactccagaggctgggcctgaacagggaggtggtcgctcaggcctggtgctcagtcgtacgacctgtacctctcaacttttgccctatctgttaaatatatgctatgtcattaaatgcttttaaatctagcacggtgactagttgttgttcttcctctgctgcgtgtgcatgcccagtagggaaactgcaaagggagaaatgacaaacaagaaacattttacaaccagtctgggctcacttttgcattttttatgcatgtctggtgcacaagctttgaaaactacagcaaacagtaataaatgtgactgttttgtagttatacattcaggctttatcttttatttatgaaaaagttaccagagcacttgtgaaacctgaactctgagataggggttggcaaatttgttctgtaaagggacagagatagtaaatattttaggctttgtaggccgtaactgtctctgttgctcaattctgctgttgcgtaatacaaaggcagccattgacggtatgtgaatgcctgggcatggctgtgttccagtaaaactatttaaggacataaatttgaatttcatataactttgacatgccatacaatattttgattttcttaatgatttcaaaatgtaaagtctattttatacagatcagaccaaaaagaagaaaaaaaaaaaacaggcaagaggttaggtttggcccatgggccatagtttgctgacttcagcatagagtcgtgggttatttacaagtgacatacttttcctgggttatctgggtatgttgactccatgccacttgcataaagcagcaatggatattagtattatggatgtccagtaagttattccacaaagaccatgcctaaggtggcatcagccctgggctccacagctgcgtggcatcaaagctttctcttaactctcttacctctaggcaaactgagacctcaccatcctctcccctgcttcccacgacagtcctttgcccttgccatgctcagggttggaatcaagttgttctattctcaacagaccaaaatgtttagttaaggcaaagtatcttggaaacaattgtgattaattacagtcttgtactcttgacaaagctgtgcagatggcaataagttcataccagcaatcctggagtcccataataaatacgtacatgtggaacatcgtgcacataatttcaacagttcgcagatctgtagttatgaagccagggtttggtggtatttgctctctcttggtgcatttgataaggatccactgaggcctgaatgtggaagatgatgggcagcgagaggagcgtcagaagaccccagtcaagacgtgttcgccatcagaggttacaggccgcacagcctgatgagcttcaagcctggcagggtaaatagtttttgggttttttgttttttttttattcttccactatcatgttttttgaggattttgcatatttcttgttgccataatgctgtgctattttaccctgattttcagtgatacaatatgggtgacaatactggcccctccataaatctgaagagtaagaagtagtgaaaataaggcttaggatatgaaatggcgttgtcacttgaatcaaggccactttttgtcctacttgagcatctcaagttgggatgcatcttctgatggcacttccggaactggctgtggtttttttgggtgtaccgagagtgccagtgactgtgcttcttacaattcctggcatcttgagtaggtgaaacactgtatcagactgggtgatgggcacattgtcatttcaccaagttcctggaactgttagaattgcttgtgtatggggatcctatgttagttcccctggatacattgttttatcagtcggaattcttaaataaagacatacttcccttc

SEQ ID NO: 9185 - DNA, 2221 bp, Homo sapiens
agttcactaccatttgtcaagaatcaccctttccaaatcctctgggttttgactttttggcttccacttcacccaaaatgttaaaatttttacttaattcatagccttccttggtttcatatttgtttgcatttaattcatgtttgagtctcttaactgatggatgcccacttgccttaaagcagcatacttattttttgtttatttattgtgagctttttactttattaagattttacagcgaaacccttacatgagtaattgaaatgaaattaaatgagattacagcataatgaagaagaaaactagaatctaacaggtatgacacattcagttattctaacagggcacagtactgtgctatatgtagccgcctttacagatgttattaacctatagtagtttactattaactaggaagactggtgtatgaggagggagacattctgtaataagattaaaacctaaagtcagctgtgtaacattccatgaaagatgcattcatttattgaagatgacaaaaaagggagtcagatatattctggaagctattttaattttaggcacacaatctcatacattttgagacccttgggtcatttattactttttacaaactagttcctctctttttttctgccaagtcctgaattgaaaactgtaggcttccttgcacagatgttgcagccagcctcaggagtaaagtgcccgctgactgctgccgccacctctgtctcgctccctgtcagtgctgctggcacgtgggacgcggcaggtgacagccgttctcagcatgttttagaagcttgcctcacagacttccatgcctctccattcagccgatgacttcagggtgtcaaactgttttaatttttcaaacaaatggaacagaagccattgtggttcatcctgattacttgaacgttgcacttggtggaccgtgcctgggagcgctcgcatgccccctggcttcagaagtcatgtcagtgtctctgtagacaaactccactgtacatcttggattaatcttctgattcattgttcattttctcaagactttttgtggaattctctgataaaggaagcttttaggatggtatctatcaggccaccagcaggaattgaaaatgttttcacaaaaatccttttccttagaaataaaagctggtgacagagatggtttccttgtaccgataaaaacaaaaccaaatccatattatacatcaaaaccttgtgagacattcacttgctcttttgccatatttagatgtgtcagtggaatcagaaacctgttttgatatgtgttctctatgagttaagtctgatttgtctttttatttcatgatgcatgtcttttttttcttttgtcaggataacgtcatatagcatcttgtttgtttttccttatctctatgtacatatctatctacttctgactgtagatgggtatatagatagatgccaagcttcttatgttctgggggtagtatgcatcattattgggtctctgccttaaaacacatcaaaattcattttagacaaaaaaacttctgctttgtctttggtcattagggagctctaatgtgtgtttgtggctccaagttacattttgtgtttcattgatctatatgtatatatgtgatgttttcatatatatatgtgtgtgtgtttaaattttgtatcatcaggactgacacccaatttgacactttttgtatctagaagaccctccaaaaaaggaaccacataagcacacaagaaaagagtgctatgatgttcttagcatttgctatcatgcctatttttatctagatttttaaatgtagcttgtcataacaaaattttaattacaattggcttgtatgagaagaaaaagtatttttattgttttgagtgatgacgcagagactcagtgaacttgaaaatagcattgcttcgtgcactttgaataccaatcaggtgttttctgtgctactagttgtcacgttgcattcatgttcacctcctgatttaagtatctcgggtgtgcccagccactaaagcactctggactaatcgctaaagagaagcaacgtggggggtggggttgcgagggatgtgttcacatgtacccatcatttgatcatagcactgtgattgcttttgatgtgtgtctctagtggtgtgctgtctgttggcatgcttaaagcacatgtccattaaaattcattttgttcctttt

SEQ ID NO: 9186 - DNA, 31 bp, Homo sapiens
ctgtatgagttaataaaagacatgaactaac

SEQ ID NO: 9187 - DNA, 70 bp, Homo sapiens
taattaagaacaatttaacaaaatggaagttcaaattgtcttaaaaataaattatttagtccttacactg

SEQ ID NO: 9188 - DNA, 175 bp, Homo sapiens
agatgataccaaaattccttttgataattttttaagtttccagctcttcaccgaaatgttgtattcttatttcagtgtttccttccagacatttttaaggtaattggctttaaaaagagaacatattttaacaaagtttgtggacactctaaaaaataaaattgctttgtactag

SEQ ID NO: 9189 - DNA, 1801 bp, Homo sapiens
aagcagtgcctcctcacttaagtgaacaagcaatcatttagtggcatagatgcagccacttgttttttaaatagaagtggctgtcatacgtgaaataaggtgaaagtgacagccttcagtctaataaccttgaagtggtttttgaactgtcaaactttgacctgtagatgctgtagcattctctcactgattgctacatacacttctctgaggatcacctgctgtcaaattgccatctacagtattacagctttgcatttgggggttttactgccttaactttcaatgcttgttatgggaaccagttcttagccacttggacactgataacaagtcctgaactccttttttgttttgttttttgtgtttttctttttttgtcttatgttgtaatcattgtatagagctaaaaaaattgaaaacaaacaaaaaaattgtcttgtattttccaaatgttaatacatttactttagcattgaagccactttgaaacctgagataaatgaatgtgaggtatcttttctgctttcctcatttgtgtagatgtactgtctgttctgttgatttaaattatttttttccagattggcacatgaaatatttaaacttttttgtgtgcctttctgtccaaatgttgcatagttaccagggaagattagtccagtgattacataagagttgggcaccataaattctctatattttgcctcccatggaggcctttgaaatgcatctttattaaaaatcaaaatataaccaggatactgaaagtcagtatatgaatggtaaaattgttacatatcctatttcatgccattcttgttagttgactggtattttttactgaggagcaactcattccagcatcaacaataagataacctttaagtatggcacacttgtatttttgaggtgtaaaattaacttggcatgataattcctgatcattatttaccccacaacttcaaatagtttcttcacggactaggcatgcagaaataagcagtggattttattgaaacctaaaggcattttgaatgacattgttaccaaccattaattggctcaggacctttgtaatttttatttaactatatgagttgtctttttttacgctgcttttttcaatgcatttcttaatattttttaagtttcatgaatgcatgctcagtttattaaaatccataaccatgtaattcttgtaatatgttgattcagtgttttgtaaatgaagtcgtatgtattttcagagtatttttgtatgtactgtaagataccatcttttcaaagagaaacgtttaaaacctttattgtctctccttagtctaattttttaaatatggattatgcttgaattactatatttaaaatgaaaatgtatagattacacagccaggaatgctagtatctaccaccttctttagatttcactcagcatttagtaggtccagtaggaaaaacccaaaatggtacattgagtagtgtggggaagacacctcgtgtattataggactcacgggatgccatctagcaagtggagaaatagcagtccattttctcttgcaagccctttaccattgagttgaaattcttgaattgccagagagccgtatcctccaggtcccactcctgttcattgccccttaggtctccaaaatgtaaattctaatgtttaccttgtaccatggaaaacatgaaaagagtcttagaagtaaagaacaacaaggaaaaaaatgtttgttctattattccctttttatatagcagcaaaagataagaataaaatcacataaccaagttg

SEQ ID NO: 9190 - DNA, 508 bp, Homo sapiens
cttgcaagatttaaatccttttaaatcttgataccacctatatagatgcagcattttgtatttgtctaactggggatataatactatatttatactgtatatataatactgactgagaatataatactgtatttgagaatataaaaaacttttttcagggaagaagcatacaactttggacatagcgaatacaaaattggaagctgtcataaaaagacaactcagaggccaggcgcaggggctcacacctgtaatcctagcactttgggaggccaaggcgggtggatcacttgagaccaggaattcgagaccagcctggccaacatggtgaaaccccgtctctactaaaaatacaaaaattagctgagcatggtggtacgtgcctgtactgtcagctacttgggaggctgaggcacaataattgtttgaacccaggaagcagaggttgcagtgagctgagatcacaccaccgcactccagcctgggtgacagagtgagactctgtctc

SEQ ID NO: 9191 - DNA, 486 bp, Homo sapiens
tatctttcatgtttgcctgcagttgaacaatactttagagtactttttaaaattatttctcacaaagaaatgaatgtacaatccaatgaaaacatttgttattggctatttcaggtgttttgctgctagaaattattaaagttacacactagtatgttggtctggtgacctggttacattttattatacacattattggaccataaggacatttgtttcacctagattttaagattatggagactgctgtcatttttatcttatttaaatctctaggtttattggaagagtaagattgatgaactatagcatgcacagtttggtacagtagagatcattaatacttttaaaagttctgcattaattgacttggaatccttagaaatggagtggtgacatgtcagtatgagaacaggcaaaaggtaaatttttttttttttttacaaccttaagtaatctcaataataaaattttctgatctgtatt

SEQ ID NO: 9192 - DNA, 570 bp, Homo sapiens
gtgaggcagagacacaaagatatggaagaacattggacagatttacatcgatatattaattaaggtgatttcagagttggagcaggagaggaagccttatagatatttttttttctttttgcttgcttgtattttctttttaattattattcagtatttcaagtagacagaaaagtacagaggataatacaacaaatatccaggtacccaccacccagcatttttacatagtagcatttgatgttttgaaataagacataaaacattccaaataccctatcaccgaggatcctgcatcctcttcttttcccagaagtgaacatttctctgaatttgatgcttattatgcccatgcatgttgttatacttttactacatattttatgtagctacagcataatatgctatgtttactttatatagtgacctcatactatacatatcctcatgcaattttttagactctgtttgagaattatatattttgattcaggtagcttaagtttattttagctactcagtagtaatgtattctattaatctactaatatatatttcttgtctatggac

SEQ ID NO: 9193 - DNA, 137 bp, Homo sapiens
attaaaatttattataaggcattactttttgtaagcggaaaaagtgtcacatttacctcttccctatcttttgtttaaaaggactgtctttattttatattggatgaaatctatgaacatatatacaatgtaaagca

SEQ ID NO: 9194 - DNA, 128 bp, Homo sapiens
agatgatgtatgaaggagttggagttgttgaaaccaaggtgtccatgatccctccccactgaccttttctaagaaaattcttgtgcccgcattggtattaaatcctcgcattcagtcttcctgcctct

SEQ ID NO: 9195 - DNA, 1315 bp, Homo sapiens
aatagatacaaactcaattttgcatagaaaggtgtattttgaatagttcccatgttgtgttctcacattagagtaatttctatattaaaccatgaaaattgcctttatgagtgatacccatttgagggcctctaaacccttcaatttggtactcacgtgaagagggaaagcggaagatggtaatttttttttatggatgatatggcaggatgattggttctgatcttaccggctagtggtcatttttaaaaaacttgtaccctcttatctgaaatcctgtttctggaatttggccattttaagtgattttgtttgccctcttctataatattcctacttcccataataatgactgatttatttgtaattcaggtatttataaacctattggctacaaagactttgttaaacattatccagtggttttcgtgaaatggaattatgtttatttttatgggatttgggtaaattttaaattgtctagaaaactgaaatttcagttgtcagttgtggaattcagtttttcaattgtggaaatttcctgccaccccaacagtatttttgtgtgttaattaattttgcaaaatgagaatcatggtgtgacactcatctaatttatcttgttgtgatgttatggtcataataaggagaaagagggtttaatttttcttgtatttggtttcctggtggtatcatagtgtaattttagtatttgaaaatcagtgtgattccttaatggccaactgaagattgaattgccgctaacaaccatatcgtgttagtgaattttcaatatggaccaggaaggcatatgtattttgaacttgagtgaaaaggttgaagttacagacttttgcatagatggtttgtcaatttaaaattccagaatttattattgccatattttcacatgctgcttatacaagattattattgagtagtaactgcttccctgtctatgtagaagtgcctgtgtttttatttattgttcagatcaaagaccaaaacattttcttaaatatattttatgtaatattttatttgtatacagtgttgttgatgaaatatttaactagagcatgatattttaaatgttaaggtgtaacatatgttaaataaaactgttatttttgaattttaaaatttgttttttgggggtatgaactactagagtttaaaattctgccaaactattacttatatgtactattgtgtaacatactttcttgaaatatttttgtttatagaattgaaggttcttatcagatgggatactggggactataaacaatggaaataaagccactgtattttt

SEQ ID NO: 9196 - DNA, 984 bp, Homo sapiens
ccatcagatcagaaagaatctctcccaacattttagagtcttgcttcccaaaccagaaaaagtcagactcattgttgatttaaaacttttaacattttgtttggctggattgtactactttacctctactttaccaccaccacccttttcctccctcctttccaaataatatacagaactccaaaatagcttcatttaaggatttttttgtgagttaacaatttccttgaaatcctgtgaaatagatttgcacagacaccttgtgagtgattggtattggaggtgttcaagaaactgttcgaaaaagaacaaaaacacttccctcgttattttctctcattttttgatgagaggaaaatttgaaacattattcttgttgttgttggtaatagcataatgacagtgggaggggtacaaggggataagaaaaatgtcatgatttttttccggtcctgccacatgtaacacttactctgttacctaaattttatagttagatcatatccaatctacttattaaactgtgttctatttaccagtggagtttttctgcagtggttgcgtttcactgtaaggataatggagttcctctcctctgctttcctcagaggatggtcctttaacatagccagaaacaagccctgtggtttgaaggtgagctgtgaggatgggactaattgatatgcaccagtttacaaagacagtcttatcatccgagaatacaccatctttttctctggataattatttcttacatcatgcttgattcctacattttgttgggtctcaacattggctcacgaatgctgttaatatttattctgtattgataaaaagtctgtcttgccactacaagtaaatcccccatttaatattttcttctttagcatagcactgtcattttttgtgaaaatggttatgtttatttattacaatactgagtcatatataaattttcaataaaagcagaaactttcttacctt

SEQ ID NO: 9197 - DNA, 852 bp, Homo sapiens
gcccaggaatgaaagaggagaagaaacgcaactacctgcgccctccgtggtcccgatcctgttgctgctgctgcaccgcccgcctttgcctcgtcttctccaaaactgaattttcaccccccaaaaagatgtccattgcctgcactgccgcccccatttttgtgccacttgcttggggggatgtgcaaacccaccctgccccttggatggggggaccggtgcttcggcttggcctacacattctatacaggagagatgtattatttccccccttcagcccctactaaactcttaagcctccccttccagtctttctggacagctattaagcacttgcagccttcggaggctctgcgctctgatccgctgtttgagcccaacactttaatttattctttctggacactggagtcactaactggcgtgtttctgcccattggagcacccgcacactactccaaatcaaaaccactaagagttcctcccgcgcagactgctgccccttcagctgccctcgattttgctccacgcctgccggccagagcctcccggcgtttcttccgccccagcggagtgcgctggggcgcgccagggctaggcccgccggaggagcgcgtccccagccttccgcgcacagagccgcatcccgccccgccctgcgctggactggttcaagcttccgcctcggcgggaacgctgtacatagtcaggtccgttccagggaccacttaaactttttagttgctgttggttggttgaactgaacatatcttgtcttagcacccaggaaacagaactttaagatatatacagcacatatatatatatatacatatatatatacacatatat

SEQ ID NO: 9198 - DNA, 207 bp, Homo sapiens
ctagacaatgatgttactaaatgcttcaaagctgaagaatctaaatgtcgtctttgactcaagtaccaaataataataatgctatacttaaattacttgtgaaaaacaacacattttaaagattacgtgcttcttggtacaggtttgtgaatgacagtttatcgtcatgctgttagtgtgcattctaaataaatatatattcaaatg

SEQ ID NO: 9199 - DNA, 334 bp, Homo sapiens
aatgaaaaatactgtggacacttaaataatgggctagtttcttacaatgaaatgttctctaggattctaaaataggcaggtactttactatgttactgtaccctgcagtgttgatttttaaaatagagttttctgcagtatgcttttagtctaagaaaagcacagatggagcaatactttccttctttgaagagaatcccaaaagttagttcatcttaaagtgcaatattgtttaatcttaaaactgggcaactttggaagaacttttaacagaagcctcaatgatgatcactttgaattgcttgtgatttcaaaaataaagcagtgaagcaat

SEQ ID NO: 9200 - DNA, 230 bp, Homo sapiens
tttaaaccacctctatttcaaataggatcacgtgccacaactatctgactgttggtctggaagaagtgtcctagcaagatctggagacttaaaaagaaaacaaaaacaaatggcaagtttcacttaagggtggtttgcccttaagaagaaagctgttgggacaaagacaccgagccattatacccagaataaaataatacatttatgctggattttattcagaccaaact

SEQ ID NO: 9201 - DNA, 962 bp, Homo sapiens
ctgatgtgaattggacagtttctattgcttttccttttttccatcccttccctaccatcaaaagcatacctgctctaattaaaaaaaaaaaaaaaaaaaattcaagttcagctgatttgttggtaagccgcactagaaaggtatacatagtaatgtatatttatttacatactgaagtcctaaatttatattagaaaaatgtaaataatcgggggtaaacatttttgaagatttattctttttgtgttgctggggtgtatacatttatgtctttgtgaaatacactggtggtgtccttcttacaaaacttttgaaataaaaaaaaaactcaaatcttcactgtctgtgaaatccccttcagtcttttcagattgcattgactgtcctcttgatttttcatattacatgtcaaattacttttgctatcataaataagctccaaagtcccccatttaatttttttttaattttgtgtatgatgggtttcagatctggcttttgttaacattttggggcttttttaatcttttcaatctggcgtattgctgtttgaccttttgcaaggtacttaattgctcttttgttatagggtatggatcattgtcagaacttgattggaggggtttaaagagattgtgtctgtttaaaatcagtatgattcagagaaggaccaaattatatgaatgtcttacaatggaatttacttgttactgatttttttgttctattgtaccactattttttgaggattttgcacagtgtaaaatgacataatcatagattgctatggtttaggctgtatatacagtgaaaactatgggttttaaatgtttggggaaattcctatggaaaaaagagagacatgtagaagaacctctaacaaggttaatgtgcatgcccaaggtcttttgaaatttcagtgtgtaaatttccttttagcttatacaaaaataaaataattt

SEQ ID NO: 9202 - DNA, 2717 bp, Homo sapiens
tggggctgggctttgggcttgcctgccagcagtgatgtcccaccctgttcacccagccgccagtcatggacacagggcactgcccttgccaacttttaccctcccaagcaatgctttggcccagtcgctggcctgaggcttacctctcggcactggcattgggctccccagccggaactggttaccaaggacaaggacactctgacattcggcttgatccatgtccaggtgcaactgtgtgtacaccagggatctgtttggaaacaaccccttgagctgccaggctcaagaaatcatggactcacagggtcctgtgtggttacatcttggaaaaaatgcagatgtatttcactctccccggtcagctctgcatcaggtgttttctgagcaaaccaagggggtttatagtcatctgtcgcattgcctcgagttgcagtaattgaaaaaatgctcaaattcttagccatggctggcctttgctgagctgggactcaggtgtttaaagagtttgtgctatagctaggtgtggatagcttctgatccctgggttctgggagactgcaggtgccgcacattgtcaagttagaaatactccaggtgggtgttagcactgtggtggtctctggtccacagccttaggtaaacaacttagattctgaggtcaaagaaaaaaggagagggaatgcagccttgtgggggagaagcggggcagagggttctctaatctaatcaggacaggacaggtttcacatacaattgtcccagttcgcatcccagccctggggcacttttctgcttccttccagaggcctgggcctctgataacactttggctttttctccattcacgctgatttggcaaaaggccagagatgggcctccttccctggggaggtgtgatgtagttatcacattcaggacccttgttgatttatcatctattatttgaattcaactggacactctgtaaaatgctgcactgcagcaaaaacaaaaccaccaccaccccagagaaaaccatgtactaattggagtggggtacccccattcacaggttcccaggtcccctggctttggctgatttcaaaatatagagccctttcttgccagtacatccaagtttaaaattatcagcgaaatggtccatgtttttccaattacctgctgacacggttctaagctaagtgaaggggaagatctgagagcgtgctgtttgtggctgttgatgcatattcgtgatgtaacaggtcctggggcctcactttaccccatttgtaaaatggggctaatgtcacctgcctcttacctacctcagagggatttggtgaagcaaactgttaatcttcgaaaacgaccatttcacttcttggatatcaagtgctaacccagtatgttcttcttttttatgtaagggacagctttctccacagagtcctttctgctggtgaggacagcatttctgagcagggctttgttctctatgtgcattaggacttttatcatgcccttgttctgtgtgtagttacttgacagcatcaaatgccgcctcttcctaatgtccttcaagttttcatgaactagcaaccccaccttccaccatggttctgggcgcctgattttgctgtgactcccagacccagccactgtttctgccaccctgtaacaggccattaaagctccccagtgttcagcctccttcactcccttgttttccctgttgctatgtgtcacctgggccctacagacaggggcacacgcttatggatgtgtgtaccattgagatgagaatgggtagatggaacggagaccatcaagccacacccccttcttaaaactggggacatgagcctgagcagaaagggtgaagaagagccatgggacacagagttgacccagccagggggaaagcccagctctctttaaaccagctaagccattccagtctcctgtgaagccaaaagggaccaggaaccgtgcaaaggaaactggaaacttttccccgctgggtagagcatgttgctgatactcttctgttttcaagggaaacaatcacattgtttgattccaaatggtaaatgaacactcactattcttcaggcttcagtaaatctttttttcttccttcatatatatatacacaacacacacacacatatgtatatctatacacacatgtgtgttgtgtatatgcatgtgtgtgtgtgcgtgtgtgtatagttttagctccaagccaagcaagtttgtgtttggatagaggggaacttaactattaactacaagttgtatgtctgtggtatcttgattttcccatttctaaagatgaatttcacaaagccataaagcgtgaaattagagctggacttaagactcattggccgaccatcctgtgtcctggcctggccctgcagtaagaagcgtgtctgggtctggagaagggtgcttccgagagtgtgcaggtggcccttccccttggaggcgagaagagagaatgtgctgtctatcttcctggttttcagtccacagagtcggtagaccaggggttacgtgactggggaaaatctcacatctccttgtctgaaaacatttcccctgctgttctctttctaacatgttgtggtaaatctgttcagatactgctcatctgactgttttgtacatgtgacaattgccttaaaacctagcacagtcctcagaaatgaataccgtgtttccactgg

SEQ ID NO: 9203 - DNA, 3370 bp, Homo sapiens
gcatcttctcaggcagaggtgcaacctgtcggccaaacactggctagtgagaaaaaaaaccttcaagaagtccttgcaagagccattcaacactgaagtcaagggggaaaccttcaatatactagctttaaaatgcctttctcctccctgaatggagggctgagttactatttttatttacaatgaatccttccaaactaaggttttccttttggtgcttctccacaaagagcgtgtagctttgcaatttttgataaaataagacgtgttgccttcccctctatcccattaaaaaagagcagataaagctcaaactattccacctggtagggtcatttaccaagggctggtaggagattccgaatactcaatattctcaggcatgcaagaggacctaagagactgaaaaaagtgaattgttggccagaaaccttgggtcttttcataaaaggaaatttgggcttgtcaatccctctttaaagatataggtagaaagaagagatttttaaccctttgtctgcaaaagaaaaagggttaaatgaagcatctatacagatgactttgggagattatgacaccttttgccatcttcagggcttacgtctttactttcttggctaaccagtttcttagaagaaaatgtgtcagggacttggggatctacagtcatgctttagcatggctatggagctaattatcaagcttaaagggtaactttgggaggactcctcccttcactcctagtctcccttggaagagcagtccaggctcagggaagggaacggataggatgacacagtaagtacagaaactgaagctgtcaatagtgaaggaaaaaggggaattcttcgttgctttggcattgacacataagtactttgattaaaaaaaaaaaaaactatggatcaaccattcaaagcatcaattctatagctttttgcagcaagatgatcagttattgctggtaactgcagattctacagaaaagcacttttaaagttctgttgggccatgaatgaacctggaaggaggaaagcacagtaacaatggaaactaaagtcctattattaatgtgacttttctgcttcagaatttctgagactttatagtcactggaaaatagccattaaattctttaaagattagctcttcaacagtagctacacataaaatgcagtatttcaagtgcctgatgctgctgtggtatgctttatcataatgcttaagggcatgatcaaaattaaaatggcttatgagtttgccatattaatcatcttagttccatacacactgagactttaaaagggaaaaaccactctagcaaataattgtcaattataaacctgtatgtaaaacattcttgaaaacctagagttggttaaaaaggtagagatgtctgacggcctcttcttaaattgatatattttaccttctcttagatgtacatttataagtaggaacatgtccttccactgagtatgttactgaatagcccttaggaaattaaacccatttatttactaatatttgacaggcatagaagtgtattaattagcataaaagttggagatgaaaaccctatagaaacaaattggccaatattatactaattgaatgcagaatgtggcattctattcccattcaactaataatcagcttcaactgacaggaatttgcacagaatgttacacaataccctgtttcccaagaaagtactaccttacctagagatgatctaagatatttttgttcatcctctgaataaggtgagactaaagggtgctaactccctggacctggctgtgaatgctactgaagagtatcaacacaactgttaattataccgccgtgctttaagtttaagacttaccttaaaactcaagctgaaggctgggcacggtggctcatgcctgtaatcccagcactttgggaggccgaggcgggtggatcacaaggtcaggagatcgagaccatcctggctaacacggtgaaaccccatctctactaaaaatacaaaaagaaattagccaggcgtggtgatgggcgcctgtagtcccagctacttgggaggctgaggcatgagaatggcatgaacccgggaggcggagcttgcagtgagctgagatggcaccactgcactccagcctgggcaacagagtgagactcttgtctcaaaaaaaaaaaatcaagctgaaattgtttcagcctagtaagatgctgccagcagcatttctatgagcaaacatggccaaattagagtcaagtagctgagcttgctaactgcactgtgatgccacactggaataacttagtagtcccttaaaattaatggaagttaaatccacagggaagtgatgatactcaaagctggatcagcagtttcaagatctgggttcttggagatccataggtaagctcagcaaatggaagacgacgtcaacacggctattttgaagcttaggtgggaatggaacacaaagaaggtttgaggtaagatatgctggaaaggcaagatgtaggctaagggaaattcaatccaaggtcgaagaataggaaattactgctcagaccacaatgactatcattctgaaaggatttcacagagtgtgcagctgcttagatttaagaacactcttcttcactatgtaaactaatttatggcagcaccttatatttagaacaagtggtaattccctttactaagtgaacagattattaaaacctgtagtagctttgaaccgtttgtacttgaaaatgggggtataaaggggtatatattttttccagaaccacatttattggcgtatacatagaagcaaatcttaaggcatgctgaaatttgttgtaaatcccaatctttactgccatggggaaaagaacgctggaattttccaaacttaagtctgtaaatatgctcatcttaagttcatgtaatgtttccgctaactcaccaagaataagctgacaatttaaacaacttttactgtgtaaaaatgaagtgcacggcatggcatcacagtatcttgacatttgttttgtgtcatttagctactttagaaaatagtttctgaactctttccccctttatactgtattaaggcaaaaacaaaacttctgaagcattaaagatcttcaccaaaataactattggtaacttcaggaatttgtcagttgccttatgtgaggatgaatagatccaccaagcacgcctataatacaaagtaaactatgatttttattgtgaaattttcatagatggaaaattgaatattctgtccatttcattttacaattatcttaccacttatttttgtaccatgtatttcaattgcctgtttagtgaaaaataaaaattaaaaaaacctattca

SEQ ID NO: 9204 - DNA, 2517 bp, Homo sapiens
actccaaagcttgttcccgtcatacccgtaatgctttcttttttcctttattgccaatctttgaactcattcaactccaggacatggaagaggcctctctctgccctttgactggaaaggtcaagttttattctggtgtcttggggaagctttgttaaatttttgttaatgtgggtaaatctgagtttaattcaactgcttccctacatagactagagggctaaggattctgtctgctgctttgtttcttctaagtaggcatttagatcattcctataggcttcctattttcactttactgctctaatgctgctagtcgtagtctttagcacactaggtggtatgcctttattagcataaaacaaaaaaaactttaacaggagcttttacatattactgggatggggggtggttcgggatgggtgggcagctgctgaaccctttagggcatttcctctgtaatgtggcgctttcaactgtactgctgcagctttaagtaccttaaagcttctcctgtgaacttcttagggaaatgttaggttcagaactaaagtgttttgggtgggttttgttgcgggggggagggtaacaatgggtggtcttctgatttttatttttgaggttttgtcaactggagtacgtagaggaactttatttacagtactttgatttggcaggttttcttctacttgtgctctgcctggagctgtttccatatgatataaaaagcaagtgtagtattccattactatgtggcttagggatttatttgttttttaaaatcaaccatgttagctgggattagactccctacagtccttcaatggaaaagtaacatttaaaaatcctttgggtaattcgaattacagatttaaaagagcttaagatctggtgttttgttaatgcttctgtttattccagaagcattaaggtaacccattgccaagtatcattcttgcaaattattcttttatataactgaccagtgcttaataaaacaagcaggtacttacaaataattactggcagtaggttataattggtggtttaaaaataacattggaatacaggacttgttgccaattgggtaattttcattagttgttttgtttgttttgatttgaaacctggaaatacagtaaaatttgactgtttaaaatgttggccaaaaaaatcaagatttaatttttttatttgtactgaaaaactaatcataactgttaattctcagccatctttgaagcttgaaagaagagtctttggtattttgtaaacgttagcagactttcctgccagtgtcagaaaatcctatttatgaatcctgtcggtattccttggtatctgaaaaaaataccaaatagtaccatacatgagttatttctaagtttgaaaaataaaaagaaattgcatcacactaattacaaaatacaagttctggaaaaaatatttttcttcattttaaaacttttttttaactaataatagctttgaaagaagaggcttaatttgggggtggtaactaaaatcaaaagaaatgattgacttgagggtctctgtttggtaagaatacatcattagcttaaataagcagcagaaggttagttttaattatgtagcttctgttaatattaagtgttttttgtctgttttacctcaatttgaacagataagtttgcctgcatgctggacatgcctcagaaccctgaatagcccgtactagatcttgggaacatggatcttagagtcactttggaataagttcttatataaatacccccagccttttgagaacggggcttgttaaaggacgcgtatgtagggcccgtacctactggcagttgggttcagggaaatgggattgacttggccttcaggctcctttggtcataattttaaaatatgggagtagaaaacaacaaagaatggaatggactcttaaaacaatgaaagagcatttatcgtttgtcccttgaatgtagaatttgtttttgatttcataattctgctggtaaatgtgacagttaaaatggtgcattatgtatatatattataatttagaaataccattttataattttactattccagggtgacataatgcatttaaatttgggatttgggtggagtattatgtttaactggagttgtcaagtatgagtccctcaggaaaaaaaaaaaattctgttttaaaaagcaatctgattcttagctcttgaaactattgctacttaaatttccaataattaaaaatttaaaatttttaaattagaattgccaatacttctacatttgagaagggtttttttagaaatacatttagtaaagtccccaagacattagtcttacatttaaacttttttctttaaaacatggttttggtggttaacttttacacagttctgagtactgttaatatctggaaagtatcttgagatatcagtggaaagctaaacagtctaaattaacatgaaatacttcattttgattgagaaaataaaatcagattttttcaaagtc

SEQ ID NO: 9205 - DNA, 1513 bp, Homo sapiens
ggctgcaaagtatgccaggggagtatgtagcccggggtggtccaatgggtgtgagtatgggacagccaagttatacccaaccccagatgcccccccatcctgctcagctgcgtcatgggccccccatgcatacgtacattcctggacaccctcaccacccaacagtgatgatgcatggaggaccgccccaccctggaatgccaatgtcagcatcaagccccacagttcttaatacaggagacccaacaatgagtggacaagtcatggacattcatgctcagtagcttaagggaatatgcattgtctgcaatggtgactgatttcaaatcatgttttttctgcaatgactgtggagttccattcttggcatctactctggaccaaggagcatccctaattcttcatagggacctttaaaaagcaggaaataccaactgaagtcaatttgggggacatgctaaataactatataagacattaagagaacaaagagtgaaatattgtaaatgctattatactgttatccatattacgttgtttcttatagattttttaaaaaaaatgtgaaatttttccacactatgtgtgttgtttccatagctcttcacttcctccagaagcctccttacattaaaaagccttacagttatcctgcaagggacaggaaggtctgatttgcaggatttttagagcattaaaataactatcaggcagaagaatctttcttctcgcctaggatttcagccatgcgcgcgctctctctctttctctctcttttcctctctctccctctttctagcctggggcttgaatttgcatgtctaattcatttactcaccatatttgaattggcctgaacagatgtaaatcgggaaggatgggaaaaactgcagtcatcaacaatgattaatcagctgttgcaggcagtgtcttaaggagactggtaggaggaggcatggaaaccaaaaggccgtgtgtttagaagcctaattgtcacatcaagcatcattgtccccatgcaacaaccaccaccttatacatcacttcctgttttaagcagctctaaaacatagactgaagatttatttttaatatgttgactttatttctgagcaaagcatcggtcatgtgtgtattttttcatagtcccaccttggagcatttatgtagacattgtaaataaattttgtgcaaaaaggactggaaaaatgaactgtattattgcaatttttttttgtaaaagtagcagtttggtatgagttggcatgcatacaagatttactaagtgggataagctaattatactttttgttgtggataaacaaatgcttgttgatagcctttttctatcaagaaaccaaggagctaattattaataacaatcattgcacactgagtcttagcgtttctgatggaaacagtttggattgtataataacgccaagcccagttgtagtcgtttgagtgcagtaatgaaatctgaatctaaaataaaaacaagattatttttgtc

SEQ ID NO: 9206 - DNA, 364 bp, Homo sapiens
tgaaatattagttggaagacttcacgaagactgctgataactatctgtgattgataggaaattttttttcttgatttctctgtgagaaatgtaatgctgacttttataaagcctggacttctactttatttaataaatcaatgtttgcaatggtaaatgaaacatttccttggacatgtatttgaaagtcattaaatacaaaagttttggaaattcaggaaagttagcaattatgtacggatattatacagaggaaagtagttatatttttaaatgctattattgcagaggatcatcaaaaaagaggtaatctacgttatttcctattctaatgtcttttcctaataaaaaacttcaactttct

SEQ ID NO: 9207 - DNA, 1155 bp, Homo sapiens
tttcaagtcagagactttttatcttgcctttggactctggtgaaaaatactttacagtggtcggtcacaagaaaccagctgaacaatttcagtcatttgaagcctccgtcccttcttccattctcagccagaagcataaacagaaaagaaagatttaagaggattcacactcaacaggttttaggataatttaaatatcaaaaattgattgttatacttaacacattaggtataatttatcatttatctgaaatcacatgtagcagattgcatagtctgtaatcctctcagagggaaacttcttgtttaaacagctctatatggatttatacttttatatttataaatttataacttcatacaaatttataaacatttctttataaattgtaatttaatagattatctcagaaaaacctctctgaatgatgacccttccttaatactgggtgatgtgtgaatatttgtttgttggcagacagggtctcactttgtcacccaggctagagtgcagtggtgcaatctcagctcactgcagcctctgcctcctgagttcaagtgatcctcctgcttcagcctccctagtagctgggactacaggtatgcaccaccatgcctggctaattttttgtattttttgtagagatggggtttcgccatgttgaccaggctggtcttgaactcctggcctcaagggatccgtccgcctcagcctcccaaagtgctgggattacaggcataagccactgcgcctggccttgatgtgtgaatatttgagaggtcataagcagtggttttggccataccgtattataccatatacatcagtaagagctcatcttggaacctgttttgcagtttcttgcagtttcaaaaattaaagacctacatcacagggttaatgtgaagaaagctttatttttcaaatgagtatttaatgaaagtatacataaccaatgttgggtatacagatgcttctcaacttatgatgggtttaggtccagataagcccactgtgagttgaaaataccaaaagtcaaacatcatagcttagcctaccttaaaagggctccgaacactacattagcctacagttgggcaaaatcgtctaatacaaagcctattttataataaagtatgttgaatatctcatgt

SEQ ID NO: 9208 - DNA, 1634 bp, Homo sapiens
agagactcctgcattcctcctcccctcctgagggaagcccatggacaagctcagtccaggacctgtccacttctgtgacaaatcaacgggaaacagcccaggggtgggaagttttcatttgcaggggggtctgaatgtaactcaccatgtggtgtgcaaggttcccctgcattgtattgctcactgcagcccctctgcccctatccatgacccccaagcagatataacaagctgtgcagcctcagtaggctgcttgccctctccaggcctcagggcctcttctggaaaatgaagaaattcaactagtagattcctgaggtccccctagcttaaaaaaaaaaaaaatctgccccatgattctaacactcgcagtagtgatagtgtatctagttgttctgctggtgtccttccttggctaagtcttggccttcagttatcttcaaatgtaccagaacctgagccaacgcctccctgtgaaactgttgctgatctgtagtacagtaccaggaagaaacctcttttgttctctttagacatcttctacttgctcttggccttgagatcgtgtaacaaaatgaaggagggctctcttctttcttcctcatcctactcaaaaacttcccgagagcagtggtggttttgagggttttgacttctattacttttggcagcctggaaagttgtgtcttctgggaaagagacctggggaggccaggagtagctgagggtcctttctgtgcccttaaaccgcccagaggagccctattccactctggttttaggctgatctgagagggtctccctttgttcctttctggagcatttctctaacgtttattacaattaggagggggaccccacatctgtgagattctgtttcatttgaggtttacagaaaaaaaaaagtggccagatgtgttccccccatgggtgagaggcctgggcaactgcctggtgaatgtgtcttgcggcagctgcagcaagtggaggggctgaactactggccagctcactggatgatgggttaatacaacaactgcactgtaaggactcagagccacacagaacttctgagaggggctgttagcattgcgcagcatcttcagttctccagtaaatgatattgcgttcgtgcctcagctttaagcacaagtagcagcagctcctgcttgagttctgagggcatcatggccctatgattaaccagagtgatctaacctagactaaaattgggaacttatttgcaatttttgaccctgaccactaactagtgattcttctccaaaattgagaaagacagcacccattgaagcagatatgtgtgtgaaagtatatttttcaattccagatttttaattttaaggctccaggaaagaaaggagagtagaacatttttcctcattttatcaaatcctctcttgccctccctcaattcccctgtaacattcctgaagctgttcccactcccagatggttttatcaatagcctagaggtaaagaactgtctttttctctgattctttaataaattatctttatagaatatgcacaagtttttctacactcagtgttaaagtatttattaatgggaagtcaacttaatgttttgaaataaatatatgactctgtttaat

SEQ ID NO: 9209 - DNA, 2139 bp, Homo sapiens
taactaacttctgtagtcatatctgccttacatttactttttctttgtgggaaaacatttatgaactaaggaggtacttaagtgacagttattttccttcttttgatagttaatgacttttactactgactctttacaaatgagacattgaaacgtcagccttcagtataatagatggaattttttgttgccttgccttttctttcctacttaaagcatctggaaataggaagacagagaaggtagagtaaaaatggatattttttatgtactttgtatattggtaataaaaagtaaaagccataggttgcataaaactttggtctttttaaatttttttccaaagattatggagtactctgcaagtataaccaggcaaagtacatgaaaacatgcctcttttcattgttactgaagtaattctgtaagcagaaccaggctttaaaaaatgcagccattacataatggcgttttttttctagtaccttagatgtgagctttgcaatttcacttactacttttatccttcaaaacttgggaagattggttccaaatgggtactgaaaatagattcaactaggctgtagaagagaaatgttcaccatgtagggaatgttattttgtgttccacatctgcaatttactgtatgtttgaatttaaaagtaaaaaaactcaaaaaacttgaccttttttttcaaactaaagtcctagctgattattttaactctcagtgtgctgtctttatattaagaatagagaaacgacataactttctcaaatggcattagttttgccttagtttttttgacctcagatgaaagtagcaagttgtttgccagttgaaagttcaagattctggcctcccatatcaagaagaaaccacttattctccagttttacaaagtatctttctgtatttctgttctaaaactactttaagccctataatgctcttcatattacgtgactttgaattgttaaaatgtagtttagaatctttaataacagttgggttgtgtacacagagcaggagatatttattgaaatcataaatcactaagccaaaagaatctttgttaaatgctattattttctactctaaaggaacctaaaaatttatatcttaaaagatcaaaacatatttataataatattttctcattgctttaaaatatatctcccagtaattatacaatatttaatatttacttaaactggaacaagaataagataaacatttctctagactataacctattattctgatttttatctcttattgttatttgggaactatttttccccttataatgtccctttagccttggtagtataacaaatctacgaatgtaatatttaacttattctcatccctgccactaacttaatccttgaagtgttacataatctactcctaggtatatacccagaggaattgaaaacatttccacataaaaactgtacacaatgtcaatagaagcattattcttaacagccaaaaagtataaacacccaaagtctatcaactatcaactgggtgaatggataagcaaaacgtggtatatctgtgcaatggaatattatttggtcataaaaaggaataaagtactgatacatgctacaagatagatgaaccttgaaggcaagtaaaagaagccagacacaaaaggccacatactgtatgaactcatttatatgaaatttccaaaacaggcaaatccataaagacagaaagcaaatttgtggttgccagggacttggggaggaagaatggggagtgactgctaatgagtataggatttccttttgagtgataaaaatgttctaagattagatggcagtgatggttgcacaactctgtaaatatattacaaacaatgcattgtacactttcaaagggtagatttcattgcacgtgaactatatatttcaataaatctgtcacaaaaaagtaatgcaaagggtaataccagtcttttagaaggaaaaaaatatttaatatcaaaggatattcttcgtagtaatgtaatagttcatggtagctgcttttaacgatacagttttaatgcaactttcataatcatcctgaagacacttttgagtataactattgtataaataaatgtatagcttaattg

SEQ ID NO: 9210 - DNA, 622 bp, Homo sapiens
gggtcccaggagtactgcagggacagccccagagaggcccaactctggcccctttctcagtgctatctgatgacggggaaacaaaattattctctgagagggaaaggacatttgagggaaacatcaaatttccccataaataaatgaatggagtttgcaggaaggtgagggtgagcagagatgtgtgtggacatctctgaccatccatcgctgtattcaaatggattgttttattccattctggtctcaggcatgaccacgtccagtgaagacatttgaggcagcacatctcaggacccaggcaatagactggccccaactcaggctggactaaggtgtgattaattctttgttttttgtgtggaacagctcaccttgtcagacagcctcagggcatctctgagacacaggggcagaaaatgacattcatcttttgagtcctcatccatggagtgctgtgtttggggggctgcatctgctgaagcgagaaccccattctgccaccccaccaggatgcccattctccaggacttctccaacttactattagactaaaccagaacaagcaacaaactgtatttatgcaagcaaaattgatgagaaaattatattcaaataaagc

SEQ ID NO: 9211 - DNA, 156 bp, Homo sapiens
acaattttttaaagccactatggatttagtcatctgaatatgctgtgcagaaaaaatatgggctccagtggtttttaccatgtcattctgaaatttttctctactagttatgtttgatttctttaagtttcaataaaatcatttagcattgaattc

SEQ ID NO: 9212 - DNA, 3683 bp, Homo sapiens
agcccaaagttcctgctctgggctctctcagaaacttcaggagatgttagaacaagtctttccagttagagaagaggagtggtgataaagcccactgaccttcacacattctaaaaattggttggcaatgccagtataccaacaatcatgatcagctgaaagaaacagatattttaaattgccagaaaacaaatgatgaggcaactacagtcagatttatagccagccatctatcacctctagaaggttccagagacagtgaaactgcaagatgctctcaacaggattatgtctcatggagaccagtaagaaaatcatttatctgaaggtgaaatgcagagttggataagaaatacattgctgggtttctaaaatgctgccttcctgcctctactccacctccatccctggactttggacccttggcctaggagcctaaggaccttcacccctgtgcaccacccaagaaagaggaaaactttgcctacaactttggaaatgctggggtccctggtgtggtaagaaactcaacatcagacgggtatgcagaaggatgttcttctgggatttgcaggtacataaaaaatgtatggcatcttttccttgcaaattcttccagtttccaagtgagaaggggagcaggtgtttactgatggaaaaggtatgttgctatgttgatgtgtaagtgaaatcagttgtgtgcaatagacaggggcgtattcatgggagcatcagccagtttctaaaacccacaggccatcagcagctagaggtggctggctttggccagacatggaccctaaatcaacagacaatggcattgtcgaagagcaacctgttaatgaatcatgttaaaaatcaaggtttggcttcagtttaaatcacttgaggtatgaagtttatcctgttttccagagataaacataagttgatcttcccaaaataccatcattaggacctatcacacaatatcactagttttttttgtttgtttgttttttgttttttttcttggtaaagccatgcaccacagacttctgggcagagctgagagacaatggtcctgacataataaggatctttgattaacccccataaggcatgtgtgtgtatacaaatatacttctctttggcttttcgacatagaacctcagctgttaaccaaggggaaatacatcagatctgcaacacagaaatgctctgcctgaaatttccaccatgcctaggactcaccccatttatccaggtctttctggatctgtttaatcaataagccctataatcacttgctaaacactgggcttcatcacccagggataaaaacagagatcattgtcttggacctcctgcatcagcctattcaaaattatctctctctctagctttccacaaatcctaaaattcctgtcccaagccacccaaattctcagatcttttctggaacaaggcagaatataaaataaatatacatttagtggcttgggctatggtctccaaagatccttcaaaaatacatcaagccagcttcattcactcactttacttagaacagagatataagggcctgggatgcatttattttatcaataccaatttttgtggccatggcagacattgctaatcaatcacagcactatttcctattaagcccactgatttcttcacaatccttctcaaattacaattccaaagagccgccactcaacagtcagatgaacccaacagtcagatgagagaaatgaaccctacttgctatctctatcttagaaagcaaaaacaaacaggagtttccagggagaatgggaaagccagggggcataaaaggtacagtcaggggaaaatagatctaggcagagtgccttagtcagggaccacgggcgctgaatctgcagtgccaacaccaaactgacacatctccaggtgtacctccaaccctagccttctcccacagctgcctacaacagagtctcccagccttctcagagagctaaaaccagaaatttccagactcatgaaagcaaccccccagcctctccccaaccctgccgcattgtctaatttttagaacactaggcttcttctttcatgtagttcctcataagcaggggccagaatatctcagccacctgcagtgacattgctggacccctgaaaaccattccataggagaatgggttccccaggctcacagtgtagagacattgagcccatcacaactgttttgactgctggcagtctaaaacagtccacccaccccatggcactgccgcgtgattcccgcggccattcagaagttcaagccgagatgctgacgttgctgagcaacgagatggtgagcatcagtgcaaatgcaccattcagcacatcagtcatatgcccagtgcagttacaagatgttgtttcggcaaagcattttgatggaatagggaactgcaaatgtatgatgattttgaaaaggctcagcaggatttgttcttaaaccgactcagtgtgtcatccccggttatttagaattacagttaagaaggagaaacttctataagactgtatgaacaaggtgatatcttcatagtgggctattacaggcaggaaaatgttttaactggtttacaaaatccatcaatacttgtgtcattccctgtaaaaggcaggagacatgtgattatgatcaggaaactgcacaaaattattgttttcagcccccgtgttattgtccttttgaactgtttttttttttattaaagccaaatttgtgttgtatatattcgtattccatgtgttagatggaagcatttcctatccagtgtgaataaaaagaacagttgtagtaaattattataaagccgatgatatttcatggcaggttattctaccaagctgtgcttgttggtttttcccatgactgtattgcttttataaatgtacaaatagttactgaaatgacgagacccttgtttgcacagcattaataagaaccttgataagaaccatattctgttgacagccagctcacagtttcttgcctgaagcttggtgcaccctccagtgagacacaagatctctcttttaccaaagttgagaacagagctggtggattaattaatagtcttcgatatctggccatgggtaacctcattgtaactatcatcagaatgggcagagatgatcttgaagtgtcacatacactaaagtccaaacactatgtcagatgggggtaaaatccattaaagaacaggaaaaaataattataagatgataagcaaatgtttcagcccaatgtcaacccagttaaaaaaaaaattaatgctgtgtaaaatggttgaattagtttgcaaactatataaagacatatgcagtaaaaagtctgttaatgcacatcctgtgggaatggagtgttctaaccaattgccttttcttgttatctgagctctcctatattatcatactcagataaccaaattaaaagaattagaatatgatttttaatacacttaacattaaactcttctaactttcttctttctgtgataattcagaagatagttatggatcttcaatgcctctgagtcattgttataaaaaatcagttatcactataccatgctataggagactgggcaaaacctgtacaatgacaaccctggaagttgctttttttaaaaaaataataaatttcttaaatc

SEQ ID NO: 9213 - DNA, 979 bp, Homo sapiens
cagagaataccgcctgctccctccggacagcacactcctgaaaacggggagagaggagccaaacatgctcggtttacactttccttatttactgaatgagtggagggcagagacaggcctggagttacgcacactgagtgccccaacatggaaagaaacatcaggagggacaggaaacgttccctccttaaccaacagttttcaagaccttactggaggcactttattggctacataatcactccatgcggtgggcatcaggcagaatcctggtgcagacccaactttgaggtggaggatttcacagtttctttattttgaacttcccccaggctcccactaattcctctccattctatcctcctccctttcccacaaaagaaaacagaaaggagcagcagtgtttgataccgtatcatccagaggcctggttctctcccattatagggcaaacaagccctggcaagatatttcactcccgccccatgccatgcattaaaaatccaaaattgcctatattccacctgccaagcaagagatgctttcattattgaagttccaaatgtatacctttgagaacagtgccttctcgtcttaaaagagaggtcctcattttgtgagttgggagcagagggaattaaagaaagccatgatgcagggatttggccattcaagccgggcagccttcagagaatgtcatccctaatgacacatgcccgaatgaaggagcggggctgagcttgtcctgccttcgtattgaatgttgcctgtctgcctccttaatagcgggcctctgtgtgagcatttgacaagacttaaaactattcattgaagaaaatggatgatcccccaacaggaagatgcaaccccatgggctgcctgcttgaccacagaagtgcttccagctccagttgctcatctgagaactccccccaccacttgctgttaaaattgttaaaattaaaggccatgttgattg

SEQ ID NO: 9214 - DNA, 171 bp, Homo sapiens
caagaagaagaaagaaagaaatcccacagaaacagataacctaacacagcccgtgcaacgtattttatacaatgctctgaaaatcatagtctcaatctagacagtcttttcctctagttccctgtattcaaatcccagtgtctaacattcaataaatagctatatgaaatc

SEQ ID NO: 9215 - DNA, 944 bp, Homo sapiens
aataaaaatcccagaaggacaggaggattctcaacactttgaatttttttaacttcatttttctacactgctattatcattatctcagaatgcttatttccaattaaaacgcctacagctgcctcctagaatatagactgtctgtattattattcacctataattagtcattatgatgctttaaagctgtacttgcatttcaaagcttataagatataaatggagattttaaagtagaaataaatatgtattccatgtttttaaaagattactttctactttgtgtttcacagacattgaatatattaaattattccatattttcttttcagtgaaaaattttttaaatggaagactgttctaaaatcacttttttccctaatccaatttttagagtggctagtagtttcttcatttgaaattgtaagcatccggtcagtaagaatgcccatccagttttctatatttcatagtcaaagccttgaaagcatctacaaatctctttttttaggttttgtccatagcatcagttgatccttactaagtttttcatgggagacttccttcatcacatcttatgttgaaatcactttctgtagtcaaagtataccaaaaccaatttatctgaactaaattctaaagtatggttatacaaaccatatacatctggttaccaaacataaatgctgaacattccatattattatagttaatgtcttaatccagcttgcaagtgaatggaaaaaaaaataagcttcaaactaggtattctgggaatgatgtaatgctctgaatttagtatgatataaagaaaacttttttgtgctaaaaatactttttaaaatcaattttgttgattgtagtaatttctatttgcactgtgcctttcaactccagaaacattctgaagatgtacttggatttaattaaaaagttcactttgt

SEQ ID NO: 9216 - DNA, 591 bp, Homo sapiens
aaataatcgtcacccagaaaatccagaaaactgaagatttcatcagttggaaacagtagcactttgaaaactttttaggccagctttaatttaatggccctactgatattcacatcgaaggtgactaacaatgacaaaggccttatgaactgtacagacaatacagaagattattcttatcctcattgcatttctatgcatatgcgtaagaacattttaaagccaagaaaatatctgtcaaaccatttctgttagaacgatgtcaattcatgcttttaatttagcatcaatagaaaattgctgtaggtaaatctcacatttatctgcaacaaaatatagatttaatttttagcttaaactttgtttctaccttatgttagtggacctcagttatccatctgtaaatttctttttatttggctaaaataatctaaaagaataatttggttggccaattagaaatgcctttttcagttggtgtattgaaagctttcctttaacattttcacctgctcattgtgattcctccttttagtctaatatctttccaggtcatacttgtttttaatcattaaatattttcttcctggt

SEQ ID NO: 9217 - DNA, 908 bp, Homo sapiens
gaattgaagtgttgaaggatgattttttttcccctcatcttggtcagagagtggattttgtattttgtatttaacttgcattcaaaaaacaggatctcagttctcctttcttgtaaagtaagaaaatcttatttatgatatatgcagttaacttaccttgcctcaacagaagaaaggttaaatattacatttttttcttttaggaaatatcatttgtggcaggcgtcaaccccattttatttgtccttattcctgtggaagcagtatatgttttcttcctgaatgctcattaggacttcttaaaaaacatgaaagtaatttggaagtaagtttatccaataaagcagtatttctacccttttagatttgataaatatttttattactaaagaatctccccagacattttcttttttttttcacacatagatttaagtatcttgattgttagtagtctaaaaatgggaagaatgaaaaagcataactagatttttctatcttctgtggtcgcccgcccccccccaaaaaaataccatttatggttctctccgcaagtataaaagcattacatgcaaaaaaaagatctcagagaaaacaaaagtaaaagaaaagcagaaaatcacctgttatctactcccagaaataatcaatttcaacattttggtatatgtttttccaggcttctttgggttgatcccacctatgagatcagaatatgtatgcagttctttctttaacccttttttctcctatgtactgtgaacatttaaaaagtacttttaaatattctttggaaacttagcttttagtaactacttggttgtatcataatttattaactaatgttttattggtaaacattggcttgcctcccatgacttgccattataattaaaactgtgactact

SEQ ID NO: 9218 - DNA, 4658 bp, Homo sapiens
gagagtgggcactgcggctgtctccttgaaggttctccctgttggttctgattaggtaacgtattggacctgcccacaactcccttgcacgtaaacttcagtgtcccaccttgaccaaaatcagctttgtaactgttttcaaggaggtgcttaggattgtgggtttctgattgcatccactagcttctctttttctcgccataaaaatttgtctctgagagactatacattccaatcaatttgaagcatccaagaattcttagaccgaataagcaatgtccacatctcagcaatccccctctttgctctcctcgtgtcctctcccagacctttcttccagttttctggcttactgtgttacttgcctaggaggaatgtccaagtgtgtcttgtacttaggaaactgaaggaaacaaacttttgaaattgagatcctgatctcagaactccaaagtaagctttgaaagcagcatttaagagcacttaaccatggacctcaccaccagtgaggaagtcaggaatacctctagaaaacacgcccttcacaccgcgcatgctcattcccccgacgcgccgcgtgtggatgggagcagtatttctcactttaaaatggacaccttgatagtgtgtctctggggttgcacagctcatcaaagttccaaattgtttgttctcacaaacaaaacggtacaatctatttttgtgcgatgttcttgggacctcgctgtgttctgctatctcgaggcacattctcccctccaactttgttaatgctacttgtctctggaacatttttttttcctacctcagagataaatgagatctccatttcccacttaacacagtgattatccttttttccccccccaaaatagtgacatttggtccaattataatctattttcctattgaactttcagcaataactgagctgtggcactagcagagctagtagccattatcagtgaaagaaaaagtccacatttctactctctgttgcaggtgaacaggagaggatggtacactgttactagaactcctctccttattgattatttttggacacacccagaaacttctttatggaggcttttgggttgatagtttaaaaggctgatttttctttttggttatgatttctcccttaagtggtctccgactttgtagcatttttatttaagctaaaacagagcacatgtatatgtacataagacacattaaatctataaatactatttattcattttatataaactaatgtaatggaaaacaaattcttatgactttgtggttttatagatgttctagaaactttgtatgtaggtatctacaaaattagttcattcccctgaatatttttgcattcatatttttgaggtcttgatgttttcagcctctggcgaatctttttcattgaatttgaaccatttgtaaaatctgtgatgctgaagcagagtgtgtcacaaagtgatgagaacattactaaaatccacggacgcactgcgacctaagggctcaacggctgactcggcagcgggcagccaccccacgctcccctgcggtcactcgcacaccacagcctgaagctcccccagcgcctgcacctcgcacacagctaaggtcaaagttcaaacgcactccacacggaagctcattctatacccgaagagcagtctcagaaagcaagattacttttgtgttttttaaaaaatgattctttaatgtatttttctaaacattctgattggaagtagtggattcctaaatgattccaaagtcacctgtaattcttctgtttttgttttgttctgtcttttcttcattttggctttgggtggggggaggggcaggtgacacaaaggattttttttttttttttttaatttttggaatcttttccaataaccagctaaagatttgcactgaaatacaacttgtatgccttttgcatttttaaagcctgcttcctggatttaagcagagtgatagtgttcaaagagccagttcagcctgtaacatatttgaaaaagatatgtctgcactttgaggtcccttttgaatgccattcactagacctctcaagcattttgtttcattgctacatccaagcgcctcacaagtccacaatgcgggacagcatcaaaagctcaagactttggaaaaagcttgtgggcttgcactgggggagggaagggaacaaaatttgtgtacttctttgtttaatttagaaataaggcatccaagagatgccattattttctgtgtttcaattgttgtgcctttgagttaaactgcatttttgtcttttggttgaaatctgaaatgtactgtcccaatataaaacagtaattatttgacctttgcactgtttgtctggtccttttcagtttgattgcatataaatgtggaacttgatagatctctatatttttaatgcacttgtgataaactggcagcagggttagacattactttcaaagcttgaggtagaccgagtcagcatgctagacaggcttctctctctaaccaaaactgtaatcttcaggaccagcaaactcagcccaaggcagctaatccccccaaccccatcctccgcgccccgtgcggctgatcggcagccctgattcgccaatttgtcctctctcattcactgatccaccagcctgactgctaagagctatagtctttttagttgttttgtctttttaagcaagatgaaaacctttctattagggattttggggttgggaggggatgggcagagatataaaccccagcctttaagactttgacaattgtacgtaaatacagatgtgtataaatataggcacatgcatatttttatgtgaaagttgattttaaaaaactaaaaaaatctaaactgcactcttattgataccatcataacgcaagtgggaaaaataagagtacgcagtctaatttaatttcatgcagtgggaaaatatatatgtgtgcttctgtaacatcctgaaaacatagctttccatcccctgttggctttgaatggtgggccgagcacccaggtcgtctgtattttggttttcttttgctaagcagagatcttgaattcttcaaggtgctgatagcaactgctggctcctttctgtagtcacacacctaatgctagtttagtgattcaaaatgcatcacatttttaggcaggacctagattttccctgtcaacctaagatgaaaataatttcagtgttgattcagaactgaacattaagtaggccctcgtcctgcagttggccacttgagtgttttgttttgtttttattttttaaggtgggcattttcctttaacctctactttttcaaaagcaacaaaggggcctcaacctgagtttcctatgggcctctcttctgcatccccaaagcggccaagagcaaatcctgggggataagaaaaaagtgtaaactaggtaggattgtgatgctcaaaataaccatctagcaatatcttggagcttgagaatagattttgtgggcttatttcttcttgcctcttccccatcctttcaagagagaacttatttttgaaaagtatctatatatacacacacacacacacacacacatattattatttaggtttttataccatactgtattggcgagaataccactatcattgtcctttacagtctatttcttcccccaagtcttggtctttttttattttctattttttcatgaaccacacaggagactttaacatcctggtcttttctgtttcttctttgtttccccaagtttgtctgtccccctttgccttccctgagtgttgaacatcaggtagtaaaaggctaaacgcaatttcttgcatgtcaatctattctttttctatgtttgactctgatgcagtgtgtttagcgtgtctagtagctggctactcctatttaaaaactcttcctggtagaagacaacccaaagacccttttcgatgaggtggtttctcattctacatcctctgatctctatagactgtaggatgctttgctttcaaagataactgggttagagggtggggtgtgcaataggtgatttatcatggtttttttcattatcaatattacatggatgattttctcagattcttctgaaagaagaaattgacaggcactgctagattcagctattgaatggctgaagagattgagtatttgaccttctctcaaaatcataaagtgagaattcataaggcacccaatgttaagatttatccagatttttacattttgatttcttctctctgtggggtggcaagttgagggagcattcttcattttagcttttacctgacaaccaaacttgcctttaccccatccctagaattggtgctcttggaatattgctgttaccatcatttttggggggccatcttcctaatgctacacacagcctgacaggggagcagcagatgaaagggtatgctattctgtttccagatgtttctttatgtaaatatgacgccaatgtaaatcctgtgtcaagatcatagagaatggtgctttttactacagttagcacatgcatttttagaaactactacatgttttagagaatctttgctgtgtatatgtaaactgtattgttcaactgttaacaaataataaattatttcattattaaag

SEQ ID NO: 9219 - DNA, 386 bp, Homo sapiens
aacagtgtaggttccctcaataacccctttctgctgttctcccatgatccaactgtgtaatttctggtcagtgattccaggttttaaataatttgtaagtgttcagtttctacacaactttatcatccgctaagaatttaaaaatcacattctctgttcagctgttaatgctgggatccatatttagttttataagcttttccctgtttttagttttgttttgggttttttggctcatgaattttatttctgtttgtcgataagaaatgtaagagtggaatgttaataaatttcagtttagttctgtaatgtcaagaatttaagaattaaaaaacggattggttaaaaaatgcttcatatttgaaaaagctgggaattgctgtctt

SEQ ID NO: 9220 - DNA, 2690 bp, Homo sapiens
agtgacacactcctttttcccctcctagttccaaatgactatcagtggcaaaaaagaacaaaatctgagcagagatgattttgaaccagatattttgccattatcattgtttaataaaagtaatccctgctggtcataggaaaacacacggttctaattaagtgtgaaggtatagctattgcacttatgccatctccaaaatttcttaagtattctttcactatccattaggagtttttcttaaacttgtctgataataagaatcacctggagttaggaggtggtggttgcagtgagccaatctcaccattgcacttcagcctgagcaacacgagcaaaactccgtctcaaaagtaaataaaaataatcacctggagtttgttaaaccatatggattctcaagctcctctcttgaagattctgattcagtaggtctgggagtggcgcgctggattttgatcaaaattgtagagcattttaaggtgagtacctgagggagaacttaaagacatcttagttggggagtagtccttttgaattttacagctagatataatcttcagtcagataaaatttatgggagctggtgtcttatgcctgactcttagtaatttcataccggtttgaagtacgtgtgcccatgcctaaagccttgactttcagaatgttgtcttttgattcttctgtcttgatttgattaggggtgaaatttagaagtcttagtaatgtaacttgaagatgttaaacaaaaatctcaagtaaaatgaaaagcaaatatgggctactgaattaagaaactggcattctagtattaaatcctcacttcaggagcttttaaaaatactgagacccccccataaccagagattcagattcaaagactgaggataggaccttagcattgtagctatttaaagtttctaatgtgcacccagggttgggaatcaccaatgtgggtgtgaaaatgcctacaaagggttttagtgccttagaagtcctaagaagcccaatctgtatcaaagcagatccattttgcaaggatctttcttttagaactttctcagttctcttagtaagaactttagaagtaatcttgataataagcacagacagcctaacagcagaggcaacttaaataactcctgagcagttggcactagaacagaatacttggaatgacaccaaagttaaccaagtccagcatatgtccaaagagttaagtgtttcatttactgtagcattctgggtgagaaattggttgctgaaatcttaagacagtggtctcaaccttggctgcacattggaatcacctgtagggttttaaagcatccaaatggtaattaacaggcagcaaaacttcagaactagttctgcatctactgtgcaaagatcatgattaactgtcaagacactggtagaacagaacaagcaaaagattaagagttcaaaagtaaatgcaaccaatttaacatgtagtgttattaaaaaattacaaaggcctagaccagcctgggcaacatggtgaaaccccatctctacaaaaaatttttaaaaagttggccaggcatggtaatgcgcgcctgtggtcccagctgctcgggaggctgaggtgggaggatcacttgagccttggaggtcaaggctgcagtgaatcatgatcatgccactgtactccagcctgggcaacagagaccatcttaaaaaaaaaaaatccttccattgaatagaaacttcaaagtccttcatcagatcatggcattagctactttagcaaaatagtgtaaactttggttctgagtaaaaatgacttcttccctaccacagttgtgaatgttaatatgctgataaaactgccaagatatatttgataggtaggggattaaactcatggtttgtcaaaagagtgtttttttctagttttattcttaacagatatgttgaggtattcatatttgtttccttttgtggttttaatgaagacaatttgtaaagtaatactgttatgtatatgctaaatgttggtaaatactaattaatttccatcatttgtagacttgttttgcaatgggatatatttttacttataataccaatttaggctgggcgcagtggctcacgcctgtaatcccagcactttgggaggccaaggcaaacggatcacgaggtcaggagatcaagaccatcctggccaacatggtgaaaccccatctctactgaatacacaaaaattggctggacatggtggcgcatgtctgtaatcccagctactgtaatctcagctacttgggaggctgaggcaggagaattgcctcaaccgggaggcggaggttgcagtgagccaagatcgcaccactgcactccagcctggcaacagagcgagactctgtctcagaaaaaaaaaacaaaaaccagtttaggctgggtatggtggctcaccagcactttgggaggctgaggcaggtggatctcttgaggtcgggagtttgagaccagcctggccaacatggtgaaaccctgtctttactaaaaatacaaaaattagccaggcatggtggcgtgtgccagtaatcccagctacttgggaggctgaggcgcgagaatcgcttgaaccctggagatggaggttgcagtgagcagagatcgcaccactgcactccagcctgggcaagagtgagactgtgtctcaaaag

SEQ ID NO: 9221 - DNA, 239 bp, Homo sapiens
gactcccaccctgtgacactgagtcccgagcacagcaccttcccagtctcctgtgccccagcggacagcactgagcaggccccggagaggaggggctgcagccacacactcttccccacctgccccccagctcagagactcgtgaccaaatggccttggtcccgcagcttgtgtgcgtgagtgcagtgtgagtgtgtgtgtctctcactgaaataaaaggaaaacaatgacaagaaggg

SEQ ID NO: 9222 - DNA, 309 bp, Homo sapiens
ccccgcgcgccgtggcaccccaacaccggcagggaacctaccctcggctcccgggtctcccctccctcgccaccccaaccagcggcttctgcgccgccctccgccctccgctggctccgaggtggtgggggcgccgcacgctccatccctttccctcgctcgattccttttcccgcgctccatgcctccccctcgactcccggtgctgcggaagaactgaaggttgcgatgccttactctgacgggagcatctgtatttttatgttaaaagcccacaaaataaaaataaaaagtaactgagatgaattt

SEQ ID NO: 9223 - DNA, 727 bp, Homo sapiens
agagcacaaaattctcagagaagctgctatcagaaagtggctccacggcaagctgcacccaggccactctctggtctccaataccaagcaagcccgggccaccgccctctccaagaccccagagcaacgggaatcgcagcgttccaggagcttccacccctctgtggatgcacgcctgcaatgcattccacagcccacggagatgcccaagcccatctacaggaagcccacggtcaagcggcccacaatgtggaatgttagcaacaaccccgccagaccccccaccacccagatcagccactcgcagggcatccgcctgggcgtgcatccagaccccactccggagcacgacttcagcagcttcctggaggtgaggcctgatgggcacggcggtgcgcggctgcacacagtggacggccactgggtggcgcccgtgccgcggctgccttttgaggtgctgctgcgcatgctgtacccacgtgtatggccatacagaatgaaggtgccccagggcttttaccccatcagcatgagggaagtgcccaggaagcggcacctgggtgacaacaccttctggaccgacactctggccatgaacctgcgtgacacattcgatgaagccttcctggcagctgtgcgatctcatcaaggactccccaccctgccctccccacaaaccaacccataaagttattatggctacctctccccctgaggcagcccagtg

SEQ ID NO: 9224 - DNA, 131 bp, Homo sapiens
ggggctggtcccggctccaccccctccaagctcagtggacactgggtctgaaaggaaggagtcttttgcttcctttctcctttttacaaaaacaaacatagaagaaaataaatgcactttatccactcccc

SEQ ID NO: 9225 - DNA, 85 bp, Homo sapiens
tatattttgaatataatgtaaatattaatgtgtaagcttatattgtgtcattgttctgttttataataaaattcttgagaacctt

SEQ ID NO: 9226 - DNA, 250 bp, Homo sapiens
ttgggggaaaggaaagaattcactagaaatttgtttagggtccagttgatttgtgtatttttgttatcatttaatttgtaattttcgtttcagaagcaaatattcgtgttgtacaaatttctgattgccctaaatgtagagagactgatggggaaagtatgatgggtttgatttttatatcaaatcatcaggcatggagaaatatcttttagaagtgttaaaataaatgttcctactgtatatttaaaat

SEQ ID NO: 9227 - DNA, 270 bp, Homo sapiens
ggactctcctgccctgtagaaggggccgtggggtcccctccagcatgggactggcctgcctcctccgcccagctcggcgagctcctccagacctcctaggcctgattgtcctgccagggtgggcagacagacagatggaccggcccacactcccagagttgctaacatggagctctgagatcaccccacttccatcatttccttctcccccaacccaacgcttttttggatcagctcagacatatttcagtataaaacagttggaaccac

SEQ ID NO: 9228 - DNA, 620 bp, Homo sapiens
gcccatgtttttggcttcctgaacctttttgcccccacttttagacataccccagagccctgtggctccccacaccctgccataggggcagtcctgccttacacatagaagcattcatgcctgctgccctgccctcaggcacagccagctgtgagctcccaggtcattggccttaccagttgtcaggagtctgtgctgtgcaccctgggttataaggaggcttaggagagaggttatgggtattggtgtctctatccccaggaatagaacttaaggggtgggaagaacaggaaaagaagctggaacacagaagagaggaggttgtgtctcttgctcatagcaagcctgtgggtagaggaaagagtgatctggtgtcgaataggaggacccatgtagattcgcagatggcctggatgggaggaagggcagacggtacatgtcccagcccacatagatgccccttgctgagggtagcaggaccttctgttgaactttgtgtcctcactctgatgtctccttccttcagaatctaccacccctcccccaggctgggagaaggggctcctgggtgtctgtatacacgccaaaggcagatacaaataaaatacagattgtccttt

SEQ ID NO: 9229 - DNA, 937 bp, Homo sapiens
ggtgggcaaccacaaacccacgagggcagagtgctgcttgctgctggccaggcccctgcgtgggcccaagctggactctggccactccctggccaggctttggggaggcctggagtcatggccccacagggcttgaagcccggggccgccattgacagagggacaagcaatgggctggctgaggcctgggaccacttggccttctcctcggagagcctgcctgcctgggcgggcccgcccgccaccgcagcctcccagctgctctccgtgtctccaatctcccttttgttttgatgcatttctgttttaatttattttccaggcaccactgtagtttagtgatccccagtgtcccccttccctatgggaataataaaagtctctctcttaatgacacgggcatccagctccagccccagagcctggggtggtagattccggctctgagggccagtgggggctggtagagcaaacgcgttcagggcctgggagcctggggtggggtactggtggagggggtcaagggtaattcattaactcctctcttttgttgggggaccctggtctctacctccagctccacagcaggagaaacaggctagacatagggaagggccatcctgtatcttgagggaggacaggcccaggtctttcttaacgtattgagaggtgggaatcaggcccaggtagttcaatgggagagggagagtgcttccctctgcctagagactctggtggcttctccagttgaggagaaaccagaggaaaggggaggattggggtctgggggagggaacaccattcacaaaggctgacggttccagtccgaagtcgtgggcccaccaggatgctcacctgtccttggagaaccgctgggcaggttgagactgcagagacagggcttaaggctgagcctgcaaccagtccccagtgactc

SEQ ID NO: 9230 - DNA, 1281 bp, Homo sapiens
tgttgccctgcccagaaagggccctgccctagaccctgccagaaaagggggctcttcccccagagaagtggcttggagggaacttcccactcccattgcctgctttccccattccagccctctctgctagagggtaggagagagcctggatctctggccccaacccccaccagacctcatgccctggacactgctgctgagttggctcagactctgcactggcactgagcctttcacaactggcctccccttgaggttcctccactctagggtttgaggggctggaatcagggccagggcctaacagtgtttcttcccctcggccccacggcccatactcaccccttcacctgaggcttctcccctctcaacttgctgttgatttcttttgaggggtaaaagaaagaccgagttcattgaagcagagatgggaggtggtgaggcgtcctcacctccccccaccacagctgtggctggtaaggcaactgcttgaccactggcccagcaagcagaggcgggcaggaggatctgggcatcctgagccccttccctgaggctgtctcctgggaatgctggaccagggggattacttcccccacccacacccccatttggacatctggggaagtggagattaacccctcccccagactcgtgccttgcctctcaggacctggcacagtggctggccttatggagtatggaaaaggcctctgccttcctcaggagggacacatagtgggtcatcaccctttctcacacctgcttcccaatgagcactcagcagcatggctgagacctggggcttgacaggcctgcgctccttagattaggatgctctggtattcctggggccagttaaaatgggtcagtgaggggctctcctggcctcaatctccatctttagggtctccacagactaacattgaagtcttccagaaacctcgaggagctgggctagatacttcgagagtagccctgtcttgtcccctcctacccccagattagcaccacccctctcactcttgggttggatgctatgggaattacaacccatcactcccaatgcctccctttcctggaggagcctgctgcattctcctgctgagggatcccagagagggcaggtgcccaccccacaggccctttcctggaccatggagccaggtgaaacctgtctggccccttacccattgggttcttactccttcacaacggtcagcactcctctcccagcccccctgcccactgttctcaataaaatgtgagtggtgagaggcc

SEQ ID NO: 9231 - DNA, 155 bp, Homo sapiens
gaggcaccccacccatcacatggctggctggctgctgggtgcacttaccctccttggcttggttacttcattttacaaggaaggggtagtaattggcccactctcttcttactggaggctatttaaataaaatgtaagacttcagataactttgt

SEQ ID NO: 9232 - DNA, 307 bp, Homo sapiens
cacaagtttattttcctcagagccttggaattctattttatgaacctagagaagcagaatccttacttttgtgagtctggttgaataaagcttattctttgtccatgtgtattttagaaatagtaacttctaaagagtctggaacaaagtggtgattaaaattcctaatggtttgggagcaatactttctgcatagtggccttgtccaatggcctgtgtgttacaatgatatgatcatttctcaagaataagtccctttttgtatgtgtttttatacttttagaaaataaaaactttagattaactc

SEQ ID NO: 9233 - DNA, 475 bp, Homo sapiens
ggacaccgcctgcagggggagactcaaggcctgggaaggttttctaatctgtgccttgagtcgggtggggggattttctgggaaaggaaaaccagacacagtaggacaaatattgtatagtttcacttatatgaaattgtcagaataggcaagttcgtagagacagaatgtagaacagggctttccgggggctggaggagaagacaaggagttcttgcctagtgggtacagagtttctgtttgaaatgatgaaaaacttctggaaatagattgtggtgacagttacacaccattgtgaacataattagtaccactgaactgtacacgttaaaatggttagttgtatgttttatgtattttgccataataaaaactagggggaaaaaaaggaaggggagattgtctcaggctggctgactttccctgcatgtacgcacatcttcacatgtgcacacatgtaaaacaaaaatgaagc

SEQ ID NO: 9234 - DNA, 624 bp, Homo sapiens
gcgtttgagtccaacaccttccaagaacaacaaaaccatatcagtgtactgtagccccttaatttaagctttctagaaagctttggaagtttttgtagatagtagaaaggggggcatcacctgagaaagagctgattttgtatttcaggtttgaaaagaaataactgaacatattttttaggcaagtcagaaagagaacatggtcacccaaaagcaactgtaactcagaaattaagttactcagaaattaagtagctcagaaattaagaaagaatggtataatgaacccccatatacccttccttctggattcaccaattgttaacatttttttcctctcagctatccttctaatttctctctaatttcaatttgtttatatttacctctgggctcaataagggcatctgtgcagaaatttggaagccatttagaaaatcttttggattttcctgtggtttatggcaatatgaatggagcttattactggggtgagggacagcttactccatttgaccagattgtttggctaacacatcccgaagaatgattttgtcaggaattattgttatttaataaatatttcaggatatttttcctctacaataaagtaacaattaactt

SEQ ID NO: 9235 - DNA, 77 bp, Homo sapiens
agtcagaacaggttctccaaggatcccctcgagactactctgttaccagtcatgaaacattaaaacctacaagcctt

SEQ ID NO: 9236 - DNA, 223 bp, Homo sapiens
ccaataccatgaagttcaggctgtgatctgggctccctgactttctgaagctagaaaaatgttgtgtctcccaaccacctttccatccccagcccctctcatccctggagcactctgccgctcaagagctggtttgttaattattgttagactttgccattgttttcttttgtacctgaagcattttgaaaataaagtttacttaagttatgcttgtttttct

SEQ ID NO: 9237 - DNA, 1053 bp, Homo sapiens
ctactgtgtcttctgtgtcacaaacagcactccaggccagctcaagaagcaaagcaggccaatagaaatgcaatatttttaatttattctactgaaatggtttaaaatgatgccttgtatttattgaaagcttaaatgggtgggtgtttctgcacatacctctgcagtacctcaccagggagcattccagtatcatgcagggtcctgtgatctagccaggagcagccattaacctagtgattaatatgggagacattaccatatggaggatggatgcttcactttgtcaagcacctcagttacacattcgccttttctaggattgcatttcccaagtgctattgcaataacagttgatactcattttaggtaccaaaccttttgagttcaactgatcaaaccaaaggaaaagtgttgctagagaaaattagggaaaaggtgaaaaagaaaaaatggtagtaattgagcagaaaaaaattaatttatatatgtattgattggcaaccagatttatctaagtagaactgaattggctaggaaaaaagaaaaactgcatgttaatcattttcctaagctgtccttttgaggcttagtcagtttattgggaaaatgtttaggattattccttgctattagtactcattttatgtatgttacccttcagtaagttctccccattttagttttctaggactgaaaggattcttttctacattatacatgtgtgttgtcatatttggcttttgctatatactttaacttcattgttaaatttttgtattgtatagtttctttggtgtatcttaaaacctatttttgaaaaacaaacttggcttgataatcatttgggcagcttgggtaagtacgcaacttacttttccaccaaagaactgtcagcagctgcctgcttttctgtgatgtatgtatcctgttgacttttccagaaattttttaagagtttgagttactattgaatttaatcagactttctgattaaagggttttctttcttttttaataaaacacatctgtctggtatggtatgaatttctg

SEQ ID NO: 9238 - DNA, 53 bp, Homo sapiens
gaagagcagccttcctttgtccctgtggtattcataaagtacccgctccaccc

SEQ ID NO: 9239 - DNA, 94 bp, Homo sapiens
ggcccttaacccggactctgcgccccgtcccatgcccgctcttgagtatcttccccaccctattaaattacatccggtgcttcggcttgtacag

SEQ ID NO: 9240 - DNA, 202 bp, Homo sapiens
gtagttttgagagggtggatgggttacttgcccaccagaaacagccctagtcccaactccttgcgttcctttggcccctccctgcctacctagaatctgcctgaaagggctggagaggggcagtattgggggactgtgctagctttacccccgcaggacatacacaggagcctttgatctcattaaagagatgtgaaccagc

SEQ ID NO: 9241 - DNA, 1338 bp, Homo sapiens
gggggcaccggtccctcatagggcagggccatgtatatatcccttggtgggggacatagtgtggtgacagttcactgcatattttgagaccttattctctagatccatagttaatgatgccctggcagtcattcctcttgccatggggaagcttctgatgagagaaaggagccccacatccactgaaacatcctttggttctcaagcttcttctggaggcagtaaggaaaaataaaacccaccaaggctcaagaagggaactatagaaaagttcaggtttttaggctatagcagagacagtgagaaagcatctgggcctttctcttcctcttggtccaggggacctcattcaccaactagagcttggtgtacaggaacggggtcacagtgctgagggggcttgagtcccacctttcagcttgatggatgctcacctcttctcagccccagctcgtgccctgtttttctagccatagcccccagattactcacagctcctcatgccatttcctgtccagattgctatgtatgactctgacctctcttgtccagtggtctggtgctcacctcctctcactgctagaatattcaccaagggtttgcatttgggaagtcccttaccagctcctgcttagagctggtagggccatacatgtccacactcccaactggtggctctcccgctgaatggggcctcagcaggtgcccaagctgctacaaccttggccactctgtttctccaccccagcactgggcatggtaattagcctttccccatgttaatttattcagttttttcaagggtcaactgaattccccacttcctgggtaagaagcatgatctccttttaatttcacgtctaagatcctggcagcttcccctagctggttcctctgtagtcctgctgggactgtcagctcatttaaatgtgggtctgcagaaggctttaggtctcccccaacccccttacctttcacagaggaacctttcatcaggataaatgattattgctgccctgtgggtcttgctcaatactgttcatacctggagagagaaggtattgaaacatctcctttatgtgtgactttcccaaatttttaaaaattgtttatggtttaggccccttaaatactgtgtagcaggatgaagtctaccattaccagctgggtcaccttggatgggtctgtcaacatctaagcctcagttccctcacctgtaaaaatgagggtagtccctacctcataagggatattgtgaggatggaaagcgaaagtgtgagaaaatacctcccaagtgcctggtacatagtgggtgctaaataaaccactttttgtctg

SEQ ID NO: 9242 - DNA, 574 bp, Homo sapiens
gcgacgcccgtccgatcggcgtggagcgccgggcccggagcggtggagcgcgcggctgcctgcgtccatggtctagtggcagccgggcgcgtgaggagcggcaggccttgaggctgtcgtcgagggctcctccaccaccggccggctcccaagccagcgttgcgcagatgcacggccagctcagaggcggcctttcccgccatttttcacttcactgccgttacgccctcgctggaacctgaggcgccgagagggcgggacctgcaggacagtagccaatgaggtgcggggagggggccgggctggccaatgggagctgctttcctgagggactcgaaattctccggcgggtggtcgggagctggggctctgaggggctctagcggcgttgcgcgcggtgccggctgggtctgtaccaaaggtgtgaaggaaagaagacaccgaccacggcgaagcaatagagggggtgctggagcgcgagaggctggctgattgtgaccgaaaccagagggttgtccaccccgggcatctcatccctcaactgtaaaataatcgctaaggattccttcctgac

SEQ ID NO: 9243 - DNA, 571 bp, Homo sapiens
atagatcaccaagagtatgaggctcctgctctgatttcctccttgcctttctggctgaggttctgagggcaccgagacagagggttaaatgaaccagtgggggcaggtccctccaaccaccagcactgactcctgggctctgaagaatcacagaaacactttttatataaaataaaattatacctagcaacatattatagtaaaaaatgaggtgggagggctggatcttttcccccaccaaaaggctagaggtaaagctgtatccccctaaacttaggggagatactggagctgaccatcctgacctcctattaaagaaaatgagctgctgccatcttttgtgggcagttagtcaggtgctgctctttgtggtgtggtgggctctggtctgttctgctcggtgctgggcctgggagcaaagattcccatgcttggctacagatactgacagctggcctctgaaggagggtgaaaacttctgcttgacagttccacatccatagtgcatggtctgatgagtgcggttgctgacatgggtttcttggtaagctcctgaggtaatggcagcctc

SEQ ID NO: 9244 - DNA, 421 bp, Homo sapiens
gaaggacggcaaggctgaggtggctaagggggaccatggggaggtggcactagggatcaaagaagatggttagaaccagcagaagccagagggtgggaggggccatgctgtgtgagaccaggggaccagagggatgggagagtcaagggaaggacaatcccaggaagtcctaagaagtggggcagatggcagggctgaggatgggctctgcatcccccaaagccatcccttccctacttccccaaatgaagggacggctgtgggaccaggtctgtggaaagtggtgcatggtcagaatgggtgcagtttgaggggcctgtgtggaggcctcagggagatgttggactgtgcctggatccttactcctgcattgttctttgccagagacctatttaaaaattttaaaattctcattaaagtc

SEQ ID NO: 9245 - DNA, 1849 bp, Homo sapiens
agctgggcaaatgaccactagtgtataagtgatcactggaacggagtgaccactgagatgctgggggtcactgggcctggaagaccatcccagcctctgagttctctttgagtatgagtgattacttggattttagtatctgttctctctgagcctggatgggcttggggccagacctttgcctgattcctgattcccatgagaaatcagaactgctttctgcagcaaatcagggcttccccctaacatctgaactcctgtaaaccttcatccctggccccctatcttgggcccattagttttggggatggggcacagggcatagctatgactttgctttctggttggagcctggccggaaggaagagccctggaggtggttgggggcaaatgtgccctgagtccttggggtggttctgcttattcttcaagtttatctgaatctgtggggagtgcatgatccccatgttgcaatatggagtctctgccctgagatcttccccatctcagttttccttccatgaaagagtacgtgtaaatacatagtgttcataagagacctggccacatgtgcatgaatgactgggccgatgcttaggaatatttatgagggatggggagggagacaattggaatgggggcgttgcctgcagaactttagaccctgtagccatagagggaatggcgttcctttctaaaaggaactgaaacactgcccctctccccattgccccacaaccttactctaaatttgagtagagaaaagctcctaaagtgaccttccgggtgggaagggcagcagtacacatgaccccatccttttctttgtttttaccccctggctgccaccactgccatgtcacagctgctttctctggctggagtgtaggctgtaccccatttccttggctcccattaaaaatcaacaacattctaatgattagggaacaacagaaggggaacagtcataggatatacgagcagtataaagatacgtttgcaatcagtgactactcagggtgacacccttgccctaaagcaggagtcccccctacctggggtccatggactccctgaaattgtatgcaaaatgttgtttgtacatgtgtgtctgtatgtctctgtggggaggttttatggcttttgtcagattttcaaggccttaacaaagttaaaggaccactgccctgaggttactgcactgaggccaagttaggatggcatcactctgtggcagctctccctggacttgccctgcctggaacagggtgatttgctggaatggagttaccactgagatgccaaaggttgctgggtctggaagactgttgtggcctctcagttctctttgagtctgactgactgtggccagtccctggactggtagctgctggaggccttcttgtttctccagtccctggaagctgagctctatgtgtatttgatgacattgtcagctcttaccaaacgtcaagacctcttcctgcttgaccactcgcacatggctctaggcttctcctgctgagtcctggtcttggcctgtgaatgtgcctcgttcatccctggtgcttgagcccctcaagctccagtcaatgatccagtccttcccctttgaagttttctgctctactttccttggcagcagcctgtgaactactcaaaagagtccccttgggtttggaattatcagtggctttgccactagtaaatgtgtgatcttcggcaagtaacctaacctagggacatcagtttactcatctgcgaagtggggataataaaacctacctcagggttgcttcaaggattaaatgagaaaatatgtcaacaataaagacctgtctgtaccaat

SEQ ID NO: 9246 - DNA, 2406 bp, Homo sapiens
aacccctgaaatcggaagggacttcctctttctctccttcttccctgttttaaattataagatgtcatccccttgtgtcagagacagaccccttggcttttgcttggcagagaggaccccactggactgggttttgtctctgcatctcattgtagagcttggtggctgagcttggccctattaagataaatagagttccaaataaggatttgttcacatgcatcataaccattcccattggttctcctaaaacatgaaaattatctcccttagtaatcccccttgccaaattccatgtccctgtataattctacaggatggggacactaatgaagatacggttgcttcaccttggagcctgaacatgacatttctaagtggggtgcatcccccagcactgatgttgttactgattctcctgtcagagatctgggaggtctccactgaggatgtgagcctgattatcctataggcagacgtggggagggtggaggggtgacagtggaggaaaatccatggatatccacgcagcagcccctctttaacctcatctacaagcatttgccctgtggattccagcatttgccattcctggaatcaaggaatcctgagtctgggcaatgaaaccaaagccaggagttgacgcatcctgcagttgggccagctgtcgcatctcagcggggcgcacatgttatccacaagcaatggacctttggggaagggggagtttttagtttgttttacaaatttttcctgcaaaagtggaatcactgtattttcattttaatttatatttgaaattttatttagttcttgagtagatctgcttcttcatcttgacatgtaatgaatggtcagttgtacgtaatgtatttatatgttaatttgttatgtatatagatgtgcaagtcttgtcagaattggcctcagtgtagttaaagggcagaaggggaagatactgactagtcatagaaatacctcattcgcctgtgggaagagaagggaagcctcttcagggtgagtgaatggcaaagcggttgcttctggctcctccttcccctgtggtcttggaagtgtgtggaaggcagggacagagatggaggccgagccaatagactgaagagaccacagcaattggctcctccatctagagattttcttggcagtattccatgggatgttaagcaaaggaaaccaaaggaatcgtttcaaatggactcatggcttagaaatctttattcttagggcagtcagtagtattctaaagctttctgacaagataaaggaagtcaccaaaatttctttttttaaattgtatctaatcctcaacaacaaaccaaaacagaacaattaaacagccaaataaaacctcagggacaacatttttggtgtatttgagccctcccagcaagtttcaccttgggtttgtattttaaatgttttacaagaattgtccatgtgcttccctaggctgagctggcattggtctgctgacctgtttttgtgtttttcttttttttatacacaacatttatttcaaactattgggagggatgagagtggcttaaaaacttccatccctacttttcaagagtgcagttgattctgaatctgaaagcccgcctctgtcctaaaatacaaacaagcacagacattaaacctggatactatatgataaagagggatgtaactattgaattggatacaaggatcagaatggaaagaaactcacgatgaaattgaacctggtttttgtatatttatcaaacttgtgctgagaatagtgtctgattatacgacttttaagcaaagttgggtgtaattaggtgaaaacagcccaggtcctcccgggagcacagaggggctaggggctggtccttctcgtttgctctagtcttgctttgctgtctggtgtagctcctctgctgctcccatctgcactaattgacccaaaacgtgggtatttcctgctacacaaaagccaaaaggtttcatgtagattttagttcactaaagggtgcccacaaaatagagattaattttaacttaaattttaagcttgaagattaggtactatctgtgaagttacacttttttttttttttttaaaggtagagatgtgtgtgtgtgtaggtattaaagatgtgttgttggtttccaaaaaggaacactggaaaataaattttgaatgtttatgttctcagaatcaggttgacagtcccttgctgacatggctttgctttgtgtaaatacagtggatctcaatcttcggggtgtgatgaatagcgaatcatctcaaatccttgagcactcagtctagtgaagatgttgtcattatgtacaatacataactagtttaattaactatgtgatgttaactattattaataaattttaacattttcc

SEQ ID NO: 9247 - DNA, 309 bp, Homo sapiens
ttgccgagcggggcagttttgtgagccttcatctgaagccttcagttcacccctctgcacaggcctcagctttgaagaacggagtctttgcacttacacacactcttcctgttctgccttcacctatgccgggataagcagagatctcatcaattagctcttctctgcaaggtcttccactatttctgtctgtcttccatatcaagcctggatgcagctgctgctgcttagagcagagatgaagaaagtgttctgcataagtggcttcctgaatgatgaggaccagaataaaggtttttgatcaacctc

SEQ ID NO: 9248 - DNA, 6922 bp, Homo sapiens
ttctgagaatgaatttggttagttgcagaagatacattggctctaagaggatatattttgagaccaatttaatttcatttataagaacatagtaattaagtgaactaagcattcattgttttattaatactttttttctaaaataaaacttgtacaccagtttattactctaaaaagagaattacacatgccaaatggaccaatgtccatttgcttattggaggcaaagctacaatagaagtcagagcatcaccagaatggtctttaatgagcatggaacctgagcaaagggaataggtgggatgaattttttttttaattgtgaaacaattcataagcacaatatgatttacagaataataaacattcatgtacccactatcaggttaagaaatagaacatttattaatatgtaggaatgttaagaaataaaacatttaataagatctcagaagactccagtaaatctgcaattgtatctctctcctttttaaatgtaaatatcatcttgacttgttaattattcccttgcatttcttttagtttactgccaacacatatattcttcaacaatatatttaattttgaaaaacctgaaaaaaaaaacctgttagcaagtataaaggggcagtattactattattgcatgaaggcttcaagggaaacgttacagtctttgggtcatagtctggcttcagcttcctctgagagtttacagaggccaattttgagcaaattcatggctaaggttatgagtgagttctgctaaacagaaggctcaccacaaggtatctggcaggattatactgggtagctggatgttgcagaaatgtggttagaggaagtaaactgttttttgatgctcacagcatgatgaatcaaactctgtatcttaggattaggttaaaacaatacctttggtatgatatgagtgttgttgctgatccatgcagcatggattggaaagctggggtataagcacacatgctaaagaaaaacatgtaatttggtccatactcacctggatatactgttcctcaggttaaaaaatacagtactatcctaaatcttgaaggcaactctcagcctatccattgagttaccttcagatctgccctctggttcctagctgtcttgggactaacttctttcctgcgctcagctgttttctggattccatgttttccattttattgagtactaacttgttttgctgcagcacatcctttggtagcttctagaggaagtttgtgtggaggtaaaatttttgagaccttgcatgtctcatgtttgattgatactttatacgtttaggtaggaggtaattttccttcaggactttaaaaatattgttgctccattttctttgtttctattgttgtattgagaaatccaatgccattttgatttccccatcataaatttcatgatgatgtgtcttggtgtgggtctatatttatccattgtattgggttttaggtgaacccttccagatagtaactcatttctgtcagttctgggaaacacttagcattggttgatgatttattctctgctgctttgttctcccaactattatttggatgttggatatccagcactgggtatctattttcttacctccctcccttgaccccagtctctgttttttagctctttagctcaatcttccaactctttgctattgtattttaaaatcttaagaccccttcttgatttgtagaagttccttttcttacaaccaaaaagcctttatctatggatttgttcacagataaggggtattcaatatagtgtatttttttttcatttaaaattgtttgcgcatctatttcctccaaatttctttctgtatttattttttgttgtctatatttcagacttttccaggatatctgataatctttggctgtcttcttatggttgaaagagggactaaaaagcttggaaagcctttgggttgtgggaaggggctgtctttaggattatctgaatgggcttttttgggagtcccctcctccacatgaatattttggttttgtcagattccctagaatagaggcttccaatctccttcctggaggggtctgtccaggaaggagattgtctaggggtctgtcagacagcagctttcagctacttccttgatctttttcactaatgattatatagtcatctaactactgtcaacaagtaatagatatcctatccttcacttgtttagattatttgctgagataacctctcaaaagaacctctcaaaataaaaggttaacaagagcctatatcttatatttttcttctctttatcttgttagaagatagctattaaaacctgttctttttctgtcttgataaacacacttcaatcttggtagaatggtagatgggacagtatattttaggacctaaagctctgcaaatgtatgatcagcttgtaagtacaggtgctcaaaaacatgtaaacaatcatgctttttactctgtaggaatatctttaaaattcttgtgaatttttccccagaagtaaagcaaatcttcccccagaaataaaattaaatgtgcataatctaaagctttttttttttattgtggtaggatatatatataaaacataatttgccattgtaaacattttaaatttacaagtcagaggcattaattacatcacaatgttgtgaaattattactactatttccaaaattttctcatcaccccaaactgaaactctgtaactgttgagcaataacctcattcctgtatctctcccaaccccaggtaacctcaaatctttctttttatctttgagacaaggtctcattctatcactcaggtaggagtgcagtggtgtgatcatagctcattgcagcctcaaaatcctgggctcaagcaatcctccttgagtagctaagactataggcacacattaactgcgcctggctgattttgttttttgtagagatgtggtcttgctatgtttcccatgctggtcttgagttcctggcctcaagcagtccttaagattcatccatgttgtggcatgtgtcagaatttcatttgtttttatgactaaataatattccattgtatgtatatacattttgttcatccatcttctgatgaacactgggatatgtctaccttttggctattgtgaataatgctgcagtaaacattgacataacaagtatgtatttgattgcctgtttctaagttcttttgggtatacatcttgagtagaattgctagataatgtcatgttttatttctcttgtgatttcttcttcgatcccctggttgagtgtgttaatttctacatgtttatgaatttcccactgtttttttgttattgatttccaagttcattccattgtgattagagaagatacttagtatgattttaatgtttttgagaattggtgtgtggcctgatagatggtctgtcctggagaatgttcctcatacacttgagcaaaatatttatcatgctattgttgactgtagttttctatatgtctcttaggtcaaggtggtttacaatgtgttaaggttctctttttttaaaaaaatttttgcacagagtatctttttctatgtgttccatgtatttgtgtctttggagctatagtctcttgtagacagcatatcactatcttgttttgttttgttttttctgtccattctgccaatttctgccttttgattggaaaatttaatccatttgcatttaaagtaattaaggaaggactttcttctaccatttaacacttcttctatatgtcatatacttttttggcccctcatttcctctttatggccttcttttctgtttttttgtagtgaactagtctgattctctttccactcccctttgtgtatatttgttagatgttttatttgtggttgctatggggattatagttaacatcctacacttaaaacaatctaatttaaactgataccaatttaccttcaatagcatacaaaatctctactcctgtaaagctctgcccctgccccccttatgttattgatggcacaaattgcctaataaataatttatagttatttgtatgagtttgtcttttaaatcatttaggaaataaaaagtggagttagaaaacagtatgatagtaatactgacttttatatttgtcaatatatttatcttattttggatccttatttcattatatagatttgagttactgtctagtgcccttccatttcggcccaaaggattcccttatgcatttcttgcagggcaagtctaattgtaataaactccctcagcttttgttttatctgagaatgtcttgatttctcccttatttttgatggataattttgccagatacatgaatttttggtaacagtatttttctttcagcactttaaatatgtcatcccactaccttctgacttcatggtttctcatgagatattagatgttataaaatttgaggattcctcattcttgatgagtcagttctgtcttattgcttttcggatttgctcagcttttgtcttttgacagtttgattataacgcggctcagtgtgggtctctgagtttatcccacttagagtttgttgagtttcttggagtcatagatttatgtcttttatcaaattttggacatatttggctattatttcttcaatttttttcactgcttctttcttttccttctgaaatattcttaatgtatatgttggtctgtttgatgctgtctcaccagtttcttaggctgtgttctcttttgttcctcagacttgattattgcagttgcccttctttttatttttttcaagtttgttgattcttctccctgttcagatcaactgttgaactcctctagtgaatttatttcagttactgtacttttcagctccaagatttatctttggttcctttttataacgtctgtgtctttattgatattctcattttgttcatatgtctctttcttcctttagttctttgtccatgttttcctttagctctttgggcttatttaagacaattgtttaaagtctttgcatagtaagtccaatgtctgtgtttcttcagggatggttttcattattttgttttcaatgagccatactttcctgtgtctttgtatgctgtctttttgttgttgaaaactgtatgtttgaacatcataacgtggtggccctgaaaatcagatattccccccttcctgagagttagttttatttttattattgaagattgtagcagtctattgctacatgtgcagtcatttccaaactatttttgcaaagactgtattccttctgtgtgtcatcactgaagtctctgttccttagtttgtgtttaatagtttgacatagatttccttgaaaggagttaaaactagcagaaaaatctctctcccagtctttccagtctttgtagattggttctgtgctgggcttttccattaatacttagccaggcttgtactgagcctaacaatcaggcccaaaagcgtagggtctttgcagatcttgtctgagcatgcttcttgctgtgtatgcacgtagttttctaaatctccctgtatgtgctgttgaatattctaatttcccaaagaaactcctttgcagctttttctcacagaacatagatggttttttggatatcttgaccatagtctttcgacccaggtgtttgcggttgttagttcaccttacacttttttcaagcattgcctactgcttacgatgagtgctctgtcaatcctttaagtagccccagacaggctaccagagacttaaacaagaatttgtaagttctgctcagcttcctctagaaatggggatcagggtccaagacagaatgcagttgctgatttcaagactgctgcaacaccagggagcttgtgggggaagggcaagcagaaatgtcacaaagctttcttgccattttaaagttgcctgttcttgactcagcatttgcttcattgctataaactttttactgtttttcagagttctgataaaattggctatgcctgttcctgctttaaaaaatatatatatattttttagggattggggtctcactatactgaccaggctggtcttgaacttctggcctcaagccatcctctcatttcagcttcccaaagtgctgcaattacacgcgtgaaccaccacacccagcccctgcttgtttttcaatgtgcctactccaccatgttgctcaagtatgtatattttctaaactaccttgtagtgttgtgatgggaaataaatccctgagccttttgaataactcagagagatcaaaaacttagtttatcctattcgaaggattagaaaaatgatatatctttcactttttcagggataggctcctcattagaaggctcctatgtgccgatgctgtacaagacatttcatttctcttaatgtttacaacaagcttgttgccaaggctgatcttgaactcctggcctcaaacgatcctcccagctcagtctcacaaagtgttgggatgtctggccaactaatgactatcttaactcttgtgtttcaatgtttatgccttcttttatcttgactgattgtatgactatgtcttctagaacaatgttgaacagaaatggtgagagcagacatccttgctttaatatttcaccattatatatgatgttaggtatagatttttctcacagatgccttttatcagattgaggaatttatattcctactttgccgaaaggtttttgtagtatgagggggtgctgaattttgtcaaacactttttcggtaataattgagatgattggttctgcagtcatcgagatgtggattttctcctttattctgttcgtgagtgattacactggttgactaatgttaaaacaaccttactttccaggaataaaccctattatcttttttatac

SEQ ID NO: 9249 - DNA, 228 bp, Homo sapiens
ggcaggtgggaagtcagcagcctgagcttggcgtgcagctcatcatggacatgagaccagtgtgaagactcaccctggaagagaatattctccccaaactgccctacctgactaccttgtcatgatcctccttctttttcctttttcttcaccttcatttcaggcttttctctgtcttccatgtcttgagatctcagagaataataataaaaatgttactttatacgt

SEQ ID NO: 9250 - DNA, 204 bp, Homo sapiens
aggcaactggaaaatacatgtctagaactgatccagcaattacaacggagtcaaaaattaaaccggaccatctctccaactcaactcaacctggacactctcttctctgctgagtttgccttgttaatcttcaatagttttacctaccccagtctttggaaccctaaataataaaaataaacatgtttccactattgtgctgtc

SEQ ID NO: 9251 - DNA, 907 bp, Homo sapiens
gacgataggttttaacaagaaagctttttctttcttttctttctttctttttctttttaattccatttttgtatgcatacctgccagctcgtatgcctctggcatggggaaattaagggaacagtgtctgtttgcatgtaagatgagatgagatcaatactactgatccatctgtagcctgggaaggagacaggacattcctgtactaaggtggcacagagctgtcctttgcaacattctcataaaattgggcacagagttcgcattggcgcaatatttatgggagtgggagggatggggaaaataaacttaactctacaaaagcaaactctaatgcatgcaagaatcattaggttggcaggtatatgcataagtgaaaaatctggaagtgtaatggtagaacataaaacttgtattgcttctgtttcagtgcaaaaatgtactagccaatacgcttaagtgtgtggcccatgaattgaacaatttaaccttgaagtctatatccgtgatattatgtcgatttttaactgaggggaaattaactagtccagcctaaaatgcttcttttaatctgcattctgtttcctcttctagttgtgccattactagtgatcatgtttttttcccccctttaatgaaaacaataaacatctatttgagacaattaaaatccttctgggggcactggaagcacaatacggtgaccaatcttgctttcatttttttttctttttaatttgaaccatgattttgctagaaatagaaggcccagtggtggaatattagagggaaggaaactgacaacgtgtgaaagttagaggcaaatacataggtgtagcttggagtgctggtatctaatataccattgtattcactaactaactcaaaataaacacatttaatcttg

SEQ ID NO: 9252 - DNA, 595 bp, Homo sapiens
atcattattttgtaaaaataatctatgcaaagttttactattacatttgtttattaaagtataatcaacagataaaaattgtatatatttacaatatataatgtgatgttttgatatacgtatacattgtgaaattgttaatcaagctaattaatgtgtccatcacgtcacatacatcattttttgtggtgagaataattaagactactcttcaaaccatttagagaacacatttaactgatgtagctttagttttttatagtatcattctaaccaatcaacaatgtctttgagctgctacttaaaaattaatgtttcaaaatctctgtttaagtagtgaatacatttcagactatcacaaagcatatatgtaatattaaaattgaatttagccaattaaattctagtcctaacttgtatttattattttgaagagtgttttaatgacttgctagcacattttacagctattgtcacaattttaaagtttgcttaatacctgggtgatgaaataattcatacaacaaacccccatgacacaagtttacctgtataacaaacctgcacatgtatccctgaacttaaaataaaagct

SEQ ID NO: 9253 - DNA, 252 bp, Homo sapiens
gatcctggaggatttcctacccccgtcctcttcgagaccccagtcgtgatgtggaggaagagccacctgcaagatggacacgagccacaagctgcactgtgaacctgggcactccgcgccgatgccaccggcctgtgggtctctgaagggacccccccccaatcggactgccaaattctccggtttgccccgggatattatagaaaattatttgtatgaataatgaaaataaaacacacctcgtggcatggc

SEQ ID NO: 9254 - DNA, 6063 bp, Homo sapiens
tgacatcccaattcgcagacaatgtcctctgtgctgtatttgccaatgaaagtggacaacaactatcttgggtttgtttggtgattgtaatttcaggtctgtcactcttgttacattgtgtacattcaaaaggaagagagaaaatatatatgataatcatttccacttaactaatttttacttctagcaggtaaatgtaggtagcagtgcaggggtgatctctgcttcctgtaccttgacatgcaaaaggctctcctaatactccacattcaaactgaagaggaaaattgaaatctctaatgaagctgctgtgtgtatttatgaatattaatgaataaaaactgcttggatggtttaccttaactactgcatgaggttttttgcagcgtgcatgagttttagtgaccttgttatttaagaagttaaatacaaggagtaaaacttaaaaaaaaaatacaaagcccaaagctttcccaaacattattcaatggttacacgacgaagtagcttttgaataatgtctgcctgaatcacctttctttgtgtgcctcctacgcacaaagccagctctgcagtggaatctggggattatagccgggtgtggcactccgccctgtgtgactgtcctgtcgccctgttagtcatcttgcctgtgtggagctcagcctgtctctttaactcatctgtagaagacacaccagtaaagctactgttggaatctgctgcaggggcctttgtgtgccctaaaaacaaatcctgttcatgtttgtttaaagtttttactttttgtggttgtttaaaattttttcaattgttaaatatgttttattcaggtgtagatgaatttcatttattgactgttcaacagagttaacctgaattatgttgtctttgtttttaaaaatctcacattctcaatcatattttgcattatttatgtatttgctttgtagtttgctgagacagatcagtatcaggggagctttgaggatttgccttcccagatttgtcagtatattacaaccaaattcttaatgctaattttagcaccttttatttattgggttttttctggcataaaaagtaaagccttttaattgaatcatgccacctatatgcctatattattaatcctatgtgtaaaaaaaatgtacagctttttttgggtttgttttggggtttggaagggccgggttattttttatttcctgtttcagtttttgtgcatagactttcacaatagctccaaggcagggacagcgggtttgggggttgggagggcagtttttggaatgtaaatttaggacttttaaaaaggtgcgcacagcttctgataaatttataactagacttaacctaatcatgtctcgttccagttctcttttctctgagcccttttcaaagtctcctctctttctcctgtcatccttttcctttcctgtccgtgtatctccgtttcttcaacatgacaagcatacagacttgaacacccctccggtgttcttccgagaactgtgaagtccatgttcatccaaatgtaaccaaaaaagaagtcaccctacatgtctgaaaaactgttgcttctcctctgaaacttcaaactccaacgatttccaaatacaatagctttgttttctttagttctgtaatggataatgtttaaaggaaaactttacaccaggcttctggttacactagaagtcaagcccattagggattttcattttttttcatttggttgttgagaagtttcaaaaatcagttttcaagctgtggtctttcaaacacatctgcacataagtcacacatttcaataaagcattttcaagactgttgaccacttgaatttctttggtgttagtggattaacctaaccattactctgagattttatatctctaatccagtattttttttctttttatgctaaacatgggagatcctggttttgtgtgaatgcattattttggatgtgagaaataaatgccaattatatgtactttcccttttctgcacaaattctgggaaaatgtaaaagccttcattttttaacatggttttagggaacaactgtaagtccattcagagcagtttaatttagatgatcacttttaacactgcagaagacctaaggagtcataagattccatctcatgtagaatactgtatattaattattttttaccagatattttacaaatacctcacctcatcctgtatgtaatcaataatgtattattttagggtagaacgacacagaatatcaatataaaaatatattcaagcccttgaaattcttgtgtcctttttctttagtttctgaatgaaaatcttattactggatgtactattgaataaaaattaattgcaaagactttgatggagacaaaatcaaaatataccactgtttattttggcagcaccttcaaatttctaaggaccagatcctgaattttgagaattttttgtttcgttgagttttgagtgtctaggatataagtttataaatgttctacagtgcttgtctttacttcctgtttagaaatcatttaaatctttcccctcgaggtgctctggaagaagtttaatttcagctctgaacaagtagaaataactgtgcttccttgtatggctgcaatcataagacagaatttctgtggttggctaccgtgaaatctttgtatttatattgcattgttttgttaaaaaaaaaaaaatccacagaagtagaacctaggtttgctactaacaaagtagtggattcttataattaggctcaggtaaagtaagagaaaacttctctccctgtggcccccagagaaatgaagtaggatagcagattacactattagaaataatagacgtaacaaaaaaaatccagcccattatccccaccccccattttccctctcaatattagaaatttcaataatatgctgacagattttcaaaggtcaccaaggcttttgtgtttttttccggtctgtgggccacagttaaaagaacgggtaacaggttcagagttctcttgatacgtccaagccttagtttccaggaaaaaagctaggctcctcactgcaaatattaacgctttatatatttactccatggatgttggggtaagcacatatatcaatagttcatagctctagttaaggacaaagtgggttggggggtagaaggagaatactagagaggttacggtagcaggtggctgcagaaaagaatcttttgaatgggattcctgtaacagtgttcagtaccaatattaagtctactgtaagtggggtctgatatggcttactgatacaggcatgtgtaaaaaactaagtgtgatggaggaatgggtgctaaaagctcttaacagttttgtagagaagccctgcagccgtgtttactatatatgacatgcctgtttcttagtttgcatgcacagtttaaggggcacatgcaatattggtttcatgtgcagtaaaaattaaaacacggctgagcgtggtggctcacgcctgtaatcccagcactttgcgaggccgaggcgggtggatcacgaggtcgagtttgagaccattttggccagcatagtgaaaccccatctctactaaaaaatacaaaaagttagctgggcatggtggcaggcacctgtaatcccagctactcgggaggctgaggcaggagaatcgcttgaacctgggaggcagaggttgcagtgagctgagatcacgccgccattgcactccagcccgggcgacggtgcaagactctgtctcaaaaaaaaaaaaaattaaaacactaggtacgaaattatcccagaattatacgcgaaagttggtgttcatgctggaaaacagttacggttatctgtgctctttctaaagctcaactagacactaaaacagttctctccttgagaccggaagtgggatgggggtgggcaggtggaagggaagaggctggggaggagcctctcatctcatctcatttcagcctcaacagtaattgaaaccctatgcctggcctggagtgggtagaggttagggttagagtgcaggatggagcagcagtctgcagactttcaggttgtgacgatgtcatgaaattctgtgctattaaacatggctatgtctgagtcagtcattacggtattccaaagccaaattcaagtgactgtttttctgaatagtataaaaatctaattccctgtgcttatcggcttcaactgtgcttacacaacgtttgtttctaattcgtactcttgcctcttggtttctgtagtttttcaacccatttctgtcagtgttctataaatgcatacattcgttatttaaggaaccctgcagcagacctcgaataaaatgtgacttgatgtttgttgccacttcctcaacttggttagcaaattcaagttttgaaagacgattcgtctcagagaagttgatcctgaacctccacgtcacattttagtcggttgctattaggtgggtaatgcctaataacatgggttcctcaaatcacaaaggagaatgctctcaagtcctcatgttaactttagtaagtcagttaactttacagcaactaaagagatcaattaaaaagaacccttaagtctgactgtcccaggtaactttacttgctgtacagatagtgcacagatatggatgagggctgcacatggctgatttgaaaacccatgtggggccgggtgtggtggctcacgcctgtaatcccagcactttgggaggccaaggcgggtggatcacgaggttagttcaggaccagcctggccaagatggtgaaaccccatctctactaaaaatacgaaaattagctgggcttggtggcagatgcctgtaattcctgctactcgggaggctgaggcagagaattgcttgaacccgggaggcggaggttgcagtgagccgagattgcgccactgcactccagcctgggcgacacagtgagactctcctcaaaacaaaaaaaaaagaaagaaaacccatgtgggccgcatgtgcacagcctggggctgctttccacaggcctggataatgatgtttctcttcaaggaggcctttactaaccacagggaacctagcatctgactgtgtccttggcagacagtgcatgtagcctgtagaatgttggctcctctgtctatagaaaccatcagttcgctgctctctcattcatacatactttttgagttcccagtaggtacgaagctttgtctaaacattatttaccaactgcgatttttacagacttcccctgtaagaattttctaaaagagcctttctcccttacacaattgaaacgttttcaaaggtcatcaagccggttgcgtttggtcagtcacgtgaccaatcagagctggtgagtgagctgctcccttaaatctaccaaattagactgacagcatttggaatctgcctcacacataagagatccatattcatttaatagtgaagccagcccagaagcatcctcttctgtaagctggatggagtcccagctctctctccttgtatataaggagaccacaccctgtatataaggttttcttgaggtagatgcagcaatattcctggggtaagattctataatactcctgtattggcaagtggactggaccaacagacacaggcctcagccactgtcgctagggactgaaggagagttcatggattcttaccccctagtcatgaaagctattctggccagccttgaatccatttaattttgcccacgagaacctttcatgacaattaacaagacactagtttccccataaaagtccatttttaaatatatagtatgctaattagcagtgtctgttgaattgccctatcggatagcagccaccatgtgtgctgaccactcacgattcagacttaccttggaaaatatcacactgacgatacagtactttagaataaattgcatattgtatcaggctccgagactaatttgtactgaacccttgatatagattaccttttataacatcaccacctgtcatgaagcttatctgttttctgatttgaataaactttgtgttgtgca

SEQ ID NO: 9255 - DNA, 919 bp, Homo sapiens
gctccccccgacccctgcaggctgtcacatgactcattgagtagtaatgattcagaagaaaaagaaaaaggagactttattggtcaatatttgaccactctggactgttctgtaaagtggctggtaacaacagcactttacagtttgtagatgtaaccagtagctgatcttaaggcttttttaaaaaacaaaacaaaacaacaaaaaaaaatctttataagaaagagaactgaaaagtagcgtgctattcgtcctgtaggtgctgtggtggatggacctgggcagagggcacttctctctcttacctctcttgcactttctgtctcctgtctcttctcgcccctgccgcctgccccagcttccccgactccatctgcagctctgccattgtgacatttcctgttacccagcccaagttttcatcgtctgctcaataccgtgggttcttcttcgtcctctgtcctctgcccagtgtgaggccatcaccatgtgagaagacatcttggcctgatttgctgccaccagcgtcccctccctcagtgggcccgaactcgccagccccagctttcagtggagaaagcggtcctctgaaatggtttcctcccaacccccgcatttaaagggactcaaggtgcctgccacttcctcagcgaagaagtctgtgttcctccccgtccttgccagtggcgatcatcccttcacaatcccagagtggcaggcgggaccggccccatggtctggctcctgtcacctgggtccgtgccagcacaatctgccaaagttctagagaccctgttcccttccccatcacctcacatgcttcttctgtgtgtatttctttttgtttttatggtttttggagcaatttaaactcccagttgtttattttcacaaaagaaaataaaattgcagttgcaag

SEQ ID NO: 9256 - DNA, 1248 bp, Homo sapiens
tcaaaaattgggagccagggtccaatagttggactattcaaagttgcaattgtgcagacaaggtagagtgtgtggtccctgtggctgtagctggctccctagcctacctctctggtgatctctccatctgaggctccttcactttctctccatgggataggggttgggggtactccctagagctgctaggcttgaggccttgactgttgtgtcacccagagccccctcaagccttctgctccccaattctctctgttgcagagttggaagtattggccaagaagagcccacggcggctgctcaagaccctggagctgtacttggccagggtgtcaaagggacaggcctccttgttgggagcacagaagtgctatgggccagaagcccctcccttcaaggatctcaccttcacaggtgagagtgacctgcagtctcactcatccgaaggcgtatggctgatctgacctccgagatgaatggaggcttaaaggctgagctgcaggggctttcagggggtcagtggagccatgtcaggagcctggccaggccgcaccccttgctgtctcagcagatgggatataggaagctcctgggcttagctgtgggaagccaagtaccctcaccggcatgggacatgaggggcagctagacttcacccccttcccgcagacctgcctccagagcaaggagaattctgccttaatctgttgggctccagtctccgggttgaattccagtgtatcccactgggagtgaatggatcatgaggtgggatggccccatctggatgttctgcagatccccacatgggaggagattcccaagtagaggcagccagaattctgactccctggcagcagcagggctttcaggcaccagtgtctgtgttgttagaactcagaggaagaggcaggggcagcagccgacagggggcagcatgacccaagcaaggggcctgaggcctcagtgggggtagggcaaggaggtacctcacaggtgggtgtgaggccccctctggagtttctggccattcacttacccactctcttctccccctgacccccgctccattgtttatgatggaaaaacggacatttggctaggtgtctctcacggctgctccatcctagcccccacaagctggggcttcctcctgtagatgctgtgcatgccccatgatgagtttctggcctaattgagggaaggaggaaattcataccagcagttttcaaataaaagaattgttct

SEQ ID NO: 9257 - DNA, 188 bp, Homo sapiens
gaatgcaggtgtctgcccagttcactaggtcctggatgaaggaaccgtggtggcctagaccagtcaggggacagcacaggcactgctggaacagcaaaggatcctctcacatctacttgtgggcctagggcaccctgagagggactggcctaccttgcacaagttcacattcaataaacatttgttga

SEQ ID NO: 9258 - DNA, 1506 bp, Homo sapiens
aagtgttagccttttttccccagacttgttggcgtaggctacagagaagccttcaagctctgagggaaagggccctccttcctaaattttcctgtcctctttcagctcctgaccagttgcagtcactctagtcaatgacatgaattttagcttttgtgggggactgtaagttgggcttgctattctgtccctaggtgttttgttcaccattataatgaatttagtgagcataggtgatccatgtaactgcctagaaacaacactgtagtaaataatgctttgaaattgaacctttgtgccctatcacccaacgctccaaagtcataattgcattgactttccccaccagatgctgaaaatgtccttgtgatgtgcacgtaaagtacttgtagttccacttatagcctctgtctggcaatgccacagccctgtcagcatgaatttgtaatgtcttgagctctattatgaatgtgaagccttccccttatcctccctgtaacttgatccatttctaattatgtagctctttgtcagggagtgttccctatccaatcaatcttgcatgtaacgcaagttcccagttggagctccagcctgacatcaaaaaaggcagttaccattaaaccatctccctggtgcttatgctcttaattgccacctctaacagcaccaaatcaaaatctctccactttcagctgtcttttggaggacgtacgtaataaggttttaatttagtaaaccaatcctatgcatggtttcagcactagccaaacctcaccaactcctagttctagaaaaacaggcacttggcagccttgtgatgtcatacagagaagtcacagggcagtacctgagggtctgtaggttgcacactttggtaccagataacttttttttttctttataagaaagcctgagtactccacactgcacaataactcctcccagggttttaactttgttttattttcaaaaccaggtccaatgagctttctgaacagctggtgtagctacagagaaaccagcttccttcagagagcagtgcttttggcggggaggaggaaatcccttcatacttgaacgttttctaattgcttatttattgtattctggggtatggcgtaagtacagagaagccatcacctcagatggcagcttttaaaagattttttttttttctctcaacaccatgattcctttaacaacatgtttccagcattcccaggtaggccaaggtgtcctacagaaaaaccttgggttagacctacagggggtctggctggtgttaacagaagggagggcagagctggtgcggctggccatggagaaagctgacttggctggtgtggtacagagaagccagcttgtttacatgcttattccatgactgcttgccctaagcagaaagtgcctttcaggatctatttttggaggtttattacgtatgtctggttctcaattccaacagtttaatgaagatctaaataaaatgctaggttctacctt

SEQ ID NO: 9259 - DNA, 1174 bp, Homo sapiens
ctggctgcaggcaagaccaaggccaccactgtgggccctccttccagtcaggcctgaggacaaggtgagctcgctgagtccagcctcgtggtcttctccaagatgccgccagatgcccagcctacagcctctcagggtcggatcggagcacgcctgcctccctctcccctccgccctcacccagccaatccgaggctgcttcgcactttgccctctgcctggtggggaggggagagctcagcccccgactcactcagaccccaaggcccactgtccagctgcagaaattcgttgccaaagattggacagagacaccgaaggaaatggggtggtgaaaccccacagcgaaaagccacaccgttgctctgtgacttttgctcctcctgttgcctgagccccatctcaagccaaagatgagtcagtggttctgctaggaactcatggaatggatgggcatttgatgacccctgggggtcatcttggccctctgacctggtgctctctctccactgggccttgtgctggctgagtgcaagacaagccttaggggctgtgagagggaggctggggtgcctgggcggggctgggagtgggacctgagatccctgcccactctctccccttcattggctgcccaggccactggccccagttctcagtgtcccttgggtccaggctccttgggccctaagcatcaccagaagggagtaagcagggagagaagcaatattactccctcccctacaccagggacttgccccagggcagctacctatgggtctttgcttccccagccagcctctcctcactgtgacccacccccatgggcccccgtcccaggcagccagcaccatgggcaggccctgccatggacagaaaaagagtttttctcttgttcagcctgcacgtggcctgaggaaggagtagaggctgggttggctggagccgtcctactgggcaagatggcgccccacttggagggcggtggtctgttacagggtgtgcaggggcagagaaggaagggaccaggggactgggccagtatgtggaggatggggcctgcgtgttcaaagccaaggcccgccccttccttgtgctcaaatggccaaagctgttcacgtctgtgctcaaccatctgcttcaaattgaagtaaaagccccaaaatgtcaagaa

SEQ ID NO: 9260 - DNA, 314 bp, Homo sapiens
gtaacagggaacctctcccacctgcccttctcttcagggacaaccctccataaatgtgtgccaagagggtctcctttcctgtcttcctctacagagaatgctgctcggtcctcctacccctcttcccgaggccctgctgccatgttgtatgccccagaaggtaccttggtcccccggaaggagagaaaaaagagagatggactgtggctgcatttcttgggtccttagagtgggctggagagacctagagggcccagcatgtggctgggaaactgttggtggccagtgggtaataaagacctttcagtatccct

SEQ ID NO: 9261 - DNA, 231 bp, Homo sapiens
cccagctggtcctgaaggagaagccaaatggctgcactggccgattctggtctccagaggaccttggtgtttgctctcccttgacccaccccagtgagtgccaaagggcagccccaacatgtgcacccctgcatttcctgtcatgccacagactggcccttgagggcagcctgctgtactggccatgctgggccagccccacctggagctcagtaaaaactgctgtttgat

SEQ ID NO: 9262 - DNA, 204 bp, Homo sapiens
ggaggttggggctgagtgctggccctctgcgtcttccttattaaccttgaatcctcattaaaggtttctttacccaccctgaggctgtattgatcacagacctggccaggggctctgcatcctccatcaggtctctacttctgttggggaaggtgatcctaaatcgcagaaggcaccaggctgcggttttcctccctgctggcc

SEQ ID NO: 9263 - DNA, 474 bp, Homo sapiens
aggaggcgtctagggctttgctcccaagggctgtggctgatgatggtaaataagaacacagaagctgtagctgaacacaggctggctggtgggcttcctaggccagcccagcttgtatgggttctggctacaccagagcaccaagagcccacttgcctgggatggccccacactgtcactcagctgttctttgatcatttttttctagattgatgctcctttctcccatgcattgagctcccatctagcttcagcagggcagaacccttctccagatgtgtgtaacttatgtcttgagtatctgggagtagttgaagaacagataattccttccaaacatcaagccttgggattcttggagcaagcagaaagccagtaacttcgctctgttagaggtggaggattttcctatggttccccccatttcctgatttgtatttttagatggattaaatagtctcctgtttttaaacc

SEQ ID NO: 9264 - DNA, 183 bp, Homo sapiens
gccctctcaccttgtcctgtggaagaagcacaggctcctgtcctcagatcccgggaacctcagcaacctctgccggctcctcgcttcctcgatccagaatccactctccagtctccctcccctgactccctctgctgtcctcccctctcacgagaataaagtgtcaagcaagattttagccgc

SEQ ID NO: 9265 - DNA, 4598 bp, Homo sapiens
aagtggagattcaggagcagcaatgggtctcaccatagctgctggaatcacacctgagaactgagatataccaatatttaacattgttacaaagaagaaaagatacagatttggtgaatttgttactgtgaggtacagtcagtacacagctgacttatgtagatttaagctgctaatatgctacttaaccatctattaatgcaccattaaaggcttagcatttaagtagcaacattgcggttttcagacacatggtgaggtccatggctcttgtcatcaggataagcctgcacacctagagtgtcggtgagctgacctcacgatgctgtcctcgtgcgattgccctctcctgctgctggacttctgcctttgttggcctgatgtgctgctgtgatgctggtccttcatcttaggtgttcatgcagttctaacacagttggggttgggtcaatagtttcccaatttcaggatatttcgatgtcagaaataacgcatcttaggaatgactaaacaagataatggcagtttaggctgcacaactggtaaaatgactgtagataaatgttgtaattagtgtacacgtttgtatttttgttaatatagccgctgccatagttttctaacttgaacagccatgaatgtttcatgtctccctttttttttgtctatagctgttacctattttagtggttgaaatgagagctagtgatgacagaaggatgtggaatgtcttcttgacatcattgtgtattgctggtaatcaagttggtaacgactacttctagcagctcttaccactatgacttaagtggtcctggaaggcagtaagtggaggtttgcagcattcctgccttcatgagggcttctaccactgaccactttgcacgtacctggctcccagatttacttaggtaccccacgagttgtccacataagcagcttcatctttaccttgccagagttgacaattatgggatactctagtctacttatacttgtgttcccatctgtctgccatcctctgaaggccgggacccagtcatacatccttagaaaccaaagtatggtttttgttttctcttggaatgtcaggtcttaaggcatttaattgagggacaaaaaaaaaaaaagccgatatagtagctagctacttaagcatccatgggtattgctccatatcaaagcagatttgcaggacagagagagtaaattagccttcagtcttggtttacagcttccaaggagagccttggccacctgaaatgttaactcggtcccttcctgtctctagttcatcagcacctgcagatgcctgactcttgttagccttactattcaatacagtccttagattcacggtatgcctcttcctatccaggcacctattctgaatcaccatgttgctctgcagctagagttgataggagaaaatccatttgggtagatggcctatgaatttgtagtagactttcaaaatgagtgatttgttagcttggtacttttaagtttgtggtacagatcctccaaacccatactctgagcaattaactgccttgaacatagagaaaaattaaggcctcacaggatgagtctccattctctgtaaatgcttattttatcatagtctttagcctctactatgagtaaaatgttctcttcggccgggtgtggtgactcacacctgtaacctcagcactttgggaggcagaggtgggaggatcacttaggtccaggagttcgagactagcctgggcaacatagtgagacaccggatctacaaaaaaataaaaagccagactggtggtatgtatctgtgtcccagctaattgggagggtgagttgggaggattgtttgagcctaggagagggaggttgcagtgagccgtgattgcaccactgcactccagcctgggcaacagagcaagaccctgtcttggagaaaccagaattttggaagagcaaatggggctgagtgcagtggctcatgcctgtaatcccagcacttagggtgccaatgtggattacctgagcccaggagtttgagaccagcctgggtaacagtgagacccccctccctacaaaagattttaataattagttgggcgtagtggtgcatgcctgtaatcccagctactctggagacaggtggaggggattgcttgagcctgggaagctgaggctgcagtagccatgactgcaccactgcattccagcctggttgacagagtgacccttgtctccaagaaaaaaaaaaagcaaatgggattaaggactcatggaatgggaaggggaaggggagtcttactatatgtggaataaacttgctcagtgttgccacagagttacattaccaatgtgtagaagtcagaaactagacttctagtttggttcaacatttgagggttgttttatagccatcaaagtattcaagaggttggatggcactcaaaagattctacatgtctagaatcaaactcaaatctggcacgtaggtgcttcttagtaaatgcttaatgaatgccaccaactctgcaaagtattcattgattttgagaccttagtcatgttgctactaaaagtagggcatatgaccgcctaagaaacagaacttcgagaagtcctaacgtaaccacagtaaagcagactcccctttcagcaacctcaaagcaaaaaaaaaaaaaaaaaaaccagttagctgctatataaacactataccaagcactaggcttagaggaaaagatgtcagattgtactgtcactggctatgtacccatattctctaagacagggtagcatttgtctttcaaactgcagggtttgaaatcagtttttgtgggtgattgcaattttttaatgaaatgcattagaacatctaagcacgtcacctacagttttgtgatggtgcatttttgcattgcagtatagatctgtgcatagatatatgcattaagtgtagcaaatcgtgatgtaaattttttactgctggtcatggtcaaaaagtaagatacgctaggaaattgagtcactaggagcatggatgtataaggcaggttttatacaaccatttagattcaacattaatggtagagtggcattttaccaaaaaaatgggtgtatttgatttgggtgctgtaaggcaatttgctaggacatgggataatcagattacacaaaatctaggcagtgaacaagtcttcatcctggcccaggaaatagcctattaaaaaatgctgtccaggccaggcacagtggctcacacctgtaatcccaggacttcgggaggctgaggctggaggattgcttgagttcaagaccagcctgagcaacacagtgaaaacccatctcaaaaaaaaaaaaaaaaaaccaaaaaaactgtccagctgtggactttcaggattcaggactgctggggatcaagcccaaggatgtttttcagagctctgtgatttaagatgctcgaaaagagtgtccaagaggagtaaaggtcatgacagaatttactcccaggacaatctaagttctgccacaagtacccgtggtgtctgttcccacaacaatggccctttcacaagctcttgcctcacaacccctgcagaagtccttcaacaaaactaataatagactagtgaaacctactcctcacatgggtaagagttgcagtgggcaggtgaccctcctccctgcccccatcctttgcttcctcaagctccctgccaacctctggatacatcaatgggaaggaaaccagggaagcatagacctatagtacaacaggggtgtagtgaccactggacctgatgaagcgaatctgcctgaaatttaatacgcctttttatttcccttctgtgttaaatcaaatgatctgttctgcactgagccaagcaagttacttttaaaactggtggcaccactcatttgggacttggagactgcttttatccagaacctgttaagagaacaggggatttaaatacaaaggaatatgaaggtggtgtgccttaaagacagtctaaaattaggttttagtttgttacattattttgaaatattaaacatgaaaatgttaaatcaggatgtgtgagttttaagatgttgaacactgtcctacatcagtgaggagggaggcaataaagtaatttcagagtaaaacagattgaggatgaaaccaagacagaagtgatgatttggctttttatgatttttgctgtggaaatggcagtcgtgtgacttttcacttgcagtttaaatgaaagggtgaagagaagcctacctgccctaatggctcagggctatatccacctcccggataaccctggcccttgggactccatcatctccttgaagtagcactgagaatccaagaagaggctccgctgctttttgcacatgttactgagttacatctcaggaagatttttaagcacgaggaaggaaaatacaggcctggccaagcagggtccccttttcggtatcatctttgttcctaataagcaatcaaggggggtgggtgtgttggctggtaaaggaactactaagattcagaagcttgtagtcttcattattttgttttacaggttaaaataaaccacttgactggg

SEQ ID NO: 9266 - DNA, 2178 bp, Homo sapiens
atcagaagtttcacttgtttctcagttattggatatgtatctttgtgtacatatctttgcaaaaatggataagtacaaaacttgatgtaaattgtaccaatgaatacgtaaacatacagtgacaacattaaacttagaaaagttttaaaacttaatggatcagactttgccagatttggttagggaaacagaaatttagaatggtgcattatttttaacaaatggtattggcttaactagttgtttcagttatgctcttttagttgcaaggaatctcaagtgggacaaacataaaaagactcaaaagctacaagttagctcaagcaatgtgacattatttcaaggatatgtgccagggaattcaggaaccacctcaccaaccccatctcccactcagaaatcacctcccagcctcaggaagagtagaaattgggtggtgctcctcagcaggggaaggtggatgtttaggcttgggctctgcatgcatgtgacttgcttctttttgcattgttaactccattctctctattcaccaacttctctacacagcttttgcatacttacagtttctgttcctttgtaataactttaacttgcacctttgaggttcttttctacatgatgaccttcagctcctgctgctagtctccaattgccaagggaatttaactgggccagactacctttttatactaggtctggttgggtcattgtctagagtagggattggctgtccttaagtcaggagcccgctttgtattagcaggtttgcatgcagcaaaaaaacagttatgtgagcagtttcacttggaggttcacatggggtggcagcacacttaacatctaacacaccaggttcattgtgttcataacacttgtcatttactgtaacaacattttttcataggagagtaaatagcccttcagcatgctcattcatgaaacagaagaggctgtacaagtgaagacaagggctttttatgcaagttttgaaagataggtatttattttttctagagacaggagttttgctctgttgcccaggctggagtgcagtggtgcaatcatagctcattgaagcctcgcactcctgggctcaagtggtcctcctgcctcagcttactgagtaaggatatgtatttcttaaaagttagtttatccacttcagatttcatgttttcatttgtaaggataaacttttcccacaaattttcaacaatcattgtagaaactaagggggagaaagtaatctcagttgttttagaaacgaaaaagttaagcattgtttacttgaagtgggcagggaagcagcactgagtaaagttcaattgagtggttacagtctagggcagtggttcccaactctccgatcagaatcatctgggaagcattttcaaacagcaaagtactttgaaaaccattattaaatagaattatgcatgaattactgtttcagatcctttaatgtggtagttggtaataataagatgaaattcctctgttgttagtaaaattatgaaattgaagttctgcagcatgtcaggccaggattattagggagattcctcgaaactagtgtgtgtttattaaaaggagaaaggataacaatagaatgttctaaaaccagaagtccaagtgcgtgtctacttatgggaccaataaataaagaacagacatttgatttgaggtgaggtaaaagcctgaaacatggaatggcattctgttttgatggattttcatttcttcgcacttctgagacggcaaagccaaccacttagaagccttccacatctttgtcacctgcctggctcctgctctctgatgtacctctgggtagtgagatggaaatggtgcctgcagaagttggggagaaggatacttttgcacagcctccatgatgtctttattgcaaatatggatgacaagggtctctgttacaggggcctcagagcaccttcgtttctcctctagaccagggacaggtgtagagataaggactggcaaccagagcctcagcatccaaagatggactgaagtgggatggctgacaggcacataacttacgggaaagggaatttcatacatacgatttttgttttgtgggtaggagggcttatcatcaacactgattttataatctgacaataaatgtctttcattaaagagtttacctaaatg

SEQ ID NO: 9267 - DNA, 596 bp, Homo sapiens
tctccctgcacattggaaatgaattacaggcagctgttcaaactcttcaggcaggattcctgtggactttgagattcatgttacctcatcttcttttttaaactgtacccaacttgtgagggtactctgtctaatgtatatttctagtgtttacagacagtaaatgtgtatatgtagtaactatttacagaacatgcatccttaaactgtgacttctcacctagtgcagaacttttaccaggctgtaaaagcaaaacctcgtatcagctctggaacaatacctgcagttattcttcagctgtttggacaacttagattgggtttataactattaggaatcactgcacagtttatttgggttgtgttttgtgtctgagtcccctccctcatcccttagggtccagaagagcaatggaggaagtgacagctaatgttgcagttcttattgtatggcataggactggcattatatagcagaaatcaactactgtacaatttcttggggttaaccatctttagttaaatggaattttaatttaaatgacgctttgctaattttaagtgttaagcattttgcattaaaatattcatataat

SEQ ID NO: 9268 - DNA, 1898 bp, Homo sapiens
agagataactttagtttgcaatttgtaagtgaaactgaatcgtgggtgcatttcagaagagaacgttccatataatgcagctaaccaaggactcctgtgtttctataagctaatgctccagaaactttgccaacctgttagtgtacacacactgaggggagtgctcccggtgaatattatcatagggctttattatattcttggtcttcatttctgatcaagtaaatacaccagcagttgtcattcaatgcaggtttttgtacttaattatatggtgatttttttactttttaagagcagaaacggaaattgacctccccgccatgtgtttaatattcctcctgcttttacttttgtcattttcttgataatcgtaagccttgagagtgtttgtgaaaaagttttatttcctgttatgtatacataattaaatgaaaattcttcagaaaaagtttgataaattgaattgtggttatgaaactaatttgcatttttatttgcttaagaaagaaagctgtgatagattccagatatgctttttgatgttttcctctgctccagctccaagaagtcagcacacctgcattttagctctgcatgcagccccagcaggctgcgtgtttaagaatttcattgtttaactggctggtgtgagaagtcttccgttagcatagagtggaaggagtactattgtttggttgggtttttgtttgtttgttttttgtttttgcttttattgccaagaggtgcttgttttaaaagtatgtttaataaaatgaaattctaaagttagaagtgttcttaagttgatatttactctcttggtcttggtagccctattatatcattgcagacacagtgttgtgcatgtgtgtattgtatatgtgcaccagcatcaaacattgtgtatctggaaggaaagcagcatgttccagttctaaaatgcagttaccagacccatcactttaaatccttaaagttagaagctagcaaattttctgtagtgcagaacgtttattgctgtttttgtgtttgaatagtataatgtttgatgcctctcttctgcaaagcgtatcatctcattgactgtgaatctgtatattattctgatggatacagataatgatcttttctcttgtgaggtatcttcatttatgcactgtccaaaaatagccatgtgtaagagtctttctgtatgacgaactacatggaaaagacttctgtggacataattctgaccgaaacccatgaagttacttcagtataagaagaacgttacacggaaatcaccaaatattttgcaactttatttcttctgacatggagtgaacatcaataggaatactttcaaagaaaatgaaaacacagaagcaaagagaaatgtggcacttcacattttaaactacagatggacttggtttgagggagggggaatcacagatttggtgctaagttaattagaaactggcagcgttttacagtagtacaccagcctggatgttttttctaaaatgtttacctgggagagctggggtttgtttgtgaggagaaagagtactgtggaaaacctctgcttgagtaccatgtggccaggcctatgtggatggctactccgtgctgtgcggcttcaccagcggttgggattggcccagcttggagtgcttgtgtggtccaacctcagtctggccccatagcgacttttgccccatgattctgcttcactgttggaatcctctttgaagttccccctctctttgctaaagcagtgaaggaagagaacagagacaaactctttggactgtgaaagagaaggtagagaattccaggcaacagtctgaccaagggtgtaaaccagtttattatatatatatttttcctttgaattaaaacctagagtg

SEQ ID NO: 9269 - DNA, 1430 bp, Homo sapiens
aaagcaaccatgttctactatggtgccaaaaatagttgaacatcgacatcaaaaagattctttctgtctgcttattcacatattctggtttgaattaaaagtgatgaaattatcctaaatacagttggccctctgtatccatgggttccacatccacaaattcaaccaactgtggatggaaaagacttgaaaaagatgagagaaaataacaatatgacaataaaacataatacaaataaaaacaatacagtataacaacgattacatagcatttacattatattagggattgcacaagagaaggtatgtaggttatatgcaaatactgcaccattttacataagggacttgagaagcatggattttggtagccacaggggtcctggaaccaatccctcacagacacagacggacactttacagtagatgaacacaaagatgaaaggaaaagtctgacctaggtttgcggggagaagtggaactccatttttgacaggtgatgccattttttgttttggacatcgtccctctgtagttctttccattcccagtcttgcactctgaaagatacactgaaggaaagtccacacagtggtcaaagtctttcacaagacaccacgtgaaggtctgcacagcacagtcacattgagaaaaagatctcatgcaccagaccccctgtttctgctttctaaaagatcatcttttgcacctgcaaaaaggctgcagtaaactgggccattccatactttgattcatgtattcaaatgctacttatgagctctctgtgtattgagccccaccaggatgctggggacacacggggcacagtgcagccagaggcttggccatcatagagctcacattctagtggaatcagacaggggggttacaggaaatattcaagtaaacaatataaaatgagatcacttgatgatacatggatacatgttacatacatgatgagacagagtaagagaatggggaaagggtttttagatgggggaatggcaggcttttccgaggctgaaagagatccaacccacttctatttcttcaggctcccagtgatatgaaaaagtgccaaacaggactataaaattgtggtctactgtaaatggtttgcagtaaaagttctcaaccagcttccactcaaccaactcaccagttagacaatgggccctctcctgtgtttaaaacagtccggtgcccacctgggtccacatgcagctggcaggtgtttgctagtgtgcccacccatgtctgttccccccacgtgagttatgtgcttacaacgagtcgtttctttgcattttccaactttcttacatttatatttaattaaagatgatctaaactgagaaatgaatgtgaaaagaaacaaagctcttttttgtttggtttttaactaaattaaatgtttttaacaagtt

SEQ ID NO: 9270 - DNA, 2656 bp, Homo sapiens
tgtatctttcagagtgcaagactgggaatggaaagaactacagagggacgatgtccaaaacaaaaaatggcatcacctgtcaaaaatggagttccacttctccccgcagacctaggtcagacttttcctttcatctttgtgttcatctactgtaaagtgtccgtctgtgtctgtgagggattggttccaggacccctgtggctaccaaaatccatgcttctcaagtcccttatgtaaaatggtgcagtatttgcatataacctacataccttctcttgtgcaatccctaatataatgtaaatgctatgtaatcgttgttatactgtattgtttttatttgtattatgttttattgtcatattgttattttctctcatctttttcaagtcttttccatccacagttggttgaatttgtggatgtggaacccatggatacagagggccaactgtatttaggataatttcatcacttttaattcaaaccagaatatgtgaataagcagacagaaagaatctttttgatgtcgatgttcaactatttttggcaccatagtagaacatggttgctttctattttttcttgggtatggaggtttcttgaagacctagaacatagaagaatgcctagttaaaaaaaaaaatcaatgaaactacgagttttaggccaaatctgagaaaagaccaaagatgactatgtttgggactgaagtaaacatatcaagttagaactctcatcacatgtttgactcaaattgtggagcaaaatagtaaataaaatataaaaatgaaaatgaagatacgtgaaattcaaatgtcacaacttgcctattatttattttagtgcatttttttgtgcttttcccagtttggtgttaggtggccttaagttctcagtaatgacacttatcaaataggaacttagtgttactcacctttatccattcccccaacactcaacaaattgcctttgctatatccctatgagatgagcagatcaaatattccccgtgagttaatgaaaactgattcaaccaaatggcgaagtcagagactatcgggggccatggagacactctgggccatttttatgaggtagtctaggctcatcttcatgagggaactgaggtcttggggggtgggggttacccaaataggttcacagaagaaccagaaataaaacctgcctttctagactgtaagtcttgtgattgtcatctaaatggttgtctctatacagcaactcatctctagaactgaaaataagtttaaatccctcctccatccccaataattcaagctgcatttcagagaaaaccaggactttggaatcagacagatcaactttgaattcttgatctgcttcttcatagctatttatgcttaggcaagttttgttttgttttgttttacgttgccactcagtcttctcatctgtaaaacagggataataacaccttcctcaaatggttttttttattaggactaaaagagagaatgtgtggaaagatgttagtggaattcctggcacatagttcacatggacaaaatggtgttaactacgaaaatttttacagagaaaagggcaactgacaaaagcaggtgtttggaatgaattaagaccatggcaggcttttgaggcctttatatttctcctgactgtgcaataaaaatattttggctctctgtctaagacttggctgtcacagtagcaatggtaatattagctactgtgccagaagcagcctatcaatagagaaattgaaaatctgaccacacaaatgctgcagcacccagctgaaatgcatttggatgacaatctcagatgggaatcgagagcatctccttctgccttgctaatagcaagctgatttttagaatatagtctaagtgcttctcttccatcctccccagattctcacctgctacacacccctcagagggactggaggaatccagacaacgatgcgcaggggccctggtgctatactactgatccagaacagagatatgactactgcgacattcctgagtgtgaagggcaggagtggctctagaaaatgttttcatttctgcccttcacctgtaaaataatttgttgtaaagccccttcccacagggatattattaataattgcgtaacgtgttcacctctcggaaaggagcaaaactttgctcagatcccagaattaacctgatttttttttttttttctgagacagaattttgctctcattgcccaggctagagtgcaatggtgcgatctcagctcaccacaacctccgcctccgggttcaagcgattctcctacctcagcctcccaagtagctggaattacatgcatgtgccaccatgcctggctaattttacatttttagtagagacagggtttctccatgttggtcaggctggtcttgaactctcgacctcaggtgagccgcccgcctcagcctcccaaagtgctgggattacaggcatgagccaccatgcccagcagacctgaattattattattaaaatgttacatcaacatgtacaaatataaaactacatctaaactctaagtacagacttcttatgcttaaaactcttacacagtgttaaccccaagacagatttgcaattaagtagttaaaataagacaacaaagtcaataa

SEQ ID NO: 9271 - DNA, 2869 bp, Homo sapiens
ggactgcccagtggaggaggggcgatgtggctggggagctagggagagactctggaggtggtgggtctctcgggagacccctaatgaggaagttgaggtaatgcttaacattgttgctgtgagaatttactgccctatgtttcccagagccattttggctcaattcaagtctattcaattcaagttaactctagcccagcccagatcaactcctcctacaaatattattggatgataggccctagaacccaataaaggagctccaaatgtcgttgggtggggaagcaaaatgtagagaaacatttaaagcacactgtaataataaatgcaattataaactatatggaggagggtgcagaggagggaatgtgtctggtgtgtgatgtgtgtgtgtgcagtgggggtatcacagagagtatgacatctgagttgagggtagcaggtgcctggagtctcaggtggctgctcacccatctgtgcaggtgtctctggggctgctggtctcacctgtggtctgcagtagacacaattggctgagcaggatatgtgatactgtgtggttggtgtggagttttgaagaaggggctgtgtttgggccacgtaggctctactcagagacctgaaaccacttcagaatggtgcatatgtcgaaagagctggctgggggccttgcccaaaccaactgaggtcttaaagtccagggaaaaaaagtctgggttccaactagaattctagaaatatttctagaacacacagagagggaataagtccctctatcacccttattaccaagccttgtggttccctgtgattttagataatgtctgatatttttctggctatttgcctagtaggatttaaaaaatattttcaaagtgaagctgagagagaatcttggaaacacacatacctgttgatcatgggccctgcagaattggcccttgggggctttatttggttacatgtgcctgggtggtctttaccagcttagactctatcatgggcccccatgaagctccattctcaatactgaataattattacttcccttgttgagtttctttttctgtcatgccctgggggcttctgctcttctcaccagaaagaacatttgaatctggattcttgtacacctgggttagaccctgttcagaggtgtggccaatttatcccgatctcctggaaggctgttgtgatttccatctaagaaatgagggtcttgagaatcaaccagtcccaagattagcctgttatcctgttatctactgagaccccaaatttctcaccaatgttttgggagatcctggaaaagatcccttcagtttggggtgtcaccaagacttctacacaacccaggactaccattgacctcagagctgtaccccacatcttgaagtaaattgatcccaccaggtcccacgtttgttatctctgcctaaatgttagcttctccatcctcaccacatgatgacctgctgtgtccctctgagcactacccagtggctgaaaactctgcaaatgggccacacttttgcaaaatacttgtatctgacacttaggtcttgtttgaagaatttcctttctggaaggttttacaagaagactgatagtctttcaagcccccacatcacaggcttagggacggcactaactttctcccagggatctaactggctagttcaaattatcactcttttaccttcatataaaatgtctcccccaaacctttttcccttctttgtcattgttatctgctaagcccctggtcatttccccatattcgtagtctttttttccatcctatctttctaatatttgttgtctttaacaaactgtgttctgtgtctgtgctcctccttccctctcagaccactggaatgcaagtccttcttccctttggaatgtactctggatcccttcccctgctttgacccccagactttgctccatctattattgcttctccatcctggatccttgacatttgtcaccccactggccttctcaggtgcaatcagtaaaaatgctgagaactcttggatcttaatcttcatgactgagttttttttagttgtatagttatcatctgcctttcttcactttgcatttcttcttgaatccattgcagattgacttccactcccactccttcactaaaagggctcttaccaagatcaaatctaatgggtacattttagttcctatgtgatttggcctttcgatgtcaatcatcactcccagccattgattttggtgacccacttccctgtgatgatcttctgatctagtttctcaggttccttcgctggtcctttttctttccctgcccctgacatattgacatttcctggagttggttttgtccttgattcattctcatgtcattctgcacacagtctctgcatgaactcaggcagacccttcatttaatgaccaccttagggctgatgattctcaaatctgtattccccgatcttgcatttgagctccagccccactcatcctctcggatgttctgcaggcccagcaaactcatcatgtccaaagtgaaactttttctctttcctgtctcctctcctctgatctgttctttcttggaacaccacccaagaacgtcacctcctccatcagattgtgagctcctggagggcaggagctgtgtccttctattcatcttcctatccccagaaccttgcacagatcctggaatgtggtaggtgctcagtaaatgtgtgttgaataaatgaatgaatgaatgaacaaatgaatgaatttgcttacttcaaggcaaaagaaccatgaaactgtattttgagtttctatgttatagcagtcagcaaatcctattaaatactttgtgtttccaagc

SEQ ID NO: 9272 - DNA, 504 bp, Homo sapiens
cctggctggaggtggctttctttaggcttcagatcccaggaagatgcaccttctgagctgccttgtgcaccctccccattaagcgtaggttaggaggtttccgggaggctgctcagctggatctggagccagctggctttgctccgttccctggctagtctgtgcctggtcaccagggaggctgagtgaggggctgtgaacagttgccggaagcaccccctccctccccggcccgtgcagcagtgtctgagctgtagtgaaagtttcagggcctgcaaaagaagaggcttgggcacaggactgaccatggctccaggggtttaggaccccagacctgtgaaggtgggagcagctcaccaccttcacgcaggctttgtatgttctctgagccttagttgattttggcccccaaaccaaatccaaaggttctggcccaccttgtcagaggcttccaccctgctcacatgttgggaatccctggaataaaatgcttgttcagtgtga

SEQ ID NO: 9273 - DNA, 110 bp, Homo sapiens
gaaggatgaaaataccttccaaaggctcttccaagggcatgtggaaatcctatgaccttggagtgcagagaggagaactgaaaataaaactggaaagatgttccaactgc

SEQ ID NO: 9274 - DNA, 856 bp, Homo sapiens
ccctgcaaggagcagagtgtgttcaccttgagtctccagcccacagccaaggtggacgtacctctccaggagcctttgccttaatgtatctctgcctggacaacttgtggtggggggtggggggaagagtgggagggggagttaaatccagtcttatgaagtattgttattaaatgtctttttaaaaagagaaatataaacatatatttttactattaaaatattcagttttttaaatgaagtagaacttgagttcatgttttatatgaaatatttaccaaaaaaaaaaaatgaggtaaactgtatttaaaacctttgacttgagtctgctggtaaagcttctgaatattgagtttgctgagaaataaaaatcaaaacttctttaagctggtaaagtgaggggcccaccagcagtgatctcctgatgccttactggaaactttgtttacttgtctgctaccctctgatttgtttttagttagtttttattgtgagcacacatagtacctagttacatcttaagatcaggtttataaaactgtggagtggagcggtatggtatggaatgacttggaatgtaagctgtcagggagaaaatgttgttacacttttgctaagatctgggggtttcttcatattcctgctgttggaagcagttgaccagaaatgcttgccagtactgccaaagcactgctgtgaaatgtgaagtactttgtttttttatttttaatgattttctttttgttattaatatttttctctgttcctttgttattacttgcatggtttggcgtcagaagtccttacctctttatattgtttgcaggtttaaataaaacagtgtggtgccattttg

SEQ ID NO: 9275 - DNA, 54 bp, Homo sapiens
gcagcggcacggtgcttccccccagtcccccaaataaacagcgcgttagctttc

SEQ ID NO: 9276 - DNA, 535 bp, Homo sapiens
agccgcagtagaacttgagctgaaaacccagatggtgttaactggccgccccactttccggcataactttttagaaaacagaaatgcccttgatggtggaaaaaagaaaacaaccacccccccactgcccaaaaaaaaaagccctgccctgttgctcgtgggtgctgtgtttactctcccgtgtgccttcgcgtccgggttgggagcttgctgtgtctaacctccaactgctgtgctgtctgctagggtcacctcctgtttgtgaaaggggaccttcttgttcgggggtgggaagtggcgaccgtgacctgagaaggaaagaaagatcctctgctgacccctggagcagctctcgagaactacctgttggtattgtccacaagctctcccgagcgccccatcttgtgccatgttttaagtcttcatggatgttctgcatgtcatggggactaaaactcacccaacagatctttccagaggtccatggtggaagacgataaccctgtgaaatactttataaaatgtcttaatgttc

SEQ ID NO: 9277 - DNA, 2208 bp, Homo sapiens
gttgggcaaaagcttgggtaggacaagaacttccatacaaatttgagatagatctcgcctgtcttaaagctgccatttgctcattctacccactctggctgccgttgtcctgtcctgcttctgcgccagagtgtttaataagcactcccttcctgctgtgttatagaactgtaggggaggccatggaaatgactctaaagatacaaaattttgaagaggtttgtcagacaataggatagatgttaggaggagacacacctcttgtctgagaacctaggccccaggtatcactgcactttaagaaactggaggctgcaacaggagggaaaggcagaatgatatcacagcagtactatttttttttttcagaacatttgttttgatggctgttagtccccctctcttggagcattttggggcactaatcttgttctcttgtgtcccagcttttagacctcttacttccactgctagtagctagcacttactgagcacctgcgatgaggtaaagactcagctaagggttttacaggaagtagattaattgatcctgtcaccaaccatatgaagtaggcactgttaccatctgcatctccagatgagcaccctgaggtttagagagattaaatcacttgcccaaggtgaaccagctggtaaaaggtgatgccaggtcttgaagacaggtccaccttcaaaatctattctctttaccattatgctcgatggtttgtttgttttataatttatgtatatgtattatcctctcaactagattgtaagcacttggaggtgtgacttacaggtctttgtatctcacacagtgccttgctaataggtgctcaataaatatttatatgagtgaatgacttttctacttaccaaattctctccattcagaacacctcttggatttgcatactttctctgaattcacagcccagcctatacttttatcatccccagctcccactcctggcagcagtagctttctaattccagttcttcctgctttattgaagagggatgtgctaagctgtggtacagtaacaagcccgcagagagctatgtctcccttaaaacctgacgggaaccattctgtcttattctatcctcattatttggaacatctggcttccaaagtcaccacaagggcggaagagaaagctagaggaatttgtaggatattttcttagacccaggcttacatcacttctgtccacatctaataagccagaacccagcacctagaagctaggaaagtaaacaagcacctcgaaagttggttaataccaagaacctctctcacagttatattttgcatactactgttaagccagtctttgcaaatgaccccttcctgcccatcactgccttcctcaagacctaaaatagctccctatttagtgaaaaattatctgaatatttaaggtctgccttaacgtgatccccattgctgaattttacctcctgactccaaaaactcttctcttccctgggcccagtcctatttttttttttttttttttttttgtgagacagagtctcactctgtcacccaggttggaatgcaatggcacaatctccgctcactgcaagctccgcctcccgggttcacgccattctcctgcctcagcctcccgaatagctgggactacaggtgcccgccaacacgcccggctaattttttgtatttttagtagagacggggtttcaccgtgttagccaggatggtctcaatctcctgacctcgtgatccgcccgcctcggcctcccaaagtgctgggattacagacgtaagtcaccgtgcccggcctatatttttattttattaaaggttaggcactagatgaccttgactctaggcatctgcattctcttgatctttgcttagggtgaagctcagaaaaggacttggttctgaaaggctgtctggaattagattgtcctacgtgattcccagtgaattgagatgaatttcctctggaagttcaagtcggattcgagaagctgaattaccaaacagaccctccccaacctactaacgaccctattactctgttcaccctagagcagacgaacggcagggaagacttgatctgtggacttttgaaagcaacttgaggaaaaacacataacagaatctataggtgtggacaatatgtgatattgctaaataatgtcaagtaggaaataaaagagactattgac

SEQ ID NO: 9278 - DNA, 1173 bp, Homo sapiens
gagtgatctggtggccagaacaggattttgcacggccccttttatcctgcgcatgtggcctagggtcatccccagcccatccctgtgtcagccctgagtgctggacactgcgttccagaaatgaggaagaggagagagaagagatggacagacctcagatccattaaagtgttctcacttccctgagacttggttctgggtccttaaaaccaggtttcctaggctgggaccctgtacatagttggtgtttaatgagtgtttatggagaggagagttctaaggtcacctctggctgcaggcatccagggattattccagcaatctgcaggtagggagtgggtcccagcctgggagcctgctgtcaggagcaggcagacctggactcacagcctggctgtgatgcttgttcgctcagcttctccatttatgagatggggagaatagtcacagcctcctcaaagggttgtgaaaatcaaatgtgataatttgtggaaagcccttagcagtggcctggcacaaaacaaatgctcagtggatggaagctgcctattattattgtcgttgttgttgtttgccatgactgctctgggccgggggtagagctagcatccgggcatgtacgagggaagagggaggcaggcctctattcaaaggcagaaattcctttaagattgtggtctgctgggtttcagggagtgtctgtgttgtttgtttttgtttgtttgtttgttttgagacagggtctcgctctgtcacccaggctggagtgtagtggtgcagtcttggctcactgcaacctccacctcctgggctcaagcgattctcatgcctcagcctcccgagtagctgggactacaggtgtgtgccactatgcctggctaatttttgtattttttgtagagacggggttttgccatgttgcccaggctggaagtgtctatgtttaactgcatcttataaaccagcaacaagttttctactgggaattagaatggtgcatacacaatgtattattatcactgtcagatgagcatgcttgaatgtagcatgactgcctctttttgcttttcctagaggttttttttttgcttgttactcatctgttgacctacctgggggaagtagcacccttgcatttcaaaaataaaattgatggcattacaaatggaatag

SEQ ID NO: 9279 - DNA, 2027 bp, Homo sapiens
gacacgtccaaaggagtgcatggccacagccacctccacccccaagaaacctccatcctgccaggagcagcctccaagaaacttttaaaaaatagatttgcaaaaagtgaacagattgctacacacacacacacacacacacacacacacacacacagccattcatctgggctggcagaggggacagagttcagggaggggctgagtctggctaggggccgagtccaggagccccagccagcccttcccaggccagcgaggcgaggctgcctctgggtgagtggctgacagagcaggtctgcaggccaccagctgctggatgtcaccaagaaggggctcgagtgcccctgcaggggagggtccaatctccggtgtgagcccacctcgtcccgttctccattctgctttcttgccacacagtgggccggccccaggctcccctggtctcctccccgtagccactctctgcccactacctatgcttctagaaagcccctcacctcaggaccccagagggaccagctggggggcaggggggagagggggtaatggaggccaagcctgcagctttctggaaattcttccctgggggtcccaggatcccctgctactccactgacctggaagagctgggtaccaggccacccactgtggggcaagcctgagtggtgaggggccactgggccccattctccctccatggcaggaaggcgggggatttcaagtttagggattgggtcgtggtggagaatctgagggcactctctgccagctccacagggtgggatgagcctctccttgccccagtcctggttcagtgggaatgcagtgggtggggctgtacacaccctccagcacagactgttccctccaaggtcctcttaggtcccgggaggaacgtggttcagagactggcagccagggagcccggggcagagctcagaggagtctgggaaggggcgtgtccctcctcttcctgtagtgcccctcccatggcccagcagcttggctgagccccctctcctgaagcagtgtcgccgtccctctgccttgcacaaaaagcacaagcattccttagcagctcaggcgcagccctagtgggagcccagcacactgcttctcggaggccaggccctcctgctggctgaggcttgggcccagtagccccaatatggtggccctggggaagaggccttgggggtctgctctgtgcctgggatcagtggggccccaaagcccagcccggctgaccaacattcaaaagcacaaaccctggggactctgcttggctgtcccctccatctggggatggagaatgccagcccaaagctggagccaatggtgagggctgagagggctgtggctgggtggtcagcagaaacccccaggaggagagagatgctgctcccgcctgattggggcctcacccagaaggaacccggtcccaggccgcatggcccctccaggaacattcccacataatacattccatcacagccagcccagctccactcagggctggcccggggagtccccgtgtgccccaagaggctagccccagggtgagcagggccctcagaggaaaggcagtatggcggaggccatgggggcccctcggcattcacacacagcctggcctcccctgcggagctgcatggacgcctggctccaggctccaggctgactgggggcctctgcctccaggagggcatcagctttccctggctcagggatcttctccctcccctcacccgctgcccagccctcccagctggtgtcactctgcctctaaggccaaggcctcaggagagcatcaccaccacacccctgccggccttggccttggggccagactggctgcacagcccaaccaggaggggtctgcctcccacgctgggacacagaccggccgcatgtctgcatggcagaagcgtctcccttggccacggcctgggagggtggttcctgttctcagcatccactaatattcagtcctgtatattttaataaaataaacttgacaaagg

SEQ ID NO: 9280 - DNA, 173 bp, Homo sapiens
tggctcctgcacaggccctgcacataggatgagggcatctgctcccactcagcctagcccagggaaaggcccagtgacaggtgtggacaggtgccagccctgcaagccgcctcttctcggtagaagggagaaggacagagctctcttcaataaattcgtcaggtcaaagcagc

SEQ ID NO: 9281 - DNA, 146 bp, Homo sapiens
tcaggattaagaaaacttactgtttgggaactccatatacaagggagcccttcactgttgatacaaagaaatcatactgttcaggcttttttgtactttagtgtcacttcattttattgctattaaataaaaaatttgtaaaaggc

SEQ ID NO: 9282 - DNA, 86 bp, Homo sapiens
gacgggagtcttactttgttgcccaggctggtctcaaactcctggcttcaagcaatccttccactttggccttccaaagtgctggg

SEQ ID NO: 9283 - DNA, 2803 bp, Homo sapiens
gctacctcgactttggacagagtaatgactccccagaaaacgtcatataagactttaccagcccctgagaggaccaggaggagcatccttgaccttcatttaacttggctcacttctcttcagacttgggtagaagtgcagagccacagaattgctttccttccccgcctttgacatgaggccttcagtaaagagctacagaacatgagtacattgttataccacagatttttcttgcattagggcacagtgttaaattttttggaggtaaatatactatttataatcactatatatagtaggagggggtatgtgtctcaggcttttctgaagttgcaagacttaaagaaataatccatctgcatcccaagtcctattttataaggatattcataaaaattccatggtgaatccttgtctgaaataggtcctcccttcccagtttctgtgtaagtctttgcatttaagacatccaatcaataatgaaggaaatttttttctgaatgtaggtttgagtgaggggcacctctgctttcccttagcaaccctcatatacctccctgcaccgttacgctgtgatggcaactggggatagaaaaaaaatggggaaagacaggaatcctaaaagggagagttattactggccacaagccctgtattctcaacagggatgcaaattggttcttcagtaaggataaaaaaaaatcacaagcagttgtttgtggccctcctaaggcccacagcacatatagtgtgtctgtgatattccattttcatggcagggagtgatcaggaagaaggcttcctaggggactggcgatttaaaccagttgagaaacactgccatcagcaggcagtttcagactcactcaagttgtctcttgacagtcacttctaaatgggttctaatgtgacaatggcctccaaaactacagccttccctgaagtttaagctgtgaccttagattttagaaggacagtggggctgtacctagaatagtggttctcgaagaatgcggcctgcagatcctgggagtcccaagaccctttcagggaggatctgtgaggtcaactgttggcactgtggcatgaatcaaggtggtggcagcaaacttctagtagttttgatatgtccttgatagaacaaatagcaatggttaactattaaatgttgacctagccagcgcagtggctcatgcctgtaatcccagcactttgggaggctgaggcgggcggatcacctgaggtcgggagttcgaggccagcctgaccaacatggagaaaccccgtctcttctaaaaatacaaaattagctgggcatggtggtgcatgcctgtaattccagctactcgggaggctgaggcaagagaatcgcttgaatccggtaggtggaggttgcagtgagccgagatcataccattgcactccagcccaggcaacaagagtgaaaccctgtctcaaaaagaaaaaaaaagttgaccttgagaatttataatattctgagaaaactggaagcatgcataaagcccctctgctgtgcactgaagtatgggtgccttgaggaaaagcagttacacagttgagttgcaagctgaattggctgtgttcaaggcatgccctttagaattgaaagaactagcagattacggtatttagacttgaatatttggctgatattttctggaaattaatggaatgagcctctcacctcaagggaaacaactgatagtgttgccagtgataaagctttcaagcaaaaattggaatttccgaaaatctgtactccaccatgagctttattgttggggatattaacaaatgtgatttgtataatgaaatgcatttcatttggaagaattcaatgaaccatttttccaagtgaccagtacgtgatgttacaaaatcatgcatggctcaaagattgattcaaaagtgtaagacaggccagtggattttaatgtattaacaatataagagtgcattaagttttcggagtctacattgcctttaagaaactatgacttgtagtaagccgggcgcggtggctcacgcctgtaatcccaacactttgggaggccaaggtgggtggatcacaaggtcaggagttcaagaccagcctggccaatatggtgaaagtccgtctctactaaaattacaaaaattagccgggcgtggtggcagatcccttgtagtcccagctactcgggaggctgaggcaggagaatagcttgaacccgggaggtggaggttgcagtgagtcgagatcgtgccactggactccagcctgggtgacagagcgagactccatttcaaaaaaaaaaaaaaaaaaaaaaaatcacttgtagtcttggtgtggtatcaaagaatagccacaattagctgaaaaggctattttaaaaacttttccaactgcgtatctgtgtgaagtcaacttacttcaacaaaaaagtttggatgtagaagcagctgtaagaattcaactgtttattataacaagatactaaagagactgtaaaatgccacccttctccttggattgttttggaagttattcttcataaaaaatgttaacgtgggctgggcatggtggctcatgcctgtaatcccagcactctgggaggctgaggtgggcggatcacttgagctcaggaattcaaggtcagcctgggcaacatggctaaactctgtctctattaagaaaaaaaatgttaacattatgatttaaaagtgcattaaccttaatctagataataaaagctttttggggcaacctccagaactgtgaaaaataaatttgttattt

SEQ ID NO: 9284 - DNA, 40 bp, Homo sapiens
tgtaaagaccattaaaaaaaaaacagaggaaggtatttct

SEQ ID NO: 9285 - DNA, 2185 bp, Homo sapiens
gttcactatggagaagtcagcagcaggaggcccatcccttactcagttgccgggacatccccagtctcgggggaagaagatgccatgggcttatacccaggctgtagccaactaccaacgtgcctgtttgtttgttgctctttccttctctccatcatagtctgggtgccagcgccctgaagctccgtgctcaactgattaaactttactgccctatggtgaccatctaggagaggggagggcagagggggtgagggtactattctggattgagaaaacctatatccattctttatatcaatgtatagttttagtctcctaaattgatctgttattttccaaactattctcttgtagaaaattttccagtgggcacttaatggtgcccttgaagaacttcctaatccatgtacataaaatacatcatatgtacacttataaatgtatatagaatgctcaaaaataaaattcttaataatagaactggcaaaatatttgagtgtccactagatgagtatcagacctagtccttacccttagggggatgcagtcctggttgttatccaggatacacacctgtcagtataaggcagaagatgcctaagggccaagatggtttgcctcggaggagaatggaagagagagattgctgactggacattcagatgcaagactgggtcctgcttaaatcccaggattctgctggagggagctgatagtgatacttgtcccttctgtacattgcttcatgtagccttctcagcatccctaggagaaacttactattgtgactctcatgttggaggaggaaacggacacccaaggtagaggaacttgcaaaagggcagccggcaaactgtcaggggtggcctgagcctggcaatctgcctccagagtctgctctcggccattgtgctatgtgctacctggataggtcatacaggctcagcagtgggtggagagcagtgctcagatttgtccatctccacagaatgcagcacacacacaaatgtacaagttcttcccctaacctcagaggaataggggaattaactttgcttgcaatttggaacaatattatagatgttgatccaagtagttctgttactggctggtcctggatctctgccagaacacccgtcatcattgactggctaaatagagatcttggatataggccagaagcagtgaagtatataattggaaattgctcctgataataacttccttcttagccaaaaaccacacaaaacaaaaataatcccctccccacaggaatatgctttccaaattgtgtccaaaacattacctgctctgttatattgagaaggttagagacttcagagcatgcttagaaaaagcagtggtgccacaggtgagactccacactctgtcttgctggggctgaagcctccatcactttcccaggccaggttagtgctgggcttcttgctttccttctattcctgagagtagaactggctaagcccattccttccctcagtcagccccacttctctatagtgggttctgggggtggggggctgaattaccagtaaaactagaaagattgggaccaagtgcagtggcccacacctgtaaatcctagcgctttgaaaggaagaggcaggaggattgcttgaagtcaggagttcaagaccagcctgggcaaaatagaaccccatctttaaaaaaaaagtttaaaaattagccaggtacggaggtgtgtgcctgtaatcccagctactcagaaggctgaggtgggataatcacttgagcccaggagtttgaggctgcagtgagctgtgatcacactactgcattccagccaggacaacagagtgagatcctatctcttaaacaaaaaaaaaaactggcgagttcaataccaacttctacaatgaaatccccttccccccacaaccctgcttctcctaagtttccctcattacatggttgctgtgggctatgtgtgctgtggtctgaatgtttgtgtctaaaattcacatgttggtattaagagatagggcctttgggaggtgattaggttatgagggcagatccctcgtgaatgggattagtgctcttataaaagaggcctgaggaagcttgttcgttcctcttgcccttctgccatgtaaggatgcaatgagaaggcaccatctgtgagcaaggagcccctcac

SEQ ID NO: 9286 - DNA, 320 bp, Homo sapiens
gccagcccatggtgttgtgtacactgtggagtcgacaggggcctacaacaggcaggtactgctgccagggggctctgaactagtgcctgctacccaggacacccgggccatgcccctggctgggcagcctggcacaagtgaagaagaaggcagtgggaaaactgggtttatctcaaggcagcagcctgagcccaggagcagaggacccagttgttataaggcgctgggagaggatgggcagctcccactgccccagagcggagctcgaagcacccaggttgcccacggaaaatccaataaaaagacaccagtgtgaatcc

SEQ ID NO: 9287 - DNA, 2372 bp, Homo sapiens
caggagggcccggggccccctgcccaccctgcgggggcctccccagtgggcccacatgaagagagggaacctgttagtccagaaaggatacggatagatagcctgtctgactgaacagccagatggcccccagcctatgggggatctggcctctgccagggacctctgagtagctctgaggtggcactgtccagccctggatagggggggcagtgggccagctaccgtaagcaaaggctgttttttactgagagaatttctaaagtaggctcatcacttttttttaaatatcattttgggaagggaagacagggttaaggaactttatttaaaaaaaaaatatttttttcctaaaaactataaaagaggaagggtttcttgtcccgggaagcaacggacataatctgttcccagccatggccttccagcttgtgtccctgattcagggagctctcccttcctcctcctcctcctcctccggaggtgggatcccagagcctgccagtggaggcttatctgttgggaggaagacagctcttcacagaagcaaagaacaaaatggcatggagatcagctgcctgagcacctgcgctgtagcttatctgacaacgctgaggccacgagctcctgggtagctgtgatcagggacatgataatctgagctatgcagaggagcacatctgttgtcaactgctgtacccagaaatctagaactctgccgacagcctctcctggtgagtcgggactcagctgaggacacatccccaccctgcctcccatctggccctttggacaactggccctttgtgacagggctgactcaagtgttaggcagggtctcaggcctttgattgctcacccctgctccccaggccctgccctcacttttaccaaaggttctccctcggcgggagggcatctgtgttggaggtgatttgtctgggttcttccttttggttccagaaggaactgtcagtcatcagcatctgcgttgttagcagtcagtaccacccccgccccacaatgacagtcaaggctgacttgttgactgaagcctttttcccagaccccttatttcgaatccccaagcttcagtccctcttgggggtggagacaagaggacatgtgggaagccacggaagcaggttctttatgtcctctcctctgtggctggcaaggctcacctggccttatccacccacttatggaacctcaggagaggagggctcctcctaaaggcatgcagcttgcagcccctctttctcacacgtgtgatcctagcgtgagaggtcatcctgcccttgctgaagttagtagtactgtactaagagctctgccctcatgtgaattcctgccctggcgcctcttccctggggctgaatcaggccctgctgcaaaactccaggcttcccagggttggggaggctgtgggaccaaggtccatgttggtccttccactgggtgcagcaggagctgggtcccgagagcctggcaggtgaaactctgcaggccttccgcctgattattatttattcactcctttcctcaccccaagtgccctgctctccaggtgcctagagtatcctaactcttaggaccagggattgtcttgcaccaagtatgcctacccctggccagtctgaggtctcctagccatagaactgactcctggaagcctggagagaaggtggtgacacccatgggttctcaactgtaaggaaaaaagacaccagacttttgttccctagtgggggaaagcccttagtcttgtacaggagcagcttgctcccaagtccttttggaagctggcagagctatattcctgacagccctgactgccaggtagagcaaaagacattggtgggggtatgtgaagcaaaaggggcaggtgcacacacctccacagtgacctctgtgcacacggttaccaccaactggctggccctcctcctcttccctggcccattgatcatcccttctcacagagggtcatcattatttccaaatattgtttgtctgatgacttcctcttcccagtgcaatttttcccttcctatttcaacctctggttcctgggatgagccataccctggaactggcccacccactgtgtcttccacgtaagggagacctttgcaaagggcatccaaatgggtaggcaggtgacagccgccgtatttattttgcataatattttaatttgtatatttttgtgatttattttggcgttatgagtttgactctcggggagttttgttgttatgactcttgtgtcttttgtcacaaaacaatgatatttgctaaacgatatatggaatttatttttgattggtaataaaaaatcaaatatgtataaatcctggtgaatctac

SEQ ID NO: 9288 - DNA, 2767 bp, Homo sapiens
cggctcactaggcagccccagatctggggaacagatgagcacgtggggagctggagtgagctgagcagaagttttgtgcccgcctgcccccatcccctccaggccacgttttagatggcccttgtagttgcgggtcctgggtgtcctcagaactagacatcaatgcctggatccttcagccggccctgccctcctttaggagacaggagtcaccagggcacagccctccaggcccgcctcaggaaggaatgaaaggaatgccatcatctctagttcccagggcccagccttccccttctcccccggggcagggacagtgcggcatattcagattcagacctctttgggctgagccaccttgtgagtgcagttactgcctttgtgtggccgtgacctctatttgtttgcttttaatttgccaacctatcgctgctggcagcactttttgagcaagccgagagcacccattttggctgggggttcagatcgatggccttgtccatgttgtcctttctggcttccctgatggtgtcatgtttcagcgcatgcgccccagcctttcccatgtgccaaaccagaagctccactgcccgtaggctgtccctgtagccctgctccctccctggaggctgctcttctgattctgagagctggcctagtggtgctgagggcccctttctgcttctctgcccacctgctgagttgccactcgcagtgttgtcagttcccgtgttctgagaagaggtcatgcctgggaggaagggatcgtcatgctgcatcgaatcctctctccgccgtgtggcccccaggagagtagctgcctgttgcacctgctccacacctccccacagcctccctgcaggtgctgtgtggccgtgatgtgcagagagcagtgagggagggttcatgaaccaggtggatcctctttaaaaaaaaaaaagtttttgttatatctctagaacatttcaagtcttttcctttttttctgttcctagctatggggttttagagaagtgggaacaggaaggcatttgtctttttcttctagtttactacattttccttccgtagttcttcagctgtgtggaaacgggcatcacaaggacataggatcatagattgggtagggagggaggaggatttctggaacttttctcaaaggaatttggacccttataaatgggactgaaggtcaaaacaacagtgatatccttgcttagaaattgtcctcaaggaataaactctgagagcaagcccgggttggaaacagatgctttaaaatcctctctccagaacagtggttttttgtttgtttatttgagatggagtctcactctgtcacccaggctggagtgcagtggtgagatcttggctcactgcaacctccacctcccaggttcaagccattctcctgtctcagccccctgagtagctgggattacaggtgcccaccaccacacccggctaatttttgtatttttagtagagatggggtttcaccatgttggccaggctgatcttgaactcctgacctcaggtgatctgcctgccttggcctcccaaagtgctgggattataggtgtgagctaagatcagggattcttaaccttggctgcacaccagaatcacctggcaaattaaaaatacgtggacctgccaccagagcttgtgatttaatcagagtcggcatcagagttttcaattttttatttatttattattattattattattattattattattgagacaagatcttgctctgtcgcccagactggagtgcagtggtgtgatcacggcttgctgcagcctcgacctccctggttcaggccatcctgccacctcagcctcctgagtagtagggactacaggtaggcaccaccacacccagctaatacttttaatttttttttgtagagatagggtctcattatgttgcctggggtagtctcgaactcctaggctcaagcgatcctcctgcctcggcctcccaaagtgttgagattataggcgtgagccaccgtgcccagattcacagaagtttcatacacctttcacccaggttcccctaatgttaacagcttacatataaccttggtacatttatcaaaactaaaggtgcaatcatactaatagctagagtttatttggattttaccatttttcccaatgtcccttttctgctgcagcagccaatccaggatgccatactgcacttagagctgttgctttcttttttcctaactttatattttgaaataatttcagatgataggaagttgtaaaggtaagggccccacgcacccttcatctagtttccctccatggttacatcttatatggttgtaatgcagtattccaacaaagactctgacactggtgcgatgtgggtggacagtccaaatcatttgtcacatgtacatctgtgtaactaccactgcaatcaggataaagaagtcccatccccacaaggatctccctccccaccttccctaactcctggtaaccactaatcgttcatctcttcttattttgtcatttcaagaatgttgtataaatgggagcatagtgtgtaagcattcgggattgtcttttttcactcggcgtcattctcgggagatcatccaggcattgcatgtgtcaacagtttgctcctttttattgctgagtggtattccgtggtgtatgcattggccccctgaaggacacctgggatgtttccagtttggggctattccaaataaagctgctacgactattcatgtac

SEQ ID NO: 9289 - DNA, 122 bp, Homo sapiens
gtcaaccaatgttattttcaaactatctgaaatgcatttattttaacattgacacatgtaagggtcaatttttcatatttggaagctcaaacattccttgaatgaaaatattttgaaatgcc

SEQ ID NO: 9290 - DNA, 85 bp, Homo sapiens
gcacctgcactaaattactcaaaatgtgctgtaaagtttcttctttccagtaaagactagccattgcattggctccttctcccat

SEQ ID NO: 9291 - DNA, 362 bp, Homo sapiens
gctcccgctgcccaggggagccctccacgccggctcttccccaccctcagccccaccccaggtcctgcagtctggctgagccctgcttggttgtctccacacacagctgggctgtggtagggggtgtctcaggccacaccggccttgcattgcctgcctggccccctgtcctctctggctggggagcagggaggtccgggagggtgcggctgtgcagcctgtcctgggctggtggctcccggagggccctgagctgagggcattgcttacacggatgccttcccctgggccctgacattggagcctgggcatcctcaggtggtcaggcgtagatcaccagaataaacccagcttccctcttg

SEQ ID NO: 9292 - DNA, 596 bp, Homo sapiens
ggccgtctggtggcagctatgtttaagagaccagcgtccttccaggctgttcagacctcagcgttgacactgaaactggcccctccgcggaggtaaggccgccctccgcgccgcctatgcctgccctgtctgtagcaaagactcctctcccctccatccctgctgcctcccctacccgtttgacgacttggttctggctttttctgactgttctttatcctgttttccccctgcactcacaaaattgtattccatcttctggtagacgccccacccccagaagttttaacctgaaggatgactgtcacaggactttcaaattgtttagcagtcagcatagtcaggatccaagcccgcaatcttgttttaaattaattatcacatctaaattagagaatttgtcacccaatattaggactgaaattcagactcggtaacttgtctgagatctgcaagactgaacatcccctactgtatagtttcctgacattttcatttagcctttcctaattatttttgtctatagtctgttgtaggtaactctaattgagcccgaaaccagaataaaaactcttacattggaaacatttcaaaac

SEQ ID NO: 9293 - DNA, 1346 bp, Homo sapiens
aaatgcagcatctgtctcctgcttcacagggtcgactgtcagggtgaccgtatgtggccgcagctgtgtggcatggaacttggtcagggttgaattccagctctactcaccctttgaaagctgtgtgactgcctgagagaacctgtttcttcacctaaaaaatgggactttttgtctcagtcccagtgaagtgccaggtttgattgtgaagtccgcatgaaacactgcaccaggcagggctttgcaaagtgcaaggtatccccagtccaagtatatgaaaacgtgcacacaggactctcattacttttttatggaatctgcaaggtgtttttaggctttttaatctgattttcttataaatgaaagattatttagtcacctttctcctgtccaacttcaccaccacctgataatgggtatataacaggaagctgaaggtacaacatagtgactaaaattcagacttacacaagacagtttgaggcatatttcttaatctggtatcacctcgtgtgttctttggggccctagaaaccctggcttttgggagtgctatggcaagtagaagttctgccggatggaaagaggctgccccatttgaggtcatttaaaatctgtgaagcaaatccagactccttgccgttcagccactgtgaaaccagaatctgcttcacagaaaaaagcatctcagttaggagaagagacatcccctccttctcacttgccaaagagattcaaagacagcccctatcctccattcttgagtcagggccctaggtgacctattctaactcaaggaggagagctatgtacagggagagcattttagattgaaggttggaatggtgtactaaaccaaaaaagctgacaactgagagttttagaagattagaccattaggaacgtatctttgcaaactgcccattcacccatgaagaggaagcctcaagatcccttggaattgcatcccaaggcaaagcttttggctcaccgaaagctcacagattgcagaaattagcttttttaaaaaacaaaccccagtaaatataatttcattaacattttataacagatttatatttttgagttccgtgattgcaaattatgacctcaaattccatccttcacttatgtaacatgttgcaaattacccaaagatgagtctttcttctttctttcctttttcctttcttcttcctttccttttttctttcttcttccttctttcttcctttttctctctcctcttttcctcctcaaaatgtatatattttaaaagccttaactgttagttatgcctgcattcatatttgcacaggaaaaataaagacctggatttaaaaata

SEQ ID NO: 9294 - DNA, 73 bp, Homo sapiens
acacacggtttcctctaattagctgttacataataaatgtgggtaccctctagtgtcatatatgaattcttca

SEQ ID NO: 9295 - DNA, 65 bp, Homo sapiens
atatcattatgaaaaattaataagtcacaagaaaaacaaaagtgccagaacatgtccagccaccg

SEQ ID NO: 9296 - DNA, 208 bp, Homo sapiens
aaagtgagaagaagattcaatcgtaactgtgtcaacagtattgtgaagtgatcatttcttgtaaaacttgtaaataaactatcatctttgtagatatcttaaaggtgtaaagtttgcaaatttgaagaaatatatattaacactgtggtcaggtacattccttaaaactaattaaatgtacatttctataataaatattttttaaact

SEQ ID NO: 9297 - DNA, 629 bp, Homo sapiens
agcaatttgtacgtattaccaaagaaaccaaaaactgcctttgactaaggggggtgttgaaagagaacttaaccttattaggaaaccctgacaaaatgatggaagactattgccttattttgcactatttgtgaatcatcttacactgcatttttttatgatgcttattcaaaaggcagttgctttagggtgaaaaagccttccaagattcaaagcagatttctctggtattatattatatccttcttaaaaaccagagtttttaagtaacagtatttgaatggcatcaaaacattttcattttaatgtatttctttaacaagtggttaaaaaaagtgtccaagcagccgggcgcagtggctcacacctgtaatcccagcactttgggaggccaaggcgggtcaatcacctgaggtcaggagttcgcaaccagcctggccaatatggtgagaccccatctctactaaaaatgcaaaaagttagccaggcatggtggtgggcacctgtgatcccagctacctgggaggctgaggaaggagaatcgcttgaaccctggaggcggaggctgcactgagctgaggtcatgccattgtactccagcctgggcaacaagagcaaaactccgtctc

SEQ ID NO: 9298 - DNA, 69 bp, Homo sapiens
ttccaagtaaatgtcttaatacagtttcaattagaaaataaaatgtctcatacttgcacattgtatgtc

SEQ ID NO: 9299 - DNA, 1920 bp, Homo sapiens
tgccccagcagcttccgattggaaaatgcaaattgtttttatttaaagatggtgagaaagtgttttcattaaaatatgttttcaaaaccattttcaggccgggcacggtggctcacctgtaatcccagcactttgggaggccaaggcgggcagatcacctgaggtcaagagttcgagaccagcctgaccaacatggagaaacccccatctctactgaaaatacagaattagccaggcatggtggcacatgcctgtaacccagctactcgggaggctgaagcaggagaatcacttgaacccgggaggcagaggttgcagtgagctgagatggtgccactgtactccagcctgggtgataggatgagactccatctcaggggaaaaaaaaaaatttttttttcactgactaaacctgctgcagctctcttttactacagacttggagattttagtttaatttggtttaattctctgtcctttccctttcactgtttcactccaaaacatgtaagaatggcaatgtttgaacatctgcgtttgggtctactgccaccttagcaagcctcattaaccattttataaaaattgcgttagtattgttgttgttgtttttgagacagggtcttgctctgtcacccaagctggaatacagtggcatgatttcagttcactgcagcctcgacctcccaggctcaagtgatcctcccacctcagcctccagagtagctaggactacaggcagtgtgccaccacatccagctaattttttaaagttttttcatagagacagggactcactatgttgtccaagctggtctcaaactcctgggttcaagccatcctcccacctcagcctcccaaaatgctgggattacaggcatgagccactgtacccagccaaaattgttttcttttttaagtgaattcaacaatttctgtgagtggctctttgcatgaacactgtgcaaggtgttggagaaatccaaagctgaccaaaacatggtccccaccttttggagcttacagtctgttctggggaacagagattcagccaaagtcaagaaacactggatgccagctagattatctgttctgtgctttggtgtctataagtacatatgtggatatgggttcattttatccctaaacttagtaccaaaccagcatttaatatctaattataaatctaatttggcctaaactttattattgcacactgcctgaacaaaacctatttgtctctatgtaaattttttcctcatggaacaagggtgtgaaatgaaaatattttaggatttattcaaaaacagactattctgttttcagcttcagaattgttctttgaatcctaaggaacctctgtcaacagttgaggttgctgttgaaaagaaagaagaaggaggcggaaatctctcagggagaattatttcctttcttttctattttagatacctggaggggtggggagaagtaagaattgtaagggaggttcagtagtggggaattctgtgacagctgattgaagatgatgatgaagaacctctgcattctagttaccctttgcttcccttcacctcttgtaaaatttggcttggcaacaatgacattgtcatgcttattgtcccaatatccatcctgtcgtagatcttaatgtttttgatcgttgcgttaaagtggaagtgccacccacagtgaaaccagatcccattaataaataagcttaaaggcaactgcagttttaattccatagttattgaatatccagtgtgtgtaaggcctggaggggagccaaaggacactaacttctaagagctccgtctagttggagagaaacctgtgtgccacaacatacagtgtccttgcttatgtggggtcgaagacatctgtgaaaataaaagcagcctctgctaatttagcgcc

SEQ ID NO: 9300 - DNA, 849 bp, Homo sapiens
ttttttcacatggagcaggaactggagtaaatgcaatactgtgttgtaatatcccaacaaaaatcagacaaaaaatggaacagacgtatttggacactgatggacttaagtatggaaggaagaaaaataggtgtataaaatgttttccatgagaaaccaagaaacttacactggtttgacagtggtcagttacatgtccccacagttccaatgtgcctgttcactcacctctcccttccccaacccttctctacttggctgctgttttaaagtttgcccttccccaaatttggatttttattacagatctaaagctctttcgattttatactgattaaatcagtactgcagtatttgattaaccaagcttctgcagattttgtgattcttgggacttttttgacgtaagaaatacttctttatttatgcatattcttcccacagtgatttttccagcattcttctgccatatgcctttagggcttttataaaatagaaaattaggcattctgatatttctttagctgctttgtgtgaaaccatggtgtaaaagcacagctggctgctttttactgcttgtgtagtcacgagtccattgtaatcatcacaattctaaaccaaactaccaataaagaaaacagacatccaccagtaagcaagctctgttaggcttccatgttagtgtagcttctctcccacaagttgtcctcctaggacaagaattatcttacaaactaaactatcatcacactaccttgtatgccagcacctggtaacagtagagatttttatacattaatcttgatctgttttaatcttgatctgttttagtagagatttttatacatt

SEQ ID NO: 9301 - DNA, 16 bp, Homo sapiens
aagaaagctggatctg

SEQ ID NO: 9302 - DNA, 243 bp, Homo sapiens
ggctacagcttctatcacatgccgaactttcttgtgacaaattgtctggattttttaaaaaaggaaaaagcaagaatgaatccttgtggtttttagttttgtataaattatgtttcaaatctttacattttggaaataatcattgctggagattctgttaaatattttggaactctttttttttttaaattatagtatttcctctaaaaaaaattaaaaccagccatttgtatggcaaatgtc

SEQ ID NO: 9303 - DNA, 1243 bp, Homo sapiens
tgccccggcactgaagtcgggacacaatcagctttaaccaatggatgaggggggtggccacaggagatggggagaggagtctgaactaaacccctggcttttgtgcacactgcatacgtttcagaactcctggatggtaaccatctctggagtgcagcgcttgctgcagtggaaatgatcaggaatactgaccgtgtttctcttgcctccgaggttcttgggcacactctatagccatactggacaggaaccaggtgccccgtgtaggcatcgtcggtcggtttgccgtcagagatggcgcatctcgctgcatcccccgagagtacaccggttgctctagccacctgcggcccgcccatctgcgctagctggccttcacgctcttgatcgtctttcctttgtattggagaaggactgggtcagagatctgttggagagagagaataaagagattatttttcattatttttaaatggttgtttttgttttaatttgcacagctacacagaggaaataacttaggcactttctgttttttttaaaaaaataataaggtctcatggcttcatttagagaccacagtaacaacagcagcccaccaatcagagaagctggttgttattaaccaagctacagattcacactttctggcctaaaccctaatgggatgaggcttttcaccccaggccatgctggtggtgattttttagcccctaaataaaacactggactatttcctgtttacttcattgattgcaactacaaaggtggactcaaagcaaagcacaatcatgccagccaacattccagaattctgctgagaactccaagtctgtgaggggagaggttttacaagccagacaggcctgggggactgcagtccccaaggagaccctgccacatgctggccctttgagtgagaatgctgcatctttctacatatcttcatgagaatactgagaattggattttccttttcaaaatgcactttgctttttttgtatgttttgttatgttgagatgtttctaaagaaaagattttatgtaattataagatgaagcgtagtgaattgtacagctgttgtaataatgacctatttctatataaaataaaattgtatggcttatgtgtaaattattttgtatctgagataccagttccttttcccaaatataaaagtataaaagttttcttgtgtttttctgtgagtgaaaattttgtaataaattaacaaatttgtac

SEQ ID NO: 9304 - DNA, 42 bp, Homo sapiens
tcgctgatcgtcagatcaaataaagttataaaattgccttca

SEQ ID NO: 9305 - DNA, 902 bp, Homo sapiens
tacctcatcagaaccatcccatccattcactgttcagctgtactgtgatttagtttttacaccgttaaaaccctgagtggattgcttggtttaatgcatataaacagtactttatctacttaaagcaaagttttgctttcttgaatgactttttctgtgagatgaatttttgataagaactagggaaaacatgtcttttaggtgtcttgctgatgactatccataggaggaatggctatcccaaaaaaagttccgcaaaaaagtagatgagtttcttttttttttaagcactaaagaacaaaatgcatttttcattaatacaggcttctgatgaaccaggaatcctgttttcgtaaagttccaatgttgatgagagtaaattcttaagcatttgtcctagaggtgaaagcagctgaatgtttctgaaccatcaagaggcaaacaaacaggagtttgtttcttgaacctgcttatgcacacagctcttaactcctcatgaggcacacagctcttaactcctgatgaaccaaggatttactcataactttctccttgtcatggaggcttaatagacaacagaataaatgcatttcttgggcctcttataaacttgggaattcttagaaagctgcttctattaccaggctgtaatagctggtatagttttttttttttctcttaagatgttctgttattagtctgagacagccatttttttgttttaaggaaaaatatcagtcagtgctccgggaggtaatttcctgtggggtctgcaccctcctgtctgggtggtggatgtgggtttgagaagtaggagagcagggtggtaccgtgtgggctcttaccctttatgtgattttggacaacagtgccttccattaaagttctttttatcaactgtt

SEQ ID NO: 9306 - DNA, 3440 bp, Homo sapiens
aagcagtgtgatccagggattactggcctccagagtcttcaagatcctgagaacttggaattccttgtaactggagctcggagctgcaccgagggcaaccaggacagctgtgtgtgcagacctcatgtgttgggttctctcccctccttcctgttcctcttatataccagtttatccccattctttttttttttcttactccaaaataaatcaaggctgcaatgcagctggtgctgttcagattctaccatcaggtgctataagtgtttgggattgagcatcatactggaaagcaaacacctttcctccagctccagaattccttgtctctgaatgactctgtcttgtgggtgtctgacagtggcgacgatgaacatgccgttggttttattggcagtgggcacaaggaggtgagaagtggtggtaaaaggagcggagtgctgaagcagagagcagatttaatatagtaacattaacagtgtatttaattgacatttcttttttgtaatgtgacgatatgtggacaaagaagaagatgcaggtttaagaagttaatatttataaaatgtgaaagacacagttactaggataacttttttgtgggtggggcttgggagatggggtggggtgggttaaggggtcccattttgtttctttggatttggggtgggggtcctggccaagaactcagtcatttttctgtgtaccaggttgcctaaatcatgtgcagatggttctaaaaaaaaaaaaaaaaaaaaaaaaaaaaggaaaaaaaaaaagaaaaagaaaacgtgtgcattttgtataatggccagaactttgtcgtgtgacagtattagcactgcctcagttaaaggtttaatttttgtttaaacctagacgtgcaacaaaagttttaccacagtctgcacttgcagaagaaagaaaaaaattcaaaccacatgtttattttttttttgcctacctcattgttcttaatgcattgagaggtgatttagtttatatgtttttggaagaaaccattaatgtttaatttaatcttaataccaaaacgaccagattgaagtttgacttttattgtcacaaatcagcaggcacaagaactgtccatgaagatgggaaatagccttaaggctgatgcagtttacttacaagtttagaaaccagaatgctttgtttttaccagattcaccattagaggttgatggggcaactgcagcccatgacacaagatctcattgttctcgatgtagaggggttggtagcagacaggtggttacattagaatagtcacacaaactgttcagtgttgcaggaaccttttcttgggggtgggggagtttcccttttctaaaaatgcaatgcactaaaactattttaagaatgtagttaattctgcttattcataaagtgggcatcttctgtgttttaggtgtaatatcgaagtcctggcttttctcgttttctcacttgctctcttgttctctgtttttttaaaccaattttactttatgaatatattcatgacatttgtaataaatgtcttgagaaagaatttgtttcatggcttcatggtcatcactcaagctcccgtaaggatattaccgtctcaggaaaggatcaggactccatgtcacagtcctgccatcttactttcctcttgtcgagttctgagtggaaataactgcattatggctgctttaacctcagtcatcaaaagaaacttgctgttttttaggcttgatctttttcctttgtggttaattttcctgtatattgtgaaaatgggggattttccctctgctcccacccacctaaacacagcagccatttgtacctgtttgcttcccatcccacttggcacccactctgacctcttgtcagtttcctgttcctggttccatctttttgaaaaaggccctcctttgagctacaaacatctggtaagacaagtacatccactcatgaatgcagacacagcagctggtggttttgtgtatacctgtaaagacaagctgagaagcttactttttggggaagtaaaagaagatggaaatggatgtttcatttgtatgagtttggagcagtgctgaaggccaaagccgcctactggtttgtagttaacctagagaaggttgaaaaattaatcctacctttaaagggatttgaggtaggctggattccatcgccacaggactttagttagaattaaattcctgcttgtaatttatatccatgtttaggcttttcataagatgaaacatgccacagtgaacacactcgtgtacatatcaagagaagaaggaaaggcacaggtggagaacagtaaaaggtgggcagatgtctttgaagaaatgctcaatgtctgatgctaagtgggagaaggcagagaacaaaggatgtggcataatggtcttaacattatccaaagacttgaagctccatgtctgtaagtcaaatgttacacaaaaaaaaatgcaaatggtgtttcattggaattaccaagtgcttagaacttgctggctttcccataggtggtaaaggggtctgagctcacaccgagttgtgcttggcttgcttgtgcagctccaggcacccggtgggcactctggtggtgtttgtggtgaactgaattgaatccattgttgggcttaagttactgaaattggaacaccctttgtccttctcggcgggggcttcctggtctgtgctttacttggcttttttccttcccgtcttagcctcacccccttgtcaaccagattgagttgctatagcttgatgcagggacccagtgaagtttctccgttaaagattgggagtcgtcgaaatgtttagattcttttaggaaaggaattattttccccccttttacagggtagtaacttctccacagaagtgccaatatggcaaaattacacaagaaaacagtattgcaatgacaccattacataaggaacattgaactgttagaggagtgctcttccaaacaaaacaaaaatgtctctaggtttagtcagagctttcacaagtaataacctttctgtattaaaatcagagtaaccctttctgtattgagtgcagtgttttttactcttttctcatgcacatgttacgttggagaaaatgtttacaaaaatggttttgttacactaatgcgcaccacatatttatggtttattttaagtgactttttatgggttatttaggttttcgtcttagttgtagcacacttaccctaattttgccaattattaatttgctaaatagtaatacaaatgacaaactgcattaaatttactaattataaaagctgcaaagcagactggtggcaagtacacagcccttttttttgcagtgctaacttgtctactgtgtattatgaaaattactgttgtccccccacccttttttccttaaataaagtaaaaatgacacct

SEQ ID NO: 9307 - DNA, 26 bp, Homo sapiens
aataaatggaatgaaataattcaaac

SEQ ID NO: 9308 - DNA, 3114 bp, Homo sapiens
catggagaagttgccaagagttctttaggtgcctcctgtcttatggcgttgcaggccaggttatgcctcatgctgacttgcagagttcatggaatgtaactatatcatcctttatccctgaggtcacctggaatcagattattaagggaataagccatgacgtcaatagcagcccagggcacttcagagtagagggcttgggaagatcttttaaaaaggcagtaggcccggtgtggtggctcacgcctataatcccagcactttgggaggctgaagtgggtggatcaccagaggtcaggagttcgagaccagcccagccaacatggcaaaaccccatctctactaaaaatacaaaaatgagctaggcatggtggcacacgcctgtaatcccagctacacctgaggctgaggcaggagaattgcttgaaccggggagacggaggttgcagtgagccgagtttgggccactgcactctagcctggcaacagagcaagactccgtctcaaaaaaagggcaataaatgccctctctgaatgtttgaactgccaagaaaaggcatggagacagcgaactagaagaaagggcaagaaggaaatagccaccgtctacagatggcttagttaagtcatccacagcccaagggcggggctatgccttgtctggggaccctgtagagtcactgaccctggagcggctctcctgagaggtgctgcaggcaaagtgagactgacacctcactgaggaagggagacatattcttggagaactttccatctgcttgtattttccatacacatccccagccagaagttagtgtccgaagaccgaattttattttacagagcttgaaaactcacttcaatgaacaaagggattctccaggattccaaagttttgaagtcatcttagctttccacaggagggagagaacttaaaaaagcaacagtagcagggaattgatccacttcttaatgctttcctccctggcatgaccatcctgtcctttgttattatcctgcattttacgtctttggaggaacagctccctagtggcttcctccgtctgcaatgtcccttgcacagcccacacatgaaccatccttcccatgatgccgctcttctgtcatcccgctcctgctgaaacacctcccaggggctccacctgttcaggagctgaagcccatgctttcccaccagcatgtcactcccagaccacctccctgccctgtcctccagcttcccctcgctgtcctgctgtgtgaattcccaggttggcctggtggccatgtcgcctgcccccagcactcctctgtctctgctcttgcctgcacccttcctcctcctttgcctaggaggccttctcgcattttctctagctgatcagaattttaccaaaattcagaacatcctccaattccacagtctctgggagactttccctaagaggcgacttcctctccagccttctctctctggtcaggcccactgcagagatggtggtgagcacatctgggaggctggtctccctccagctggaattgctgctctctgagggagaggctgtggtggctgtctctgtccctcactgccttccaggagcaatttgcacatgtaacatagatttatgtaatgctttatgtttaaaaacattccccaattatcttatttaatttttgcaattattctaattttatatatagagaaagtgacctattttttaaaaaaatcacactctaagttctattgaacctaggacttgagcctccatttctggcttctagtctggtgttctgagtacttgatttcaggtcaataacggtcccccctcactccacactggcacgtttgtgagaagaaatgacattttgctaggaagtgaccgagtctaggaatgcttttattcaagacaccaaattccaaacttctaaatgttggaattttcaaaaattgtgtttagattttatgaaaaactcttctactttcatctattctttccctagaggcaaacatttcttaaaatgtttcattttcattaaaaatgaaagccaaatttatatgccaccgattgcaggacacaagcacagttttaagagttgtatgaacatggagaggacttttggtttttatatttctcgtatttaatatgggtgaacaccaacttttatttggaataataattttcctcctaaacaaaaacacattgagtttaagtctctgactcttgcctttccacctgctttctcctgggcccgctttgcctgcttgaaggaacagtgctgttctggagctgctgttccaacagacagggcctagctttcatttgacacacagactacagccagaagcccatggagcagggatgtcacgtcttgaaaagcctattagatgttttacaaatttaattttgcagattattttagtctgtcatccagaaaatgtgtcagcatgcatagtgctaagaaagcaagccaatttggaaacttaggttagtgacaaaattggccagagagtgggggtgatgatgaccaagaattacaagtagaatggcagctggaatttaaggagggacaagaatcaatggataagcgtgggtggaggaagatccaaacagaaaagtgcaaagttattccccatcttccaagggttgaattctggaggaagaagacacattcctagttccccgtgaacttcctttgacttattgtccccactaaaacaaaacaaaaaacttttaatgccttccacattaattagattttcttgcagtttttttatggcatttttttaaagatgccctaagtgttgaagaagagtttgcaaatgcaacaaaatatttaattaccggttgttaaaactggtttagcacaatttatattttccctctcttgcctttcttatttgcaataaaaggtattgagccattttttaaatgacatttttgataaattatgtttgtactagttgatgaaggagttttttttaacctgtttatataattttgcagcagaagccaaattttttgtatattaaagcaccaaattcatgtacagcatgcatcacggatcaatagactgtacttattttccaataaaattttcaaactttgtactgtt

SEQ ID NO: 9309 - DNA, 109 bp, Homo sapiens
gacttgctggactgacacctatggctggaagatgacttgttttgctccatgtctcctcattcctacacctattttctgctgcaggatgaggctagggttagcattctag

SEQ ID NO: 9310 - DNA, 116 bp, Homo sapiens
tgcctgctgtgatgtgcaaaggcatctgagtttgaagctttcctgacttctcctagctggcttatgcccctgcactgaagtgtgaggagcaggaatattaaagggattcaggcctc

SEQ ID NO: 9311 - DNA, 1288 bp, Homo sapiens
gactttgatcacctgaactttctctagcaagtgtaagcagaatggagtgtggttccaagagatccatcaagacaatgggaatggcctgtgccataaaatgtgcttctcttcttcgggatgttgtttgctgtctgatctttgtagactgttcctgtttgctgggagcttctctgctgcttaaattgttcgtcctcccccactccctcctatcgttggtttgtctagaacactcagctgcttctttggtcatccttgttttctaactttatgaactccctctgtgtcactgtatgtgaaaggaaatgcaccaacaaccgtaaactgaacgtgttcttttgtgctcttttataacttgcattacatgttgtaagcatggtccgttctatacctttttctggtcataatgaacactcattttgttagcgagggtggtaaagtgaacaaaaaggggaagtatcaaactactgccatttcagtgagaaaatcctaggtgctactttataataagacatttgttaggccattcttgcattgatataaagaaatacctgagactgggtgatttatatgaaaagaggtttaattggctcacagttctgcaggctgtatgggaagcatggcggcatctgcttctggggacacctcaggagctttactcatggcagaaggcaaagcaaaggcaggcacttcacacagtaaaagcaggagcgagagagaggtgccacactgaaacagccagatctcatgagaagtcactcactattgcaaggacagcatcaaagagatggtgctaaaccattcatgatgaactcacccccatgatccaatcacctcccaccaggctccacctcgaatactggggattaccattcagcatgagatttgggcaggaacacagacccaaaccataccacacacattatcattgttaaactttgtaaagtatttaaggtacatggaacacacgggaagtctggtagctcagcccatttctttattgcatctgttattcaccatgtaattcaggtaccacgtattccagggagcctttcttggccctcagtttgcagtatacacactttccaagtactcttgtagcatcctgtttgtatcatagcactggtcacattgccttacctaaatctgtttgacagtctgctcaacacgactgcaagctccatgagggcagggacatcatctcttccatctttgggtccttagtgcaatacctggcagctagccagtgctcagctaaatatttgttgactgaataaatgaatgcacaacc

SEQ ID NO: 9312 - DNA, 1869 bp, Homo sapiens
tcttcagaaacagtgaacgccaaaaagaactcaagatattctggggactgagcatatgaacctgttcataacaaaggctgtgactcgaaataattaactttgtcaaaatcctgctcacaatttgaagatgaaacttgtcattaggttggcgggaatgagactaaagattgcgctgtgggctgtggtcacgtgctcccagaagacctggaattcaaaagaaatggagctattctttttctccctctttcataactggatgcagctgctcatactcaatcccatattcagcaagtgtgaagctggacgtgatgcaaaataaccgatgccctacaaaaagggcgcatctttaagagttttaatgccagtgcttaattcgaatgaggggattttaagtgtctgaagaggcattttctagggaccagtgggtgactgagtaactgaaatgctgctttcactccctaacaccatggatctggttgtgcataggatgtgggaggaggggctggcagggccgccttcagaggctgcagggcctcagcctcaggatgcatttaatgtatcctggccacagttgcagccaacggttcttgaaagctcggtaaggccctgcaacgcagagcctgcttatgtggatctatttatgggaacttcttaaaaggaccccagaatagctctttatctttcacaagagacacaaattctaattgagttaattatctgggcctttcactttggatgctctgaaacatttgttgattttgtgtgaatgtttatatcaaaatgtttgccaggttgtattagccattgaatagcaaaaaactgatagttacttgcttgttttttaaaaattacatattaaaaatgcccttggcataaggcagcatggtgtggcagttaagagatgggctgtgcagcccatcctgagctccagtcctgagtttgctacttacttctgtggcctctggaaccttatccaacctcttggtgcttcagtttcctcatctgtgaaattagaatttataataattgcacctacctcccaggggtaactaaatgaataaatataataaagtacttacagtggttcctgacacagactcagcactccgtcagtgttgccatgactatttttattatcattattaatgattacttagatcaattatttagcagtggactaatggaagctacagagcagggaagggaagcagatctagggaggaaggcagttttgatttgaggaggtttgcacatgtagagaagcatactggagaagcatatccagagggcgaaagatatctctccattgtgcatctgcctcttttgacgttggaagacacatgtcttaccccccaaagggagcccagcactgggagccttcttgatgatctcaaaaataatagctattcaagaaaatcaccaagtgactgtgaaaccgtcagttcggaaggctggttagaacatgtgggagcaacatgaatgttctacaaaagtttaaagcagagattgtttcaaatgggtgtagtagatattactgaaaaccaaaaaagagtgagattgtcagtgtaagaatgtgatttaatgtttgtagtgcttacaattttgtgtaccaactggatgactaaaaagagtaaaataatttaattaatagctcatattttatgtgtgaaaacatgttagtgaacatatataatcaaaatagatttcattgctattgcatagtctctaatacatagaatgattttgcttttctcttttattatacttgctttaaaatacttgaaatatattttgcattaaatgcatttcaagttaaatgtcttaaatgtatacattagatgtgtgttttaaaatgcataaaacacgttg

SEQ ID NO: 9313 - DNA, 381 bp, Homo sapiens
aatgagccctggagccccctccagtccagtccctgggatagagatgttgctggacagaactcacagctctgtgtgtgtgtgttcaggctgataggaaattcaaagagtctcctgccagcaccaagcaagcttgatggacaatggagtgggattgagactgtggtttagagcctttgatttcctggactggactgacggcgagtgaattctctagaccttgggtactttcagtacacaacacccctaagatttcccagtggtccgagcagaatcagaaaatacagctacttctgccttatggctagggaactgtcatgtctaccatgtattgtacatatgactttatgtatacttgcaatcaaataaatattattttattag

SEQ ID NO: 9314 - DNA, 1284 bp, Homo sapiens
tgttattgtccacaagattgttttggtgtttctcaagagtctgtcttcctataactgtgaaaggaggatttctggaattcagaagagagctattgagtttgctgtgttgaagctattaaacatggatctataagcagcaggaagattttttccaaggactgggagcaaacttgcaggctctgccatgtacttattgtggggtacctttagatgaattccctgtgagtgagagaagttgatcaccccaggaattagtcactaagaattcctaagaactttctatcaaaagcattggatccaagccatatattgaaatacaagcgtgattaatcagtaattcacattgccgatatgcatatgcaacttataatcaaatagaactagaagagactttgaagtcacctgactcagccccttgtgtttacagacaaggacatgtagtccaaggttgcatggtgagttcacagtcggattgtcctccctccaaactgaaactaatttgattttgatttcatattcaatatgcaataattatgttctatcagagataaaatttgttatgaatttgctttatttaatcagtagcaatgatagatgtgatgcatactataggattaatctgtgaacaatgggtttacggtctatttcataattgaaatatttattttaaaaatgaatattagaaacaaaacagccataaacagagtttaatagcaatgatgttaacaacaagtatttataaggggtgcatttgtagggtgtgacattttaccctagggtataaaactatttttcttttattattattattattattattatactttaagttttagggtacatgtgcacattgtgcaggttagttacatatgtatacatgtgccatgctggtgtgctgcacccgctaactcgtcatctagcattaggtgtatctcccaatgctatccctcccccctccccccaccccacaacagtccccagagtgtgatgttccccttcctgtgtccatgtgatctcattgttcaattcccacctatgagtgagaatatgcggtgtttggttttttgttcttgggatagtttactgagaatgatgatttccaatttcatccatgtccctacaaaggacatgaactcatcattttttatggctgcatggtattccatggtgtatatgtgccacattttcttaatccagtctatcattgttggacatttgggttggttccaagtctttgctattgtgaataatgccgcaataaacatacgtgtgcatgtgtcttta

SEQ ID NO: 9315 - DNA, 2859 bp, Homo sapiens
gagaagcagcgaaagcagatctgagtgtctgacccaggacagctgtggtttgtcactctgaaacctgatgcaacagtggaatccatgtaaaactctctgtgcatctaaatacttctggagggcgacagattcatgccacggataaatgaggcaaatccgaagaaaaggaaaatcgaataaaaaatagtcccacaaaataccttttgtgactaatgggtagcaatcgtattatttgctggcctgaagagaaaaaatggtaatgtgtgcctttattgaacttgaatgacagaacttgaaatttttaacacatccttcttggtgaagattttaatatattacttatatgcttcaaattttatttatgaaaaaatatgtatatctgtaatcagttgttaagtgaatggcactaaaagtatcgagaacagctttctttcccaggggtgaaggatggcgctcgggggtgactcctaagctcagcgtggaagcttttccctgtcctgacccgatggagcagccggtaagtgaagagcacagctggaagcagagacaccttatgactcaaactgggcaaacaatcggaacgtcatgcagaaggaatggcctgactcctgcagtgcagattggaggccccagaactcctatgaactactgagagtctactggtttttaacttgttcctctgtctactgtgtgtttgggggtgacatctaaattccatttcttcttcttgtttaaatggtgcagagagaaaggttgcccagacatccaccagcttactgtgttgacagatttgggagcagcttttgatgaagttccacccatgagggtccatgtggcaagtagggccacagggcagcacctggttacaacttgctggtgggttttatgttgtgcaatactaggaggaggaggcaggtgatctatgctgatctatgatcacctgcttcagtagaatttttctgtagagtgttgtttgaattttgagcctccaggttagaggctccaagcagacaaagaagaaagtttgtagacacaatattctaacattgcacaagttgatgagatatcaagttttgaatattattcaggaagcactttggagaatgtgggagtcctactgttttgcactagtctgtaatttgttacctctccccattcgataatatagtaactcagaattttcatataaaattgaattctactcattagagtactttttaaaagtacagcagaaagaaaagaagtggaacataagcattcaagattaatatttgattctctatctcttaactgtagattttattggcctgttttttttttctaaataattctttaaaacttgactggaacatgcctctgcatttctgagtgtagaaattaaatgaagccactcacagtcctttgatttcccactgaagataccccaaaggatgcaagtgcctacagtattatcaggaggagaacatgaaaatattaagacaaaaatcctcagcagttgttctccaccccttctccacctccaccagcaaggagaagtcaatctacacttttttctcatgttctaaagtcttagaatactgctggattgttgagcatgagacagagcaaaggttagatacacaaggtacaagttcataggagcacaattccttgattcagggaaagtagcacagaatgcaatttgaaaactacaggcttaggactctgtgccaaaaatctctattttaaatgaaaatatttatataaaaatacatttattctgcttaacacaaattaaaactgacataaaattttatgataataacatgattcaagaaatgtgatgtagatttttgagaatgccaaaaatcaggtttcagaaaagctacagtatgaaatctgaaaagcaacagaaattgaaagtgaccttaaagaataaatttcctaatttttcccagtttcctatgtttataactattataaagagtttaactttctggaactgaaggagaaaacatgaaaatgtttatattgcttcttgttaagcaggtagaccaaattccgctttcagtaattcatccatacagaatttggatgactatgtataaaggaaaacttaaatcttaattattatcagtttaaattttttttgtttgttgaatgacaaaggcaataaaaataaatttgactttagctttttttctatactttcctctttttgtaattcttaaattctagtcactagtcattatgagagtattgactaaatattttcacaatctaaatattgtcacaatctaaatttctgtagtagagagagccgtagccctttgtaaaggctttcgttcgtccaaacaacacttgatccaaccaaagttccaatgtgactgtggatctttgataggtctttggtgttggttgtaacaaaatttgatttgaactacctataaatgaaaagtcggggtttattactttatatgtaatgctgagaggagactgttgggaacagttatgtcaatgagcaaactagaaattggcttcaaagtctaatacttttaaaagcatgtgttttgtgtatatgctcacaaaatgtctgtgaagagatttctttcagcttttgctcagctttatggtggggtgtactgttttatctgggcggtgagggtattgatttacataaaaactgtagacaaacacagtacgagtctcagcacgttttgcatttattgtactgcccaaattgtttttatgttaaaagtcacgtttcataatctgcaatatttttgtcaaagtgcacactgtactttcttcttaaaaacgtgattaaagagatcactttgtccggatgaagcagctgttggcattatccgctgaggcttg

SEQ ID NO: 9316 - DNA, 2443 bp, Homo sapiens
atcaactgttgccacaagtattttcttgagagattttaaaacaaggaatactttttttccattttgtttcattgatcccagcataaagttagtagatataactttttagttgctattcaaattaatcattttactaaaattttcttcagtaagaaggtcctagaatctctccagacaccagcaagcctctatcttgtctaagtgctgtcaaggacctagttctttagggaataggtaaacaggtctccctttcattgaacatgttagagttcatgcaggtcgcaaaggcctgataatagcttaataccatgacatggggaaaatctcgatagatttggcttaaagtctccttggcattcacttctgctaattaaaaaaaatccttgaagaataattaagaatgggcaaggttgtcagagaatttattttgtttcttgcccacacagataatatccacatacacattcactggctcttgtgagcaaatgaatttaaaaatagacagcagttgttctaattagtgggagccatgtactcaccagttaaaatgggccacaacaaacaagactgagagcatgtacttatcttgctttttcaccaacagtggtttggttacctagttttattcacttaattgtgcatgcttacataaactttaaactacatttaaaactagcaaatctgcataccaaattatgtataacgtagattgaatttttatgaacttaaagtgagttaattgtataatgtaatattgtttaaaatatgtaaaaaccaagcatttccgcttggtccataattctatttgatattttaaaattctcatttaaaaattatattgctatcattcagcatgtgaaaatttattgataaaatgtgattttaatattttttagatataaactttcaacgtacttccatatgaggattataatagccctgctttattaaagaccataaaatattaactttccccaagatgttatgggttccagttcttctgatcatttgattcctttaattactgtccctcaatttcttcatctttacaatagatatattaacatttacagatcgactatttcctttaacctcctagaagaaagtttttgtggggaaagatgattctgtattattcagtagcatagacattttgcatatcaaagatgttcatttggcactaatgttgattgaaatcaaatccatctgagatgcctagctcgtatttgcattctggaagcctccatcgcaggggagctcggcagggtatgtgagctttgttggaggtgcggtgtttcattctgcagctgttgtgaggacagagaggcatggcccacaggcaaaaaaagtcaccacccagaagatgctctgggatagaggaactgctccttttcatcagctcttccaatgccgtgggagaggtgatcccagtcttctctgtacatcttgtgcttttccattaagacttgttccagtgggaaggagctttggaaaaattgcaaaggtctgaatcttcagggcattttcatgacaggacttgccaataataataataataataataataataataataataaagctccagaggcctaactggtttctcaagtcatttcagtgatatcattgaaacgtttttgtggtacttccctttgtctttcactgtttcatttttatattgcttcatttacttctttgcttttggctttgttattagaaaaaataattatgaggtctgttgtgcatgttgactgtgatattaagttatggcatgccattaagttttccagacgatgttggatgtatctgattagttcatgtcatctgtaaatacaattcttttttgtagtactttggaatggagcctttttctggtgtactgtatgccatttaagtttcacatacaagctgctttcggcaaaggcttgaatatttataaatttcagatggttatcctcactttatagtacacttaagtggctaccatatattttttatatgacaattggctgaatagctgatgtgtatgacacttttacacagatttgcactttggaactattttatagttgtaatgcatcaatcaaatacatttcaagcacatttcttgatcaatttaccagcaaccctctgaaggaatgaaggagagttgtgattgctatgtcaatgagtgaaatatacttaaaaatggcagagttatatagtacattattgtagcaaccttatatctgatttgagatactgtgttgccaaatgtccatgttatgtttatttctctattggttgtatttattaatttttagaagcctttaaactgtgttagaatctttttgaaaaatgttgattttgcatcataaagtttcaatttatcaaggatatcttttcagttacacttttagaaagagtgaataaaaagggcagtgagttatgctcttggacttgg

SEQ ID NO: 9317 - DNA, 198 bp, Homo sapiens
gggtttgctcccaggaaaggagaggaagagctatatatatgtgccgacatgtggcagacacacagtaaataatggctgaccagcatgagggcagtactgtcagaaatttctttgagctgtgagatggatttatttttaaatgctactttgtaaaggtgacctttaaaaaataaaaggaaaataaagaatgttagtttc

SEQ ID NO: 9318 - DNA, 490 bp, Homo sapiens
ggggtcagggggccacagagaaggggcagctgagccccagtcccagggtggatctgtcctgctctgttccctggcatgttggtcatagtctgcactttgtggtggcaatttaagcacaaaggtactcatttgtaatcagatgagctgcagctcccaaatttcaaattttggcacgatgaattatttttgtttctctttgcagagagccaaatatggggctgatgggaactgcaacgtcattaagtcaaaaatggagtgggctggggagtgcagaagttgggcagaaagggaggaggagggcaacagggaatgaagctggttgagtgtggggcaggaggactggtcagtcacaagagcttcaacctgccctgcgagccctctctgcacctgctcaagagaaaccctgagaaaccccagtaggtgtgagctcctgggtgttcattcattttgtttgacaccagggttcttcagctattgatgtttgtggtgt

SEQ ID NO: 9319 - DNA, 156 bp, Homo sapiens
agaaaagtttccaaaaatgtaaatatactgtaactgtagtttttcaaatatgttcatatatattgacaatatttacagaaatcctgattattgtggaattttcttaagaggtttcaaataggtttaaaaaaataaaggatttattttccttccctt

SEQ ID NO: 9320 - DNA, 1263 bp, Homo sapiens
agcgtcagggaagaacaaacacttcaaggtgcagctcgtggacaatgtctactgcattgggcagcggcgcttccacaccatggacgagctggtggaacactacaaaaaggcgcccatcttcaccagcgagcacggggagaagctctacctcgtcagggccctgcagtgacggcgccccggccccacactcgcctcccgggccccacggtggagctgcccgcccggccttgtggcagaggctcctcccgcggggacggccccgacggcttctctgcgagtctctctttatgttcaggtcgcttggtcggttcgtctcccatttgccatccaggcctcacacccacactcgagcccacccggccggccagctttagaggaggggaggagcagggcgagttcacattattccttttccatcggaagtggcgctcgtgcattcaactcgttcccgctcatggaacccctctttaaaaagacgcagggcacctgtgagcgcaggagcgagcctaaggccacccagcggcagcgcccgtgtcctgggcactcagcgtgctgggcagagcaggtgcgatggccccagtcctagcagccctcgcccatgtcctgtgcccttacatggctcccggactgtgcagggagccgatacgtttgctgatagcaatactggaaccaccgggtgcgatggcagtgaggagactgcccagtgcctttggggctgtgcttgcaataaagaatttcctggaaaggcagtctgcaaaagagggaaccggtgactcagaaagacagatgttttggtaatttaccccaaatgtgccatccacatagtgctttttcctcttgcccttcggcttgtttgaatctcacaattatgtatttaattctcaaagaaatatgtatctgtagccgtttgttgacactaatacagatgattaaggaaaacagctgatctttggggaagggagctaccaacactttatacacacacacacgtgcacacacacacacacacacactatatatatatatattatttacagggaaatttttcagggtttacaaaagagtatgtgattggtagtaagagacacacagaatgtttatgaagaaattgcattttctttttcctttacatttgaacttctttatagtttaaatataacgtcttgagatggcacattcctacgattgaagaaggggtcttgagatcccctaaacttgcatacccagttttttggatattgtaataaaaaaaagtattatgac

SEQ ID NO: 9321 - DNA, 223 bp, Homo sapiens
ccatgacttgccacacgctgtacaagaagcaaatagcgattctcttcatgtatctcctaatgccttacactacttggtttctgatttgctctatttcagcagatcttttctacctactttgtgtgatcaaaaaagaagagttaaaacaacacatgtaaatgccttttgatatttcatgggaatgcctctcatttaaaaatagaaataaagcattttgttaaaa

SEQ ID NO: 9322 - DNA, 3122 bp, Homo sapiens
ccccatctaaataaaatactgcttttgcaaacagaacactgtaatagggtagttctggagagatggtatgcagcatacaaaaatatattaaaaatataaacaatgttcaggagagtaaaaattcatataaagtgcaattgcacaaatacaagccaagctagaaggaagcacctatgaaagcaacaactttgtttctcatccatagtagtattgattttgatgctagatagttttgctaggtataaaaaataagtaaagttccacttagagaacaaagggccaaatagagtttttatatttgttatgataaaaggaagtagatgtgaaaaagcctaagaaaaaggaaattggacagttttgatacaaactttgtttgctaatgcactgatgagtctagtttcattatagcacgaagctatgagaataacttcagtcactcccttgaatggtgcaatgaattaaccagctgatttttcttagtgtgatgattaaccccttctttcatgttctgagctataacatttgctgaatatgcaatttgttattcttttattaatggcatgtaatattctgagcacgggcaaagaaaacacacaaaagattatgtattggcatttatttatgtgcaaggtgataggaaaactgaatccatctttgtagaagagcactgggctaatttgtatgtttccatagctactatatgcataaacaacagtacctgaaggattattaagcaaccttaaagcaataagttcattaaacagaaggtaataggaagaacagtacatttttgtctttatctcaagtatataaagttttgccccatgataaaataagtaacatataaattaatacataagttaatattggaagtgaaattaggccttatgtaaggagaggtagctacacagcatctgttacggttaatgagaggcacactgctaaatttacgtatatttcattgaatactttatgggaagcctccacaacacctcctgatagtagtaaaattagaaaaaaacaaactctactaatttttagatattcattaataggaaagatttaatgttacagcatctactctttggcactttttcacataagccagccttagagactagacaaataactactgcaaaaagtacatagtgaattttaaaatgtagaagaaagcaaaaaataaaataagtcctaaagtgaagaagccatcaattttaacatttgatgtctagataacattcatgagattggtcattaaatactattttgctccttttctggtgttacacatacacactcatacgtgtgtgtgtgtgtatgtgtgtgtgtgtatgtgtaatgatttgtgtccatttcaagtgttttcacaccagtcacacattatagaaattactggagccatgtctacaaaagcaaagtgaagtgatgagctgaaaagtgatcagggaatctgatcccataaagaaagtgagtctgaattgttgaaactaaagcacttcttttccaaaaatacttctgcaactcatgaacaaaatgaagttaacttagtgtttagcattaaaaataaaagttgtaccttgaccctagaattccttttataagatttaattgtaattgtctcaaagcatcaaataatacatctttatcattaaacatgaatttaatgtctaggataatttttaaaagaggaaattaaataattttacatgtctcatattttcagtgctttctcaaaatttgatggtgaatattacattgcattcaaaatcttcactgaatatcatatgtatctaaatgaaaagagaattacttatattcatctattttctcagaatctattcagtaccctatggagtacatggaagaagtatatttttggaaccagtaagtatgggagtccacgattctcaggtattgattgaaaaaagagaaaggggcaagaaattcattaaagaaaaaccacagatactgaaacatttgacacataaaagtaattaattgctggagactacaattcctggcaaacaccattattccagatgcaccatgctacccagcatgctacctgaatggcggtttttatccatcctgtcaccctgagcatctgtctcaacctgctgaggcacagacttccaccatgtgcatcaggaaacacctcactcatactgtcatataatgcaacagggaggcatagtctctctacaggtctctctctttacgttgtaccattctgttgggcaacaattgtcccaacaaccacacttaaatccagtggggaaaaaaaggttaacagtaaaaatttcttccacgtaattcaatttctcacaatagacagaaacagggggaaaatgtttgccctgttcaaagtactaaaactagataacttaaataatttaagccaataaataatattatattgtatttaacccattattcctcacctaccctcaaagtaggtatacaaaagactagtttgttattaatccacaaatatgctaaatgttagcaagatgatttttaagtacaaaaaagtttaagattgcaaggaaggaaacaatggtcacaaggtctttacttatgcacatttgtgcataaatttccacccaatttccaagacagttgtatcacaaagctgtgaaatgtgcaagagtatactttgtacccatcatgtgctctgttttgacataatgagtaatgcagacatttacatgttcttccagcttcaatcagtagacctgattttcaaaatctgccctcagatgaaaataaaataaacgaaacatttagacaatggctatattaatctgggaaggcaacacctgtggataaaacattagaagaaaacatatattttattttcatacttttgatatgattgtaacatatttcttgagtaatttaaatgctttgttttcccacacatattcaaatcagcaagcttgtagctggactgcaatatcaacaacaagttgtttcaaacagcatcaaaatacaacttcattgctacacttacaagtaatgaattttatgtgactatgaaacgaatataagcttaaaataagtgaatctaataaaatggctattcctctttttacttggaaataataaattaacattatatt

SEQ ID NO: 9323 - DNA, 1450 bp, Homo sapiens
gcaagatgtaaataaaattaaaaggtggatggcaagagtgcaaatactatcttcaatccttcagtcccagccagaagaatctctgaaagcatattgtgaatgtatacaatgtagtacaaacaatctctgtgatgattaacagtatgtcaccacttcattttttaaaaaggatcacgtctaatgcccattttcccaactattctttccaaagtaagatataaggtagcttaataaactaagtaaaacgtatgacttgagtacaaaaggattgttttaatccccattattctggaaagtgcatcctagtctcccagtctataacatcataataccttgagtataagtccaaatattaggttatatctatattaaaaacaaaatttctgtcatctgtcctggccattcaggcaactccagcctgggctcaatcctggagttctgtctggtcactatcagaaggaacactttgagggaaaccctggtgcagccagccctgaggaaacatggcctgagtgccctcactggtgggtgggaataaaatggaagtgcacagaggagatgtcagaagaccaaaacttggtgaatagtcccagtgctaggtcatataggaaacagaaagcatgacagtggccttttgggaacccaagttacgtcctggtgaaagcagaaaggaggagacaggatggctgtcaacaacgtcagcatgggcatggctcccaggcatggaggtaattgggtcttggcttcaatgccacccttttgggaagccctaaaccaagtgaggtgttcttttcccttgcttcccatatttgtcccagttgcagccctgttgttatgtatttactcttcaatttcttatttatacctctcactcaattgttaattctttgggttcagtctcatgccatatttactcctagtacctaatgcagtgcctggcacacagcaagtgcccttgagaacttgtagagggagtaaaaaagtgcatggataaatgactgcagcaaatcacaaattttgaactttgacccttttcttttagtcccaaatagtggcattccatagctgagggtagtaggagcagttcaccctgggagcagacaataagaggaagaatgaagccaactaaaattctgaatgctttttgttggatttcgtagggtattttttttaaaatagggtcttgctatgttgcccaggctggtcttaactgactgctttttattattaccatgcactggcaattccaaacaatgtcagtgttaaaatgcttctccctgaaaaagagaaaaaaaaaaggaaaaaaagaaaagaaaagtgaaaagaaaaactcttattggcctaagttctaaataatagctaggttaccactgagttttaactatatgtatatgagcttcaaataagcacctttttattatgtaaataaataaaagttatctgtatcccc

SEQ ID NO: 9324 - DNA, 382 bp, Homo sapiens
taaggaagaaaaactgaaaatgttttagtttattacccagtatatttgggtaataatgaaagtttaattctcataacaaatgatatcagattccagttatcagaatagtttactgtgtttgctcttattcactctactaaaaaattattttaaaaggctggaggcaaggtggtgacaggcagcagggtggcgacatggagagagggaagctcaataaatcactaggtacaatcctggtatcattgccaattatcatcatatttacattttctacaatcatgtgcttattaacatattggaaatgcttcagtcctcacatgataatacactaacattttcagattaagttttggttcaagttaattttttttttttttttttt

SEQ ID NO: 9325 - DNA, 1767 bp, Homo sapiens
gttgatggaaggaatatttttattaaccaaatagaatctatttacaaaaatggttcacgtatattaccacaattcttttgtcaaaaagtgtgtatatatgtttgcatctacatatatttgtacatctatatgacagatgtattttaaaagtttcatcttgaagtaaaagtacaacagcttgaagtgttgatagcaggccacagccctctaactcatgtgatttcccatgcatgctgccagaataaaaccaccaggaatgaattcactccccacttctctggaacctcaggacccgcccatttctcggcagtactgtgaattttgaagttaaactaaattttggtaccataccaactggaatttaggctttaaaaataatgtttcaaggccaggtgtggtgattcatgcctgaaatcccactactttgggaggctgaggctggagaattgcttgaggctagtgagctgtgactcccactgcactccagctcggggaacagagcgagaccttgtctctaaaaataatagtaataaaataaaaataacgttttatgactatttattgcaaggtcagagttacagattgttataaattgttgagaaatttttgtgattagaatatgaaggaaaaagctttgttggtaaaagtgacatgttaaggggctatgaagtaaatatgctgcagttaattatgctaagttaaaatacagtttagttatttgctttaaaataaactcttctttttttctttaaagtatactatctcaaaactcattatgttgtcagagccctagagctggctagtgtaacactgactatgagtaggtgggcccacacttgagttgaggtgatttcatggtgtctttccaggctcttgatagggtgtcactgcatgcaagccatgaatctgttttgagaatcctctccattttcccaaataaaaacctatcacaacagtgactatatcactcagcattggatctaaatataaaagtggtgctttcagtgtttttggcagatagtgttccataagctttccatcagaagggattttagacaccttagaggtccgtgctacatcgtcacagttcctccgaataaccttaggtggtagtgttacttgcctttgacacctctgcatatgttttaatgactagatccaaactgtgttgttcttaaatcaaaaattggataatttgtaatatttatgtgttaatcacacagtatgctctctgaagttctcttaagccttcagtttatactcttaatttaattttctttctgagctggagaactggctttgcactttggttacacagaacattggtttccaattcagtttaactgaaatttgctgctgatatgttgagtttgttctttaaaaaatagctcatatatctcatctttcctcctgtcttagaagaacagacctaactagtgaatgtattaatgaaaatgcatctatttcagagctgacatgaagagtttagtttttttactttataaactgtgaatatgagtatgccagctgcatacgatgtaactaatcatatttaaatatatttcactttctctttgactttagaccttttgaagtctgtataaacttgttttgaaatatagtctctgcttacgaatgtcataacaaaataattttttgcatgataaaaaattactttgattacaaaaggcatattctttcatggtttctgcaatgagaggaagtgtaatgattattttaatatttctattaaatatgtttaactgt

SEQ ID NO: 9326 - DNA, 432 bp, Homo sapiens
gttcctttattttttcttttctatgcaagataagagattaccaacattacttgtcttgatctacccatatttaaagctatatctcaaagcagttgagagaagaggacctatatgaatggttttatgtcatttttttaattaaaaaagaaaaattcatataatcgtgtttaaaacacaaatgaagtcagtatttgcctttgttaacccttatccatttgttgacatgtagactgtttacaaaaaaaaaacacatggttaaatgttaaattttaattaaggcccccaaaaattaaatataactttttaaaatgaaaggagtcaccttttacatgactcaggtgaaaaaacagtataaacattaatttactttgtgttcaaaagaaaattccaactgctgttggggaaggacacagaaaagaaaaataaccaccc

SEQ ID NO: 9327 - DNA, 1910 bp, Homo sapiens
aatcattgttgttcatagaaaatttcatctgtataagcagttggattgaagcttagctattacaatttgatagttatgttcagcttttgaaaatggacgtttccgatttacaaatgtaaaattgcagcttatagctgttgtcactttttaatgtgttataattgaccttgcatggtgtgaaataaaagtttaaacactggtgtatttcaggtgtacttgtgtttatgtactcctgacgtattaaaatggaataatactaatcttgttaaaagcaatagacctcaaactattgaaggaatatgatatatgcaatttaattttaattccttttaagatatttggacttcctgcatggatatacttaccatttgaataaagggaccacaacttggataatttaattttaggtttgaaatatatttggtaatcttaactattggtgtactcatttatgcatagagactcgtttatgaatgggtagagccacagaacgtatagagttaaccaaagtgctcttctctagaatctttacacctcctgtgtggttacaagttaactttgtaagtagcgtaccttccttccttaaaatatctagcttcctgtgccctttcatagatattcgattaatttttacattttaaacaagttgactatttcctttaggggttttgtttcaaacttttctgtcatctgtctctactacctcagaaactgcagcttggttctgatgatagaaattgaatttttccttgtagttattgtgataaagtatgaatatttttagaaagtctataccatgttctttcgttaaagatttgctttatacaagattgttgcagtacctttttctggtaaattttgtagcagaaataaaatgacaattcctaagagccactgacatccaaaaaattcattacttacgcttcgggttcattctaaagtaaggaagacaatttaaaggcagtaaattcaaactgctgcataatttccagagctcctagtttctcaagtttgatacacaccaaaaacgtatttggaaatggcttgtatcaaatgttaggcaaattgctaaagaaaagaggatgttcttattggcctactcaatatggaactacaaagaatccaggtagaacacaaaattttgtatattgcaattatgaatattgactgtcttccacccatctgtgttctttcgggtgaaattacctcattttatttagtgaggaaagacaggtttattccctgttacatggggatttggaaattgggtatcctaaagcaagtaactgttcaaccaccagtcaaaagaggggagggatgttgtgcgagtaatgagtgatggtataccatcaccattccactcggccacaaagccagatacttgaaataaacctactccaaatgtatcagttcagtcttgaaccatggattacatatgtttacactaaatatttcaaattggcttatttggaaatctatgtaatataaactgatgtaaagtgtgttgtaacttttcagctgagacagttgatgccttcgtcatgattttagaataaattcttaagttaatgcaagtgctttttaagagactttttacagatttgtatgctttcctaaagcactaaagttacaaattaaaaagctttaaaaactttgaccaaaaatttgacaaaatgacatgtaaactgacttttcccgtattagtattccaaagatgcttaaaagtggcttgtggcatttatgagaaagtctttgtgtcacatttcaggaaaggactttgatttctctttgttatttaatcactgatgtggtctaaacccacgataatatgtatctttccttttaaactggattttatgttgtctcattaaaatctgcttaaagatagaataaaattcattatttgtaca

SEQ ID NO: 9328 - DNA, 138 bp, Homo sapiens
actggctaattttttaatatagtatatgtggtgcttatttataaacatgtagaaattaccaaagtaactacaattctaccaagtaaagttatcagtagcatcatttatcatgaaaaataaataatttttttgaactgt

SEQ ID NO: 9329 - DNA, 2919 bp, Homo sapiens
aaattgcttcttttagaaaatgcaaaggtttatttgtcttaataaattgaatactaggtgttgtaaggaagtgagaccagaaggacaagctaaattatgcattcttacttgagggatcggaatggatggggcggagttctcttcaggctagccttctgggaaaagtggatgtctttttcagagattcatcataccttgacctgtacctcttctctgccctccacttccctgccctggagtccgtttctggagactagaaatgtatctaaattgggggaacagaatgaatgaattaatgaatgagagttcctttgctttaaccattcctggatgcctgcaaagtaaggaataatgcagtttttatgtatctgattttataaggggttactctttcaagagtaacaaaaaaatgcaaactgtaatgaaactacattgtatttctaagtgtgaaaacgacaggctgccccgtttttactaattgcatttgcattttaaggtactactgaaggtcagatcaaagttgaaatgcaaaaatactaattagagaataatgtgaataaaatgggaatcttcttggtattttatgtgtattgtaagtagcagttaaattatttttttaaaagcaatttcagttttaatcactgaacaaaagaaacaggcaacattcacttctgtagtatggtttccacctatctctaacaccactattaaggtacaccagtgttaaggtacattaataactacacaaaattttatttaaagagaacacttagcagcctatgatagttttcaataaaatgttgcctctctttcggattctcactaacttttgttactattctaaaagtttgaatttgctggggtgtttattctgaggattatttaaccattgttctatttggcataaccctatttaatggtgcttagagctgaattacctacagaaactgtttctggtttaaataattagcacaaattggcctaagtattcatgagcccatgtttctgtgaagtaattattaaaccaacttaatgattcttatgtaaggtacactttttattttaatacattggtagtctctatgacttgtagcaatgttttacaaatgtttaaaatgctaaacttaattttccaagcttttcttgacaattagatacctatcctgtagttactgaaaatctgggtagtaaatctacccaattaaaatggcactttataaaagggaatagagaagagatgggactatttctatatttaaatgctgctggctattcctttgtatataaatgaaaaataccattcattaaaattaagtactcgtttaagtatggttcttaattacatttcattcatttatattagagtaaatggcttcataactactttaaaatttaacccacaagcatattaaatctgtttgttataagattggaaacaatttttgagagggactaatttaaacaagtcctcctttagtcttttgggtcgcgtagttgctgaaacctaagtacctgcagcctacaggataaggaagttcacagcctgcggggtgaatgaacccatgtgtgaactgcacagagcaattcatagaaaatgcatagaaatttgtaacactttggtcacatctgtctctagatggtcattgaatttgtttaaagatggatgaaaggccaggcatggtggctcatgcctgtaatcccagcactttgggaggccgaggcaggtggatcacttgaggccaggagtttgaaaccagcctggccaacatggtgaaaacctgtctctactaaaaatacaaaaattagccgagcgtggtggtgcgtgcctgtagtcccagctacttaggaggctgaggcatgagaatcacttaaacctgagaggtggaggttgcagttgagccaagatcacgacactgcactccagcctgggcaacggagactctgtctcaaaaaaaaaaaaaaaaaagatgaatgaaaatatgaaatatataaactagtatccatttatttgcatttattgtgggatttcagatatgaacggtgtaaatttgagaagcacttatgcatacatgtgggtgaaaaaccaatctaattttgtataaataaaaacaggctcctggaaggtgaaaagtagtcatttgttctaaatctatacatattacttgtatctagtgcagaataagctataacatcccattgaggaatcttaaatttcatagacatgtaaagctgaagtaactctaaagagcagatgcttcagaaccatcagaaggttctggtcaacagtcagtattatctcttaaatgtatatgttggtcactaattgcacaaaatctataatttgccagggctttagagattgagtcaatatgtcatttaccatggttttcccactgaaggctttaacttttctgataaaataatattttaaattttcaaaaacccattcctgaggagaactacttctagcattccttttcatgatgtgcttttgtgcagtaagtagcattttcggctacttaactttacattcctcttatttttcagtttccagtcaagattataaaaagcaaatgattgatataatttgatattcatagagttgtgcctacctttaatggaaaaatacatgtcagatacttagatgtttattgatatgagactatgtggttaaaaaacccaagtatgtccatgtgtttcttataaggtacacttgaaactagtgagtgtttgtcacatttcactttcatggtatataaaatgcagtttgcatatataacttgaatatctggtactagttttttcacgcctgcaatcttggagtctaggttgccttgtctctcctatttttaaataagtgaaatttgggagattgtaaaatctgtaaagtttgttttgtgaaaataaaatgttcacagt

SEQ ID NO: 9330 - DNA, 1789 bp, Homo sapiens
gcatcctatcttcgtagttggtttggacttcgataggttgatggaaggaatacttctattaaccaaatagaatctgtttacaaaaatggttcgtgtgtgttaccattattcttttgtcaaaaagtgtgtatatatgtttgcatttacatatatttgtacatctgtatgacagatgtattttaaaagtttcaacttgaagtaaaagtacaacagcttgaagtgttgataccaggccacagccctctaactcatgtgatctcccatgcatgctgccagaataaaaccaccaggaatgaattcactccccacttctctggaacctcaggacccgcccatttctcggcagtactgtgaattttgaagttaaactaaattttggtaccataccaactggaatttaggctttaaaaataatgtttcaaggccaggtgtggtgattcatgcctgaaatcccactactttgggaggctgaggctggagaatcgcttgaggctagtgagctgtgattgtaccactgcactccagctcggggaacagagcgagaccttgtctctaaaaataataatagtaataaaaataacgttttatgactatttattgcaaggtcagatttacagattgttataaattgttgagaaatttttgtgattagaatatgaaggaaaaagctttgttggtaaaagtgacatgttaaggggctatgaagtaaatatgctgcagttaattgtgctaagttaaaatacagtttagttatttgctttaaaataaactcttctttttttctttaaagtatactacctcaaaactcattatgttgtcagagccctagagctggctagtgtaacactgactatgagtaggtgggcccaccacttgagttgaggtgatttcatggtgtctttccaggctcttgatagggtgtcactgcatgcaagccatgaatctgttttgagaatcctctccattttcccaaataaaaacctatcccaacagtgactatatcactcagcattggatctaaatataaaagtggtgctttcagtgtttttggcagatagtgttccataacctttccatcagaagggattttagacaccttagaggtccgtgctacatcttcacagttcctccgaataaccttaggtggtagtgttacttgcctttgacacctgtgcatatgttttaatgactagatccaaactgtgttgttcttaaatcaaaaattggataatttttaatatttatgtattaatcacacagtgtgctctctgaagttctcttaagccttcagtttatactcttaattttctttctgagctggggaactgactttgcactttggttacacagaacattggtttccaatttagtttaactgaaatttgctgctgatatgttgagtttgttctttaaaaaatatctcatatatctcgtctttcctccttagaagaacagacctaactagcgaatgtatgaatgaaaatgcatctatttcagagccgacatgaagagtttagtttttttactttataaactgtgaatatgagtatgccagctgcattagatgtaactaatcatatttaaatatatttcactttgactttagaccttttgaagtctgtataaacttgttttgaaatacagtctccacttacgaatgtcataacaaaatacttttttgcatgataaaaaattactttgattacaaaaggcatattctttcatggtttctgcaatgagaggaagtgtaatgattattttaatatttctattaaaactgtatattttt

SEQ ID NO: 9331 - DNA, 54 bp, Homo sapiens
tttctgttcctgtgttcatagattctttttccttaataaaagtaaacatatatc

SEQ ID NO: 9332 - DNA, 559 bp, Homo sapiens
tggttaagctaccttcattaagcagcatgaccgcttcctgagctcctgctgccgcatttaggccctgtcagctgtgaggccactggtgctgagtcagagggaaaagctcagaacagccttgagcagcgaagaataaagcatgactcatctcgtcctgcccacccctcacactggactataaataccctccctgggtctgtgtgctgttattccaaaagatgcgatgaatacccagaactaggctattcatgggctgttgcccagttcaagctctattgggtcctgaggaagattactattttggctacattgtttatcattaaaaccagcccagggatgtgtaaacctgcatctggagaataagacatttctttttggttaaatgatattagagaaaaaaaaaactatccaaggctgctaacaaataatcttcactttcaattatatccagcaataagttgttctccagaaaagaaagcttggaaacttacccagtttgccttccatttgggacatgactgatgtgcttcagtctttgtataataaatgcatcttcgcc

SEQ ID NO: 9333 - DNA, 846 bp, Homo sapiens
aacacaaacaggtataagactcagtctccacatgaagggagctcatatccaaggacacaaaaccactttaaaaacataaatactggccaggtgcagtggctcatgcctgtaatcccagcactatgggaggctgaggcgggcagatctcctgagctcaggagttcgacaccatcttgggcaacatggtgaaaccctgtctactaaaatacaaaaaaattagctgggcgtggtggcatgtggctgtagtcccagctactcgggaggctgaggcacgagaatcgcttgagccctggagttggaggttgcagtgagcagagattgcgccactgtactccagtttggactacagagtgagactccatctcaaaacaaaacaaaacaacaacagcaaaaaacaacaaaacaaaacacaaatactctcacagggcatggaggttttcgaatgaacttggccataagaataaattcagagttgacagaacagacgtcttaggaataaatgccattcttatgctagaccttgaagagtagaaaattaagagatggtggcccaattgagaggggaaaatgcagttgaaacttcagacagggttgataaagtgaggacgatcatagacatggagtacttagacatattaataaacaataaagactttacctgtctaatggaaaacctggagaagtcgtcaggaaccagactacagtggaccctggagaaccttgaagaacatttttccttttcaggaaaacggaggttacagagaaaagtatatgtaatgatgctacagtaatgtatttctgtataacaaatgactccaaacttacgacttaaaacaaccaccactt

SEQ ID NO: 9334 - DNA, 4214 bp, Homo sapiens
caggttctttgcggagccgagataccatgcagacattttgcttgttcaaaccaacaagacccagcaccgcggtctcctggtgccattattatgcagccagcggttctcttgtggagggggcaggtgacgtttcagaagacaccgagctggatgggactacctttctgttcatcaccacacagcagaatttctaatggaagtttgttgtgaatgtaaaggagggagcattctttgctttttaatatacaaaccatggttttttggagcaggattttgtgtaagaatggtgtttacatgcagtgtgttttccccctcaccttcaataaggtttttcaaaaaggaaatggaaactttttaaccaatttgtgaataacttttgtattaaaattttaagaacctacggcctattctcagaggattatgtaacccctgcagtggaaactgagccagctaacttaaaaagctgccttagtttatttttagagattacagaatttttaaacagggagacgtgtgatatactccctcccttccctactattgcctctctgacctttttaaattatttttaataccaaaagagttcttttgaaatggaactgattaaaagggcagagggtctgttgccagcctgcattgatataccagtcccatttgtaaatatttacgtacctttataaattcagttgcatctgtggcaaaatttcagactatttttgcgtctttcctcatcactttttgtgatgcaactccagtctggactcagatgcatagatttggtccagtgtattttcatgataaagtgaaattgagtcagaacaagagttaatatctgcctgtatcttgcacagttcgagcgatctgttattaactgggaagcatttggtgttggttttcattccatttcgacgagcatgttattgggaagtattctgaagaggcaatagcagtaataacaacagacttaagtgctacgcccctttgtgctgctggcttttctggttgcaggctttcccatggtcacaggatgcactgtcagcatcaggtcccagagggccaccgtgtccattacagcagagtccagctgcagcatccagctcacgccctcatgggaattggcacaggcctggggcagggcttctgatggccatttgcttggcctcctgcattttagtccaactcacagtccactagcttcactcctttaaattcactttgaaacaggcctcatcccacttccaccagcaccatagaagaataattctgggcagaagtctgttttttttcatttttccaggacagttggatattgtcaggccacttgtgaccccagccatgtagtgagggtgctctttctctgtgcctgctccttatgagtgcagtggaaggaagccacacactggtcagtcatttcagaggcagcagatgcccagggagacccaagaaagagtcaggttagggagcagtgaaagtgaggagggaagacaattctgtgaactctgtaactcttaaaatttttgaaaactccatcgttaaacaacttttaaaagaaataactaaattttcaaatgagtaagcagtgccaccaactagtgttttgcccgatagaagagccagcatgttcacgttatttaaattaggtggaaaaatctaaacatttttatcttcataatttaaaaaatatatatgtatatattgcatattcactttttcctttaggtagagatgatttcaatccaaatactcttactttaaaaaatttcctttccccaagaatctccttgggactttgacttatttttaaagctgtgttggagctcatcttgttccctgatgtgtctcgagcccattggtagggtcatacaaagcccacggttacaagcagtggtaggattgcagccgtgggcctgctggacacacacatacaccaaagatgtatttggatctgggcaccccctcccaggatccctgtactcacgtgccagtctcctgactagagcactttactctgtttcctcagccctgcagcccctgggagcacacactgggtgcagccctgggccaggcacgggaggccctgccctgtgctgcccaggggctgtgtgcaccacatgagcacatttccctctggcctggcggcctccaggctggctgtggaaacagttcctgaggaaattagagattctatgaattgtaggagtattaaagaccaggctgttggcaccagaacttaaagcgatgactggatgtctctgtactgtatgtatctggttatcaagatgcctctgtgcagaaagtatgcctcccgtgggtatacgtttttaccttttttaaaaaacatttttgtagaaaaaataattaaatcccctttttggaaacttactgcaggttttgtgccttgacaacctctccctatgtgaggtttgtaaaaagtgtcctgtgacttaacacagaaacgcaataaacacacacaaaatagtttcatgagtgattcttcagatgcccttcccaactggttagttgatcaagaattttgggggtgggggttgcggagaaatcaagtttaaaattccttctgattaaaaaaatatagtggaatacaattgtctgccgtttccccttcttaatgtatatattgtgagtatttattagattcgtaggtcatattacttatcaactgagccaaatgtctgtgtgcaattgtgtttcctttaccttgtaaaattttgtacagcataaataagtaaaaaaatcactgtttttctcaactttttcaaaatcaaggattgtaaatattgtagattctttttctgtgtgatgtgtcctactgtttcataatgctgtaacttgtagaaatattgtatatttattttctgcttatttaatgtcttaatttctgaaaagtattaacatccctgtctcccactcccctgccgtcccatgaagttaactcctgagagttgtcgggggtgactggagagctcattgcagaccacgtggtcctccagggtggctctccaccttcgggtcctggtatttccagtcaagtgggtttcaattcttgggctttgccgcccttatgatgaagtgtgtgtttgatgccagtgagaaactcagtctggcaggctacaaaattctactccaagaaatacccagcaaccttctgtttgttccaaagcaactagcttatcatgcaagcaaattttgctgactccaggctttatctttaggaaaacaaaaaaaccaaagtattatcagcaggtgggaaagatttttctattgaaaatttatccctgacaactcagcgtttagaaaagaaataaaatgtgccacttccagaggtgctgcattgcagttgttcagggctagggccaggcaggacaagtgaatgggtgggacaggtggctcctgcctaaggaccacctcaggccactaaccccttgtggacaactgtgagtagctgggttttcccccacctgctgtgcaacttcctgtgctttgaggttggactaacttgtcttcaggagctaattaactgtacagccctccccacgccccacccatacggtcactgcatttggtcagcctgcttcttcaggtcgatgccctccttctgatactccatctccttcaggggaggttggggccccactggactgggtgtcaagatgtgaaagcttatgggagctttaaggagacttcatggtggttccatgcaggtggttctgccatccctgctgatttagcctggtgcctgtgtgtgtccactcacgtacacgtggggtgggggaaacgtgtctacagatgacgctaaatcagttggggtctactctaaacagcattgtgtgtaagaagcatcctcaagctcccagttaagtaacttgactacttttatttgggaatttcagactatagaagctctcttatgttttatgtccagattctgtgaccactagttactgtatcagaactcatcaggtacccacttataaatagcactgatctggctgtatactgatccatcactaacctgttttctaggacccagcgtatgtagcatttgtattgcagtttccctggcttacttgtgttttgcactgatgaattttgacagggtaattgccactttacttgtgcaatactgctgtaaataactgcagatttttaaacaatcttttatgttaattttataaaaataaaactttcaactagtt

SEQ ID NO: 9335 - DNA, 95 bp, Homo sapiens
tacctttttatagccacagccacctctctccctcttccttgagcattttgtcatatggtcattggtgattaaataaaatgtattttaatattgac

SEQ ID NO: 9336 - DNA, 504 bp, Homo sapiens
ggagaggtgcggggagacattccaaaaatcaagccaattcttctgctgtaggagaatccaattgtacctgatgtttttggtatttgtcttccttaccaagtgaactccatggccccaaagcaccagatgaatgttgttaagtaagctgtcattaaaaatacataatatatatttatttaaagagaaaaaatatgtgtatatcatggaaaaagacaaggatattttaataaaacattacttatttcatttcacttatcttgcatatcttaaaattaagcttcagctgctccttgatattaacatttgtacagagttgaagttgttttttcaagttcttttctttttcatgactattaaatgtaaaaatatttgtaaaatgaaatgccatatttgacttggcttctggtcttgatgtatttgataagaatgattcattcaatgtttaaagttgtataactgattaattttctgatatggcttcctaataaaatatgaataaggaag

SEQ ID NO: 9337 - DNA, 910 bp, Homo sapiens
ttggaacccgtataagaaatgtagttaagcctgaaggactatccttcatcaagactgaaagtgagctttgatttgatattgcctaaaaatttttattgtgttatcttggaagtctgtgtatcaaaatgaagaattcagatggtaggaggttctatagtccttttaaagctgactcttgagtgtcagttgaatatccattaaattggatttggaaataacctgaggaaagtattatgataaagatctgcacagatgcctcttagctgataggtggcaggcctgtgggtttgggttctccctcttttctctggaacatatgacaattccagattaaagaaaaatgttttttaataaatacccttggtctttcttctagtcacctttgaggtagatattgtgattttctggagtatagtatatccgtgtctctgtgtcttaggtttactagatgcaataatacttctctttgacatttgtactgaagtgatttgatattaagtaaaacagttaatgtttgaatataggcatatttataggttttttccgctcccccccaacccaccctttttaaaaaatctatacaaagcccttgtttgagtctcatcatgcacatcaaatcatggagttaggtcttctctgagctcaggggaacacaagtgcacagagagagatgtcttgagggtcactaccaaagaattaccctcattgtccctcactcaggccatgtgtacatgcgatgctgctgagtgtgctggggtgggtggtggccacgtggctcccccagagcacttcctaactggcaagctgggagacccattactggtgaactttgtggaaattagaactgtatcttttacataatcttggcatattacatttcataataaaaacatacatttagttgcatgct

SEQ ID NO: 9338 - DNA, 708 bp, Homo sapiens
gggtacacaggggcactggggtgtggagagctgacctcatttctcttccccgaaggctcagcttcgggcaccgactgcgtggagcctcccgcctgttcccgccctctcaccagtgcacccaggcttctagggcagcgttgcacggcgccccatggaatagcacggaagagcagccacaaaactcaactgctgccatcactctttttttttttctgctttgaggcccttcccttagattatgcactaactttcttaaaactttttcatccaggggatgggtggctttccaaaatgctgtgcaaatggccttgtgagtttgaactagctggggagagaaaaggtggcaatgtgtgtcaggtgactatcagcccttctgcctttttgtagccaggcttgctatgaatgaaacggttctagtcgtgcggggggccctagtcatgcctctgcgcatgtggcataggaagtggagtctcctcccatgacccagcacgttgttcttatctgccttttcctctgtgacatgcctgcctgcctgccttctcatcagagagtcacaggagggccttaaaccccacgcagatccttctagaccaaggacccattgttaaaagcatggattctgcctgagttacttcccttttgagaaatcatatctcaaatacataacctggtaatataactgaaaaaataaaagtgattgctccttcc

SEQ ID NO: 9339 - DNA, 7575 bp, Homo sapiens
ctattgtgtaactgagcaattcttttcactcttgtgactatctcagtcctctgctgttttgtaactggtttacctctatagtttatttatttttaaattataaacacttttcagctgctagtatcagaaccacatgaagttatagcctctaaagcctgtggtattttatataatatttttataactttaagagactgtagtaattgacctaaaaacttatgttagcttcagtaaaagtacttttattgtaaataaacaatcatgaactcaacactctgcctgaatatatgccagttgtctttcataatcaatgtttagataaatgattgccactttttatatggttgtttagtttcaagcaatatgatgtacattacttttgagaaacagtattttgactaggacctctcttatttgtcagcacagaactgattaatatgtaatgctacctgctaattaaaatgtaaaatcaagtaaagaaaacattttaaaattacaattagcagagcagttcatgtttaagggcatcacttttattagtattggcaatattatttgtgtaaatgaagcatttgaatgtcatatctttttaaagtattttattgtatactgtatcatagaagttggaggtatataaatagaacattttgctaaagtgaaaaatttccaagttctctagcataactttttacatttaatttttcatatgaaatagcaattagttactgctgtgttacattgtgatgtttatgtatgtcaatgtttttgtctttaacagcataatttatattgctttttcaaatgatgtagctgcattaattgtgttcatcatgactttggcgatttttaacaaaatttttaaagacccagtgagagtctgtagtgattattacacggataatgttttaaatgtctaggttctgtatttttttcttaaatagcaagaaaatacagattgctagtatagtcaacagtatttggctatcaataaagaatctctttaagatctcacccggctggcattctgtaacagaggggattacctggtgttttaagtatttaatgtcctcatagtgtggaaatcccctaaattgattagaaattgtattttatgaaaaataacttgtattcattcttgtgtatttattacaatatataaataatggcaactctttgttttatacatatataatttataactgaatctaagtattagactgctactcatattttgaactgcaggtgtaggacagtgtttgctggtaacaactccaatgtgtattaataacttgaaaaggagcatttcactataaaagataatgaagtaggtaatgaaatcagtccttgaatgaaagcagtgcccttgagaagggatttttttttaaatatacagtaaaatatttcgtgggaacctaacactcacatagcatatggtttattaataatgcatatcctttctaatcacttcttcaattctttttgctgcagttctgtgctaaaatggggttgtggttaagtgaacgagaactctgcctacctaagaagttcattgtgttctaagtggaaggagagttactgaagggaatgtgaatttttaccgtttgtacttaagatacatttgttgtctaaaatggctctggataacatttttgggttaaaaaatgtaatttaaagccaccatagaaagtattttctgatttactgtccaaatgaattttgttgttaattgagaagtcaataaaatggattaaactgacagaaaaaaaacatatatatatatcccaaggtgtaatttactcttttgtcaggataaaatcagaaaaatggctgattttagtaaatgaaatttttagcaaatctttcattcatgtagtttataattattgtgtcaagcagtgctgtttacattttaagcatcatacaaaaaagataatttggcttgctaaacatcaaaatagaatccaaactcttaaccgaatatcttttttacaactaaaagagatattccaagatttattaaagagtcaggtttaaaagttattaatgcaaattatgtaatgttcatttattcagtattcttgagtccctgttacctcaattggtgttctagaggctattttacaagaaagtttgaacttagtttcaaatttgacaatatattttatatgaaaatgtttatgtttaaaataacttatttattatgcagcatttttattgtgataacgttagtttatgggatattctgtcatatcctgtaaacatagtttatttttcttcttttttcccattttctcatacaaattgaataagtagccattttcccccaatgaatacctcttcttttaggtcaattggtgtttttagaatccatgtaatttgatttgcactgttagattgaaaagtaagttacgttcctgttcttagaagccacacatttagagataacagaaataacttgagtcttaagagtatggataggctcatccaatgagatgtaacttagctattcatactgtttgtgatggaaattctatacctgtttactgtgatgatgaatacagtggatatagcagggggttgaaatggaacacacagaagatcatgacaattgagattcagcaactgctgtctcatatcttggttaagacctcattgtgaaccttgaacacaaatcagatgttggagtgatttcaaactctatttcaacaattgggtctgtttctatatggaccctctatttcccagctgaatgtttcaaacccccaaattaggctgcaaccgaaagagcctaattgtgaaatgatgtgcgcttatgtttctgtttatcctttagccatggaactttaaagagtagtgttcctcctacttactttaagctggaagaagagttgagtagtaaatcctgtgtgaacttttagctcagctactctgctgaattaattagaggtaggaaggacttacaagggctggaagtttaaagagaataaattcatattttttgttctgaattgatttctgtgtaatttatatcagtatctagttgcttatctgtgaaattgggttaatttttattgatcacatttgatgtaaagaatgaattatttttgtaaagtatttgtaaatataaaattgctttataacttgaatgaacataatcattatgctcccattagggtgcattaagttgtacaaattccaaaataacatggtatggtttgtatggtttagcaattttacgaagcttcagatgacatgcactggtgacacaacagtagaatttcctgagaggttgagtgaatattaacccatcaagttagcaatttccttaactacatgagtatcaggaagacaggacttccctgccttagagctatatagacttgggcctcttcaagatctgacttctctgcacattctatacaggttggatattgatggagggttaaaaatgctatgacagttcatggtgcatggtgtgtttgtttaaatcatagcatgtttaggcaaagtggccagctcattcaatataagagccaccagctcttagaaacaacagatatattcacacccagtctgtaatatgtatttcttcaggcatgtcacactgcggtcttcctgaaagactacttacttcataaaggtattatgtttctttaattaatggccactagaagttaggaagctcctagggaccaggatatgagatcttaaagaggctgtcagaatctcttcatttgcatgacatagaatctgtggtggagatgttttccctgatgtttttggagggttggactgtgttgaaggctgtaccttggtgggggtggtctgcagtcatgcagtccactgatagggtcccccaccccgcaagcttcaataattgagctttctgttaatttcttgaattatcttttcaaaaatggtttggcagcacttgatgacattatgttcaaaattaagtccagtaaaatatataagcatttgtaaactataattatagtttaaataagacttagtttaggaaatccaagttttgacatatataaccaaacggcctaagagttcaaagctattttcttaggtgttacaccttagcatttacataatgccttctccccaagcagtttcatgtggtttgcagaaagttttggcagctaccagtcactatattgctggagttttgtgtttgagtatgtcatttatgtcatttatcagcagtatctgccagttgtgacaaagccctccctattatcctgcctttcctggaaaggatacagacccaagaaaagttaacatctacatagtacttagaatttctaattttaaaataagaaacaaaaagcacatttaaaataatattttatgcttttggagacaggacccacatgtatctccttatttttatacttgccatagaaacaagcctagttgtaggcctacagtgggtgctttgttaactgcttgttgatggcttcctgacatccatccaaatgtcacttttacagatgctgtcacccgttaaacaggtgtggcagaagtattccatgactgcattaggaagaatgcaccttatgggttatatctcttttggtagacagcccacctgctcttttttgtccccaccctcagcccaagcaatgtgaagacagattatggcaacttaggagctccatgtttccataataattcataactttaagagtcctccagacttacaagattacttcatggtgaaagtttggattgatcaataatttattcctataaaggtctgcaggattttttctgtaaccagaaaagtaactgcatagccattctttttttttttttttaatttgttgttgtttttgtttgagacagagtcttcattcttgttgcccaggctggagtgtaatggtgcaatctcggatcactgcaacctctgcctcccaggttcaagtgattctcctgcctcagactcccaagtagctgggcttacaggcacgtgccaccacacccagctaatttattgtatttactagagacggggtttcaccatgttgatcaggctgatcttgaactcctgaccccaggtgatccacccgcctcaacctccaaaagtgttggggttacaggcgtgagccaccgtgctcagcctgttttttatttatttttttgagacagtctcactttgtcgctcaggctgaagtgcagtggcgctatcagctcacagcagcctccgcctcccaggttcaagcaattctcccaccttagcttcctgagtagctggaactacaggtgtgtgccaccacacccagctaatttttgtatttttttggtagagacagggtttgaccatgttggccaagctgatcttgaactcctggcctcaagtgatccaccagtcttggcctctcaaagtgctgggatcacaggcatgagccaccacgcctggcccagtctttttttttaattattatttatttttatttatttattttttgagacggagtcttgctctgttgcccaggctggagtgtagtggcatgatcttggctcactgcaacctctgcctctgggttcaagcaattctcctgcctcagccttctgagtagctgggattataggcatgcgccaccacaaccagctaattttttatatttttggtagagacacagtttcatcatgttggcccggctggtctcaaactccttacctcaagtgatctgcccgcctcagcctcccaaagtgctgggattacaggcgtgagccactgtgcctggccagtcttttattttaaaataaatacttagtcctaacctagtgaattatcaatagcatttaaaattccttctatcctgataccatgaacagtaattttcccttttaagttatgatttgactctaattttgggtcttgtatctggtctttaaacacctttcgttaccctttggaatagaacaatcatgctactgttagcaaaattattgtaggcataaggaagagctgtgagttcaaagaagattgtgagttcttggaatagtattttacagcgttgtttattcttgaccttcttgttttttaagcttagagtttataagaaaaaagtgaatatatagctaattatagcattttagaaaaaattagctctgcagatagtcaggccccatacttcttggctcattactgattttaataccttcatgagagtattaaggttgaaaggaatggtgaaatttgcattatcagaggtctgatatgtaatttattgtaaagaaattaaatatatagaggctcaattaaaaaataaccatattctcaaacctccattaccactaatatcttggggttgtcaatgatagactatatatatatgtatgtatatgtgtgtatatatatatatatatatatatatatatatatatatatatatatatatatatatataattttttttttttgagacggagtcttgctctgtcacccaggctggagtacagctcacagcaacctctgcctcccaggttcaagcaattctgcctcagcctcccgagtagctggaattacagacgcctgccaccacacccagctaatttttcgtattttttagtagagatggggtttcaccatgttggccaggctgatttcgaactcctgacctcaaatgatccaccgacctgagcctcccaaagtgctggccttacaggcatgagccaccacacctggcctagactataccttttatacactttttaaatagagaaagtgaaaaatgataaactaaccattataaaatagaggtttgagtccacctgtattttacagaaatttgccctcaaatgtttgagagggaagtcacatatgatagaaaaatatcttttcaagggtagaatgatatttccttataaaagtgacaatcaaaaaagactcatttgtatacttgccaaagtttaaaagttttttacattccttaccctaaacccactgccccatccacccagaattcagaaagggtttggcatagatccagggctccagggcccaggtcattttgttattagtctagggcttttgtcctccacagtctaggcagggcatctttgtatgtgtgttgctggttggggccagggacgggggcaggcgggagttgtccaggtttaagattgtttgttttccatcagatccacaagcaatatctgtgggctgaaatccaggttatacctattcactatgactttttttttttttaactttctactgtaattatttcagttccccgaagttgtatctcaaatgttggggaaatgctgccttgactattttactttggaaggttttactagatatcagtttagtagattaatgacgttgttaatctgtctgctcaaaagacaccagcaagggggtatactttgctgaactgataaattattctattaaggactaacccagtacttggcaaaattaggaataacttttcccctccttctttactaataaattttccaagttgcatactgttgttgcaagtttctgtaatttttttctgtatacctttctattgtctgaatttaaataaaaatgtttctaataatatc

SEQ ID NO: 9340 - DNA, 3846 bp, Homo sapiens
cagagggcactccctgctgccttggaaaaagcacggggtcctgctccagggaatggtgaaatgactggattgctctttatccagcccacagcaggggaaagaaaggcaactcgcaaagatgagatggaagaaggcacgtgagcagaggaggcagctcccaaagagagggctgctcagggggcttcccagatgtagctctcagcagtgctgttgagacttttgaaaacaactttggtacacaaaggcagctttgtgagcagagctccttcccctctccccgggaacggcagggcactgggacctctggtcggtgcctcccacccactgcagccctagtgccttagctccatgcccggctgcagccccactgctctggactatggattggacgtcagagcatattggaggttgcctgtgtgttccccacccatcccttcggtaacactctgccacactaagctctgtacaagcatgcaccaacagtccttagttttgtgctgtgcactggcctctcggcaaaggtggtttccctcatcaccttcctgatggtgtttggtcagtcacctgtcagggtttgtgcgggttgggccccaaaacagcatatgctgctctaagtctgctctctgcatgttttagaaacaaagtggcaagtctgccctgaacctgtaagcatcaaataagcatgagagagaaaaaaacatgatatattgctttacttaataggttgaatatggtaggtctttgaaaatatgatgattcaattttctcaattttctttgctttaaccaaaattctaaatgcagttttgcctagttccctttttttttctttttttacttttttttaaacgtttgtaaaaacctctttgaggatgaggagtcagtaaaattccactccccaagtggccctgccccagacaaaggttgctttccccctttttgttctttttatgcccccaagcactttctgcagtagctagagggacaggtttccttccaggaaggattcgagttcctgtgcctgtgggtattaggagagtatatatcctgcctgaatggggaagtcttctaaaatgggaaagaagtggtttcatctccacacagtgtcttgtaaatctcaacaaatgtgtactgttagaagtggcttccgcttactggattaactaatactttataggcttttcaggaggccacatcactagcagtagggagaacaagatgtcatttgtgttcagtgtaagctgagtaaacaggcccttcctagagtgtcctggaaatcacagcaacccattgaaaactgccctccccaccagaacgtgctacgttctttcttcatgcctatgtgtgctccattcctcatttctacttggctcaagaaaacatttctgcagtcaggtgagacttttacaaaagaggagaaaatcaatgcctccttgaacatgatgagatgtgagaacttacaatgaaaaaggcaataatgatagaaattatttcttaggtacagcaatagttgataggatgtgagggtgttaccttggggtgaagtggagaaggtcccaggtgaattggctctcatggaaatttggaattacaaaataaacgtcctgggggttacccagaatacagatttaaaagtttgcctgtagagcaaaataaaacagtcagttgtagtcattaatccttgaggcccaacgcagccgatgggttggtgtttgggaaattctgagatgggagtgagatctgatcggatcctgggaagatgtatacccagttagaacgtgtagggttctgggtccctggcaagtctaggtgggcgggtgacagggaaagcatgggcatttttgtattgctgtcacatgctaacagaggtttgtaattatcttttggacccaaattatagagacattcacgagttttctagccctcacagtaacagagctaagaattcagatgtcaggaagtctgtgaatcttgatggattttctgagaaacctgactcaatggcatatataagagggaagtaagacttttaagaaaagaaaaagttatgcctcattcctcatgtggcttccaataagtatcttaggaacttatttcctttttaaaaaatattttttaaatttttaaaatttgattttaaatttcaaataaatttaaataaattttaaataaattttaaataaaattttacagagacgtggtctcactgtgttgcccaggctggattgcagtggctattcgcagttgtaatcatagcacactgcagcctcgaatttctgggcttgagcagtcctcccgtctcagcctcctgagtagctgagactacaggtgcacaccaccaagcctggctttatgtatttatttctgttcatgcggaatgattggttcagaactgttcctttcccttccatgatgtccttgacacagaaggttatgcctggctcccagtcaggcttcatacttttggtccatgtaagtgctacccgttgctgggggaggagtcatggtttatttggaaatgtcagttgcaatcatggttctgtcatttgactgcacagtatcagaggagcctgttaacctctctgtgccttagtttcttagcccatgaaagagatcattgcctgacccagggactacctcaagggcttttgatgaggacaagtgacagtaggaagatgcaagagcctttagtaccaaggttctcaacactgactacatgctggaatgactgtgaagcttttaaaaaatgttagtgcccactcttcccctgtacccccggacagttaaatcagaacctcagacagcaatatgccttgagatgccttgaaccatgcttgagaaggaaggacaaacacattattatcttggaagaattgcataaggcttatgacttaaaaaaaaaaattctttttggaaacacaagcatttctttaaggatgaccggatgttgccgtatgtatttatggcacaagcaggtgttgtctaagcagtttctctgtttgcttgtcatagcagcatttggaaactcaaacatgctttcatttacataaatagtttatgaagctttgacaacaaatgtaaacagacacgaaattataaatctgctaaatatgtattaagggtattaattattgaaagtccctttccccaaaactcaactcctatggcaattatgaactccattttaccaagaacatttaagtgcctcagcatctgtatgatatagtggagcaggtgctgacataggtaccagctgacatgatgtgtcactagctctgtgggatgattgccacatacatggaacacctgggagtgctggaaatgtactgtgatcgaagtgacaaagtgtgttttcattcacagtggaggctacatcaagcaaggggaggtccagccctcttgcaagtgtggtgagaggctctactagcaaagacatgggcaccggagtaggtcccgtgtagcatgcgggtgctgtagagaaaattcagtgacgtacatggctctggttctggacacaaaatctgtactggagaggaaatgactgctgaaataaggcgattgtatgaatatttaaaatgcctggaacactaaagtaaagtaatgatatttcaagtgtttttgtgctctttggttcttgttgtaggtattgactgtcctgggatatcactggtcatttaaattcaccatataattagccgggcatggtggcatgtggtggtggctgaggtgggaggatcgcttgaggctgaggtgtgaggctgcagtgaaccatgttcacaccactgtactctagcttgagcaacagagcaagaccctgtctcaaaagtaaataaataataaagtaaat

SEQ ID NO: 9341 - DNA, 2102 bp, Homo sapiens
cttgatgttgaccttttggattaagaggactatcagattaaagcaaaatgtaattttaattcaatgaagatatcattaccaggttactcttgagatttttcaacggtgttagaactctcaaccaagacctgaaaaccaagtatgcaaggtttctgaatctctctggtagattaactattgacaatgattttctgttatctttgttcaaaaagttcatgtcttctcaaaatatgaaatattgataaatggaagagcatacggtgacaagtctcctttccaaccccaggttccctacaccctgctctcagcaggcagtgagtgtcacacacctgttaatccatcttgagcaggacagtactatacaaatagaatgcaagctgtaatgtaattttatattttcttatagccacgttgaagtaaaaacaaacaggtacagtgttttttaccagctttatagaagtacagttgttacatatttaatgaatacaatttgatgggtctgactatatgcacacacctttgataccatcaccacaatcagggtaataaacatacctgtcatctccacaagtttcctcctgcccctttgttttttgctttttggttgctgttgagtttttgttttgtcttctgtggtaagaacacttaactcaagacctaccctcttaacaaatctttaagtgcacgatatagtattgttaattccaggcaccatgttgtacaacagatctttagaccttacttgtcttgcataactgaagctttatacctgttgaacaactctccatttccctggcccctagcaaccacccttctaccctgtttctatgagtttgactattacagatatctcatatagtgggatcatgcaatatttgtcctgtgactggcttatttcacttagcatagtgaaataagattcatccattttggaagccaggcatggtgctgtgcatctatagtccctgctatttgagaggctgaggtgggaggatcatttgagtgcaggagttcaaggacagcctgggtaatataggaagaccctgtcttgaagaccctgacctcaagtgatccacccacctcggcctccgaaagtgctaggattacaggtgtgagccactgtgcctggcctccggtgagtattttatatttagtctacacttccatacttggcttttttctgcttttatattgatctgctttcatagcagtgtgtagagtgccacttatgttttctttcttgtgtacagtattttattgtatggatttaccatcccctgtgtatttaagttgttccattctttggccattataacttttttctgcaaatattctggtgacttatctttggccattataaactgttgataatagatcatcttgtatatacttctgcaattataagatgttttttgatgatgaaagctttcctaaggtaattctttcctgagtttggttcagatggtctgtcactaattataaggcagataggaacagacagaaaaatctatcatttcaagataggcttagcaggatgggcgcagtggctcacgccactaatcccaacattttaggaggcctaggcaggagcaatcacttgtgcctgggagttctagactagcctgggcgagacttcatctctacaaaaaaagcaacaacgacaaaaaaaattagccaagcatagtggcacacccctgtagtcccagctacttgggaggctgaggtgggaggattgcttgaacccaagaggtcgaggctgcagtgagccaagattgtgccactgcactccagcctgggtgacagagcaggaccctgtctctattttataaattaaaaaaggctgggtgtggtggctcacacccataatcccaacactttggctcagcagattgcttgaacccaggaattcaagtccaatctgggcaacatggggaaaccccagctctacaaaaaaaattagcctggtgtggtggcacatgcctgtagttccagctactcaggaggctgaggtgggagaatctcctgagcctggaaggtccaggcagtgagccaagattgtgccaccacactccagcctgggcgacagaatgagaccctgtctc

SEQ ID NO: 9342 - DNA, 151 bp, Homo sapiens
ggactcctctgacggcaggaaaactggacatgaatgactgcccccacgcccctcccctgcagagtggccagatggagtcctgagccctggacatgggcccggctttcctggatatcaggacttccaataaataaagactctgtatactggg

SEQ ID NO: 9343 - DNA, 796 bp, Homo sapiens
agctgtttgagattaaaatttgtgtcaatgtttgggaccatcttaggtattcctgctcccctgaagaatgattacagtgttaacagaagactgacaagagtctttttatttgggagccagaggagggaagtgttacttgtgctataactgcttttgtgctaaatatgaattgtctcaaaattagctgtgtaaaatagcccgggttccactggctcctgctgaggtcccctttccttctgggctgtgaattcctgtacatatttctctactttttgtatcaggcttcaattccattatgttttaatgttgtctctgaagatgacttgtgatttttttttcttttttttaaaccatgaagagccgtttgacagagcatgctctgcgttgttggtttcaccagcttctgccctcacatgcacagggatttaacaacaaaaatataactacaacttcccttgtagtctcttatataagtagagtccttggtactctgccctcctgtcagtagtggcaggatctattggcatattcgggagcttcttagagggatgaggttctttgaacacagtgaaaatttaaattagtaacttttttgcaagcagtttattgactgttattgctaagaagaagtaagaaagaaaaagcctgttggcaatcttggttatttctttaagatttctggcagtgtgggatggatgaatgaagtggaatgtgaactttgggcaagttaagtgggacagccttccatgttcatttgtctacctcttaactgaataaaaaagcctacagtttttag

SEQ ID NO: 9344 - DNA, 70 bp, Homo sapiens
gaaactgccccattgaacgccttcctcgctaatttgaactaattgtataaaaacaccaaacctgctcact

SEQ ID NO: 9345 - DNA, 601 bp, Homo sapiens
actcagcctagaggtggcagcttggtctttgtcttaaagtttctggttcccaatgtgttttcgtctacattttcttagtgtcattttcacgctggtgctgagacaggggcaaggctgctgttatcatctcattttataatgaagaagaagcaattacttcatagcaactgaagaacaggatgtggcctcagaagcaggagagctgggtggtataaggctgtcctctcaagctggtgctgtgtaggccacaaggcatctgcatgagtgactttaagactcaaagaccaaacactgagctttcttctaggggtgggtatgaagatgcttcagagctcatgcgcgttacccacgatggcatgactagcacagagctgatctctgtttctgttttgctttattccctcttgggatgatatcatccagtctttatatgttgccaatatacctcattgtgtgtaatagaaccttcttagcattaagaccttgtaaacaaaaataattcttgtgttaagttaaatcatttttgtcctaattgtaatgtgtaatcttaaagttaaataaactttgtgtatttatataataataaagctaaaactgatat

SEQ ID NO: 9346 - DNA, 2062 bp, Homo sapiens
ggcaacgtgccccccagaactccctgggcagagccagctcgggtgaggggtgagtggaggagacccatggcggacaatcactctctctgctctcaggacccccacgtctgacttagtgggcacctgaccactttgtcttctggttcccagtttggataaattctgagatttggagctcagtccacggtcctcccccactggatggtgctactgctgtggaatcttgtaaaaaccatgtggggtaaactgggaataacatgaaaagatttctgtggaggtggggtgggggagtggtgggaatcattcctgcttaatggtaactgaccagtgttaccctgagccccgcaggccaacccatccccagttgagccttatagggtcagtagctctccacatgaagacctgtcactcaccactatgcaggagagggaggtggtcatagagtcagggatctatggcccttggcccagccccacctccttccctttaatcctgccactgtcatatgctacctttcctatctcttccctcatcatcttgttgtgggcatgaggaggtgctgatgtcagaagaaatggctcgagctcagaagataaaagataagtagggtatgctgatcctcttttaaaaacccaagatacaatcaaaatcccagatgctggtctctattcccatgaaaaagtgctcatgacatattgagaagacctacttacaaagtggcatatattgcaatttattttaattaaaagatacctatttatatatttctttatagaaaaaagtctggaagagtttacttcaattgtagcaatgtcagggtggtggcagtataggtgatttttcttttaattctgttaatttacctgtatttcctaatttttctacaatgaagatgaattccttgtataaaaataagaaaagaaattaatcttgaggtaagcagagtagacatcatctctgattgtcctcagcctccacttccccagagtaaattcaaattgaatcgagctctgctgctctggttggttgtagtagtgatcaggaaacagatctcagcaaagccactgaggaggaggctgtgctgagtttgtgtggctggaatctctgggtaaggaacttaaagaacaaaaatcatctggtaattctttcctagaaggatcacagcccctgggattccaaggcattggatccagtctctaagaaggctgctgtactggttgaattgtgtccccctcaaattcacatccttcttggaatctcagtctgtgagtttatttggagataaggtctctgcagatgtagttagttaagacaaggtcatgctggatgaaggtagacctaaattcaatatgactggtttccttgtatgaaaaggagaggacacagagacagaggagatgcggggaagactatgtaaagatgaaggcagagatcggagttttgcagccacaagctaagaaacaccaaggattgtggcaaccatcagaagcttggaagaggcaaagaagaattcttccctagaggctttagagggataacggctctgctgaaaccttaatctcagacttccagcctcctgaacgaagaaagaataaatttcggctgttttaagccaccaaggataattggttacagcagctctaggaaactaatacagctgctaaaatgatccctgtctcctcgtgtttacattctgtgtgtgtcccctcccacaatgtaccaaagttgtctttgtgaccaatagaatatggcagaagtgatggcatgccacttccaagattaggttataaaagacactgcagcttctacttgagccctctctctctgccacccaccgcccccaatctatcttggctcactcgctctgggggaagctagctgccatgctatgagcaggcctataaagagacttacgtggtaaaaaatgaagtctcctgcccacagccacattagtgaacctagaagcagagactctgtgagataatcgatgtttgttgttttaagttgctcagttttggtctaacttgttatgcagcaatagataaataatatgcagagaaag

SEQ ID NO: 9347 - DNA, 484 bp, Homo sapiens
ggagacaggaaactgcgttttagccttgtgcccccaaaccaagctcatcctgctcagggtctatggtaggcagaataatgtcccccgaaatatgtccacatcctaatcccaagatctgtgcatatgttaccatacatgtccaaagaggttttgcaaatgtgattatgttaaggatcttgaaatgaggagacaatcctgggttatccttgtgggctcagtttaatcacaagaaggaggcaggaagggagagtcagagagagaatggaagataccatgcttctaattttgaagatggagtgaggggccttgagccaacaaatgcaggtgtttttagaaggtggaaaagccaagggaacggattctcctctagagtctccggaaggaacacagctcttgacacatggatttcagctcagtgacacccatttcagacttctgacctccacaactataaaataataaacttgtgttattgtaaacctct

SEQ ID NO: 9348 - DNA, 1144 bp, Homo sapiens
tactgcccaggcctgcctgttcccattcttgcatggcaaggactgcagggactgccagtccccctgccccagggctcccggctatgggggcactgaggaccagccattgaggggtggaccctcagaaggcgtcacaacaacctggtcacaggactctgcctcctcttcaactgaccagcctccatgctgcctccagaatggtctttctaatgtgtgaatcagagcacagcagcccctgcacaaagcccttccatgtcgcctctgcattcaggatcaaaccccgaccacctgcccaacctgctctcctcttgccactgcctcttcctccctcattccaccttcccatgccctggatccatcaggccacttgatgacccccaaccaagtggctcccacaccctgttttacaaaaaagaaaagaccagtccatgagggaggtttttaagggtttgtggaaaatgaaaattaggatttcatgatttttttttttcagtccccgtgaaggagagcccttcatttggagattatgttctttcggggagaggctgaggacttaaaatattcctgcatttgtgaaatgatggtgaaagtaagtggtagcttttcccttctttttcttctttttttgtgatgtcccaacttgtaaaaattaaaagttatggtactatgttagccccataattttttttttccttttaaaacacttccataatctggactcctctgtccaggcactgctgcccagcctccaagctccatctccactccagattttttacagctgcctgcagtactttacctcctatcagaagtttctcagctcccaaggctctgagcaaatgtggctcctgggggttctttcttcctctgctgaaggaataaattgctccttgacattgtagagcttctggcacttggagacttgtatgaaagatggctgtgcctctgcctgtctcccccaccgggctgggagctctgcagagcaggaaacatgactcgtatatgtctcaggtccctgcagggccaagcacctagcctcgctcttggcaggtactcagcgaatgaatgctgtatatgttgggtgcaaagttccctacttcctgtgacttcagctctgttttacaataaaatcttgaaaatgcct

SEQ ID NO: 9349 - DNA, 1684 bp, Homo sapiens
agccagcaccacctcagagacactgttccctgctccagggtagacctgagatgaacctccctggaggagacttatttcaatgagtccaccatgacggatgaggcacctcctttccctgctgaaggacaaaccttgtttccctgtggccctcattcttgtgctccctgaagctttcctaatattgctgtgctccccaccacccccatggcagtccctccgcagccccagtccctggccacgcccaagggaagagggaggtgaggacttgactttcctcccagagctcagcccatgtcaccctccaggccccagaatccagagtggcctcatttcctagacttgctgagaactcagcacttgtttgagaaccagtgcttatgtggtgtgcccttggcttctgggggagagcttggggcagcagaggcccctgggcagcccagccaggggagccacagccccaaggatggtcttgctctgggaattaggtgaccttcctggggaggccccaggagagtgaatcagggactcttgagaaattcctaaccagcctcctgtgacccagggagcagggtcgctaaggtcctgcccactgaggggacagccttctgggcagggacctcggggggcttcaagggctctgcacggctgtggggccctgtgcctttgtctccttgtgtctcctttcccccgaagtagatgaaacagtctcacatacccaactgctcatcaacagagcagagctgatggcatgagtgagggctgggcggggtggggcctccagagctttgcagggaaccctggaaccctaggaacaaggagcctttgttccaacagagcagagaaggaggttctctatgttcagaccactggagaggatagagaggtaaaaggtggcgacagtttcccttaggggtctgcctggcaggagccacagctcaggagagttgtgagggatgggacggaggctggcgaccaggcgaggcctaggccaggctcgggagacttttctgtgctcctttctacacatgccttaaaccttccttcctgtggggtgcctggaccccttccccatctctggcagctcagagggtctctgctgctctcccctgggaaatcccctcatcctgccctctggctgcctcccagctgggcttgttctctgagggaggttccggagactcatggacttggggctctgcctgtaggaaggaggctgggccggagggaccagccaccattgtctctgttcagccaagtgtgcaagtaggctgcccgccaagagggggcctctgctacccgctgctgcctgccggctgacacactgcctccccagccttcctgctaggccaccctcctcccttcccatgcttgtaaccagctctggggcttgcacctccacaaagtaaggttggcccttggaggccatgtttgggtctccggccagggcctagggctaggccatgcacccaatgggtgcacaataaataacaggtcaacaaagagggaggtgtgtcagtgtgtgaggaagggaggtcaggcagctaggaccacctgcagtgtggcaggcttcatccctctttgctccaagtgtgtatgtgtgtctgtgcatgtgtgtagtgtctgtgtctgtgtgttcatgcatatgcaggagtcacacggtcataggccatcaaagctggaggag

SEQ ID NO: 9350 - DNA, 426 bp, Homo sapiens
cactagaggcatttcttatcaaaaggattggataataaaaataagtttctactgggtatatttcaagcatttatttattactttagttacgaattccaatatactttaaaatggtatttgttttacagcatacataaaatgtagcaaatcggtactgtaaaacatttaacattcatacagttatatataatatccttttttttaaagaatggtatttcacaaaaatgtcttttgaaattggctttggagtttacatatactgaacatgaaagtttataataatgatgatacaactttcaacattgtcattttttcttagaacttcagctgattgcagagatataatgattacattgttattaaatttttttaacacaagtaagtgtcaccattttatgacatgaaataaaaggttatgactgttat

SEQ ID NO: 9351 - DNA, 667 bp, Homo sapiens
gctgacatcgctggctgcccctttgggcggagaggggacctcaccagtttttttagtatcgcccacgcccagttccctggccaagtccgcagggccctcctagagccaggtgggagtggggagcgatccgcagctgctcactccaccttgcgcggcccatactgggcgtgtgcatctgaatcctgctggagagcaaacacgaacttctgttccctgcaaaatggttagaaagaaacagctggattacgttcctctaaaaaccacctgaacgtaaccttcgcagggcgtcaagtcatcttttcttgccttcggctgtggcttctgtggctttccggatttgcacatttcctggggtactatgaacgtgagtggggtattttgttctggcattagaagaaaaacaagcaagcaaacaaaaacacagcctccgatgccaaacatgttcccccttcttcacttccttggaactggaagtgttattcctaagtctagtgcaaaatgcttctactctctgtgtcttcctgatagggatgtttaatgtaagtaggatattaatttcagaacattgatttcttatctgtgtgtctgacgtgccatctttaatgttaaaattaaggtgttaaaattaagcctagttatatagacgaaataaaatgctaagtcacta

SEQ ID NO: 9352 - DNA, 1260 bp, Homo sapiens
ggggctggggctaggggtgggtggagcccttttaaaatacccttcccttcaacaactctccagctctgaatggagaaactctctaggccatcccctcttctacctcctgcaacccacccatcctattagcctcccacattcaaggcccgtgatacagggatgaggtcagcaccagcaaactctggactggtggaagaattccccaccagatctccttgaagcagaattagggatcagcatcattaacaccttccccaccccctccccccaggcagacagtgaagagaatcagaaaacatgattatgtgtcactttaatacaggaaatttaggtgttttttggtgtttttgtttttgttttctttccaaagctcacctcggggacaattccttgggcttctcctgaggtaatgattacccccccacccacagctgagtctgtgaggccccatcctttccctacgttttctcccatcttttttcctcttcaatctcccagtcatctggtttgtttgtttctttgttcgtcctgagacggagtctcgctctgtcgccaggctggagtgcagtggcgcagtctcggctcgctgcaacctctgactccctggttcaaacgattctcctgcctcagcctcccgagtggctggcatcaccacgcccagctaatttttgtatttttagtagagacggggtttcaccatgttgcccaggatggtctcgatctcctcacctcgtgatccgcccgcctcggcctcccaaagtgctgggattacaggcatgagccaccgcgcccggccccaatcatctgtttttaaacaatcgtttttgagcagatagctattcattccagatttccgtgtacccactctgtttcaggagctcttctaggtaaagctgagatcacaggaacagcaggtgacaggcctagctatagttaggaatacacaagcggtaaaatcgagtccttacagccataccacaaggtacgtccatttggactacaagaagagcttcctttaaagttcctatttcagcataaagaggctgtcctttttttttaggaatagtttggaccttgtgcctcctgtgggaggctgaggactgcaagaggagagctagcagatatgcctgttcacccctctctggtacttgtggcttgctagtatgtttttatgataatctcgggcattgtttgcattgtgtttattaatagggttttgtttttattgtttccttttttacagtaaaggctgaatgacat

SEQ ID NO: 9353 - DNA, 1135 bp, Homo sapiens
aattggcttcatagttattggggttagggaggtggggaagagataatctttctgattacctgttttgtctggatggctggttttgaggttttaaacctgacttgaaatagtaacaccaaacatgattatacaggaatattttaataagtgtatcaccatgcagatgtagaagagagcgaaagtgattgtgtttttctttagattgaatatttgaatcttatgtgtaacaaaaagaagtgggttttagttctttctgtgccctgatattttgtatattaatgaattatccaagattcgatgggatttatcagtgtgtagatagctctataatgcttgaattgtacacttctaagtgtgcagtgcaagagcttgtttatatttcatactttttatactttgaggaaaaaaagtcaaagaaaaattgtatttgagggaaaaaaccatgaccaagtaaaggataaattcaaaaaatagcctcatgagacttggcatacacactcgtgggattccagttattatggagtgcttccatccctctccaccccttccccccaaaaggttttctttgcaagtgcttttggaactaagagctagtatcttggattaactgatgcctgctagtgctttctgattactcgcattctgtttcttgctttaaaagaagagtaaagacaagagtgttggaccagtattgcagttctgtagtgtcatttcttataaaaaacaaaacaacaacaataatttatcaaaattggcatatttaaagcctaacattctaataaaggcacaaatttctttttaatacttgtttcagcctctttaatctctttataagttaactaataaatctattttcttcagacttctgcaatagttctttaaaatcacaacagttagcaagctgacttttgtaatgtgctcaatacaaatacttgtgaacttttaatatgttgagtgctttcattttgataactggatctccatttgatattttcatttgtataactcatttgcagtctgaaaattttttttagtgccagtccctgaacatatcattgaaagttaattttctttgcattttaaaatatctggattatgaagaaaaagtgatgaaaataaattaaaactgaattac

SEQ ID NO: 9354 - DNA, 2015 bp, Homo sapiens
tggactgtatttatacagaactgaagggaatattgaggctcaatgaaacctgacaaagagactgtaatattgtagttgctccagaatgtcaagggcagcttacggagatgtcactggagcagcacgctcagagacagtgaactagcatttgaatacacaagtccaagtctactgtgttgctaggggtgcagaacccgtttctttgtatgagagaggtcaaagggttggtttcctgggagaaattagttttgcattaaagtaggagtagtgcatgttttcttctgttatccccctgtttgttctgtaactagttgctctcattttaatttcactggccaccatcatctttgcatataatgcacaatctatcatctgtcctacagtccctgatctttcatggctgagctgcaatctaacactttactgtacctttataataagtgcaattctttcattgtctattattatgcttaagaaaatattcagttaataaaaaacagagtattttatgtaatttctgtttttaaaaagacattattaaatgggtcaaaggacatatagaaatgtggatttcagcaccttccaaagttcagccagttatcagtagatacaatatctttaaatgaacacacgagtgtatgtctcacaatatatatacacaagtgtgcatatacagttaatgaaactatctttaaatgttattcatgctataaagagtaaacgtttgatgaattagaagagatgctcttttccaagctataatggatgctttgtttaatgagccaaatatgatgaaacattttttccaattcaaattctagctattgctttcctataaatgtttgggttgtgtttggtattgtttttagtggttaatagttttccagttgcatttaattttttgaatatgataccttgtcacatgtaaattagatacttaaatattaaattatagtttctgataaagaaattttgttaacaatgcaatgccactgagtgctattttgctcttttggtggagaaggcttttttcaaaactcttggtccttttacttctttctctcagtgcagaatcaattctcattttcatcgtaaaagcaaatagctggattatttcatttgccagtttctatttagtattccatgcctgcccaattcatctgttactgtttaatttcaattcttctggtgagaattagaaatgaaatattttttattcattggccaaaaagttcacagacagcagtgtttgctatttactttgaattgaaggcacaaaatgcatcaattcctgtgctgtgttgacttgcagtagtaagtaactgagagcataaaataaacctgactgtatgaagtcaatttaagtgatgagaacatttaactttggtgactaaagtcagaatatcttctcacttcacttaagggatcttccagaagatatctaaaagtctgtaataagcttagaagttcagataaatctaggcaggatactgcatttttgtggttttaaaaaagtccttaggacagactgaattatcataacttatggcatcaggaggaaactttaaaatatcaaggaatcactcagtcaccctcctgttttgttgaaggatcaaccccaaattctgggtatttgagtacatgtgaatcatggatttggtattcaactttttccctggatgctttggaatcgtgtcttccatgctccactgggttcaatttaaaataggagaggctttctcttctgaaagatccattttaggtctttttcaagaatagtgaacacattttttaacaaaataagttgtaattttaaaaggaaagttttgcctattttattaagatggaaatttctttttaggctaatttgaaatccaactgaagctttttaaccaatattttaaatttgaaccactagagttttttatgatgcaaatgattatgttgtctgaaaggtgtggttttattgaatgtctatttgagtatcatttaaaaagtatttgccttttactgtc

SEQ ID NO: 9355 - DNA, 1654 bp, Homo sapiens
acacatgccttcctttcatcttgaataactttgtcctaaaatgaattttttttccccttgatttaacaggatttttgtagactttagaatttggacttacctaacaagagtataaattgacttgggttgcaagcactgagcactgttacttctatcacgtctctcttttatttctgggatataaaacaggctttaagtttcttggttgcccaagggcagagcaaggaatatctggtgtttcttgtgatgataatattttaattttaaatatccctccctcatacaagtgtatgttaccattttaatataattctttttgtacctttccttcttgttttgcgaagatttttgtggcatggattgctgtgctcactgctgtaaaaggtgacctagtgtactgggcagctggtggcggtgcagaaaagagtctcaggttattttttgtttttagttatttcttggaccttgacagtatctaatgactcctcctgaaaatgctgcagtataaaagagcaaagagctttgggaaatacctaagaagcaccttaagattagggtggcattgcttttatagattcttgattttaaagcaacaggcctttctcaggtgttgcattttttggagcaaaaactatgggttgtaatttgaataaagtgtcactaagcagttataacgtttgatggctggggggtaggaagaggatggaattgagatgtttgagcctcatttacatcaatagaggtgtaatgtactgcatttcttcatttggtaacataacaaagactttcatacaaagaacgatgatgctcctcattaagatttgtttaattcaaggtggtttggatttggtaagcctttgcactctgtagagtacttagaagacaagggcaacttacttggagttagagccaagctgtcagacggtgcccagcacacattaatgttagcttctttctgagaaaaaaatacctcttccaggccctgaaacaaaaaatacatttgctgtgaagattgaaaatgaacaaagttagaaaaaaaaacagcaaaatcagtgatttagtcagatgagtttttcgttgtaggagcacttgatttctagtgtgttttgtacagtatataactacaagatagtacattttgtagcagttcaaagccaaagttgctagcatcattttgctgttgtgccagttaatcataggatcccattaaataagtgtgctaacatcgaatatagagaaaactggtaaagaacattccagtaggaaaagaaaagaacaatcttccatttctgggcttggccaccatcaccctggtcggacctgtcctggacttccaaccttgactgctgagctcctggcttagcttcttgggttcctaattcctggtgtttaataattctctccacgatcatgtttttctgattttttttttcagaaataatgttttttaaaagacaaaaacaaagggaagaatatttaattactgagcagaagtaaatactgttggcattttgtacataatctaatttttatatgcatgttcatgctttttaatttttttatcaaaaattaagtcatctacctactacttgtaaccagcttgtttcataacatgttattttcctgtgtcattaaataattacttcaatgttgt

SEQ ID NO: 9356 - DNA, 1698 bp, Homo sapiens
agaaggcaaaaaatatcttttgtacagaaaagcaagatgaaaaggatgtgaaatggtagatataccaacaaaacttcagactgtaaaattgccaggatgcagttttccccttgattggcgtgtgtgtatatatggataaatatatatatacacacacacatattactgcaatctgtgattgcttcatctgtaaatcagttgtaaacctttacatatttgacttaaataactgtaagatatatatgtactacattaaaaagtgttgattaatagatgaaatttttaaattaattttttaaaacatgccatacattgtatcacaatgttaatgtgccaagatattgttcctgtcatgcagagtataagaatgctttgaacaatttgtagacttagtgaaataaaataagaggaaagccaaaaacaaacaaacaaaaagcatatggggagctggtattttctctttagcttactgttgtgcctttttatttttctaatcacagcagtatgagttatgagtgccctaatttgtggttagtttctaatttaatgttgtttcatagagtttggagtgttttgatacagggtgaaaatgaacttctggtttcaaacctgcgttactggagacagcccaaagagtaattttctgttttgacaggttttactggaagtatatgtgatgagcagaagaggttatcagcattaaattgttttggttctaaatttggaacagtatatataattaaaagtaaggaacattagaggatttaattagaataaatacatgttttggaaatacagtgacctcttgcagtgtcacaaaagtgcaaagtgatattagctgtcatctgcaatacagaatctcattgcttttgcacatggagcatataggaaactccaaacagatcacaatgaggtttctaaatctgttgggttctgtcttctattgggttctgtgaagcaaaccactgtagctttagctgggttcagtcatatgactcgttggtggaatgcctaggtttttcatcttacatgcagtcttgggggtggatgaatacataatttctcatgtattcgtgtatccattagtgaatagttcaagtctgtttaagagtgtattgagatggcattctctgcatgttaaagatcttaatggcaaccagcacctcttaagtatggtttaaacatattcttagctaattttttccattagtttttgaaattggtggcagttgtctgatccacaagggcaagatcttctgagtactctggggtgtgagtatgtgtgcacacgtgtgtgttggagtgagtgagagaatgtgtctgtgcatgtggccatgctttcctagaatgtcaagtagatatttttacactttgagttttaaagcaattactatcagactgagatcttgtatgccaaactttaatctgcttttatgttttcaggctgaaggtgtgaaaatcctaagaggatttcatattgaatatgtgtacacaatcttaactatcgtggtggaaaacatactactataatttattattatatcttccagataatgttattcatttagaacaaataaggtatattttttagaatcaactttgtaagcactataaaatctttaataagttataaggtctatgatgtgtttactttaaaaattgctgttaaaagcaacacgtattaaatatgtaattatc

SEQ ID NO: 9357 - DNA, 140 bp, Homo sapiens
cccggaaaccctttcacttctctgctcccgaggtgtcctcgggctcatatgtgggaaggcagaggatctctgaggagttccctggggacaactgagcagcctctggagaggggccattaataaagctcaacatcattggc

SEQ ID NO: 9358 - DNA, 2311 bp, Homo sapiens
ggtgcctgccctgggctctggaccccgggcacacgagggacggtgccctgagcccgttaggttttcttttcttggtggtgcaaagtggtataactgtgtgcaaataggaggtttgaggtccaaattcctgggactcaaatgtatgcagtactattcagaatgatatacacacatatgtgtatatgtatttacatatattccacatatataacaggatttgcaattatacatagctagctaaaaagttgggtctctgagatttcaacttgtagatttaaaaacaagtgccgtacgttaagagaagagcagatcatgctattgtgacatttgcagagatatacacacactttttgtacagaagaggcttgtgctgtggtgggttcgatttatccctgcccaccccacccccacaacttcccttttgctacttccccaaggctcttgcagagctagggctctgaaggggagggaaggcaacggctctgcccagagccatccctggagcatgtgagcagcggctggtctcttccctccacctggggcagcagcaggaggcctggggaggaggaaaatcaggcagtcggcctggagtctgtgcctggtcctttgcccggtggtgggaggatggagggattgggctgaagctgctccacctcatccttgctgagtgggggagacattttccctgaaagtcagaagtcaccatagagcctgcaaatggatcctcctgtgagagtgacgtcacctcctttccagagccattagtgagcctggcttgggaacaagtgtaatttccttccctcctttaacctggcgatgagcgtcctttaaaccactgtgccttctcaccctttccatcttcagtttgaatgactcccaggaaggcctagagcagaccctttagaaatcagcccaagggggagagcaagagaaaacactctagggagtaaagctccccgggcgtcagagttgagccctgcctgggctgaaggactgtcttcacgaagtcagtcctgaggaaaaatattggggactccaaatgtcctctggcagaggacccagaaaaccacactggctccaacttcctcctcatggggcattacacttcaaaacagtggggagcaacttttccaccaaagctacaaacctaaaatgctgctgccccaaagcacaagagggaagagcaccgccggggccacaggacgtctgtcctccagtcacaggccatccttgctgctccctactgactctagcttacttcccctgtgaagaaacaggtgttctcggctgagcccccaaccctctgcagaaccaggttgatctgccacagaaaaagcatctttgaagacaaagagggtgaggtcttcatgagtctcctgggcccaaagccatcttctgatggaaggaagagagtagggccagtgaaggctgcccagagagaatgtcacagatgaggctgcccctgccccccccccgccagggaggtttcatgagctcatgtctatgcagcacataagggttcttcagtgaaaagcaggagaagagcccactgcaaggatagctcattaggcacatgaccgatgcagggaaggccatgccggggaagctcttcctgcaggtattttccatctgctgtgccaaggctgagcggcagaaacttgtctcataaattggcactgatggagcatcagctgtggcccacagagagccttgctgagaagggggcaggtaaagcagagattttagcattgccttggcataacaagggcccatcgattccctactaatgagaggcagggagagcatgggcaatggagacccaccaatgatccccaaccccggtgggtactggctgcctgccctgggccagggaatggctccttataccaaagatgctggcacatagcagaacccagtgcacgtcctccccttcccacccacctctggctgaaggtgctcaagagggaagcaattataaggtgggtggcaggagggaacaggtgccacctgctggacaatcacacgaaaggcaggcgggctgtgtactgggccctgactgtgcgtccactgctgtcttccctacctcaccaggctactggcagcagcatcccgagagcacatcatctccacagcctggtaaattccatgtgcctctgggtacaaaagtgcctcaacgacatgctctggaaatcccaaatgccacagtctgaggttgatatctaaaatctatgccttcaaaagagtctctgttttttttttttaacctggtagacagtataaaagcagtgcaaataaacacctaaccttctgc

SEQ ID NO: 9359 - DNA, 228 bp, Homo sapiens
gagactggatttggttactgtgccatgtgtttatcctaaactgagacaatgccttgtttttttctaataccgtggatggtgggaattcgggaaaataaccagttaaaccagctactcaaggctgctcaccatacggctctaacagattaggggctaaaacgattactgactttccttgagtagtttttatctgaaatcaattaaaagtgtatttgttactttaaataa

SEQ ID NO: 9360 - DNA, 1078 bp, Homo sapiens
ccgtggaaattttaggccccctccagggacatcagattccacaagaaaatatggtcaaaatgggacttttccagcatgtggcctctggtggggctgggttggacaagggccttgaaacggctgcctgtttgccgataacttgtgggtggtcagccagaaatggcccgggggcctctgcacctggtctgcagggccagaggccaggagggtgcctcagtgccaccaactgcacaggcttagccagatgttgattttagaggaagaaaaaaacattttaaaactccttcttgaattttcttccctggactggaatacagttggaagcacaggggtaactggtacctgagctagctgcacagccaaggatagttcatgcctgtttcattgacacgtgctgggataggggctgcagaatccctggggctcccagggttgttaagaatggatcattcttccagctaagggtccaatcagtgcctaggactttcttccaccagctcaaagggccttcgtatgtatgtccctggcttcagctttggtcatgccaaagaggcagagttcaggattccctcagaatgccctgcacacagtaggtttccaaaccatttgactcggtttgcctccctgcccgttgtttaaaccttacaaaccctggataaccccatcttctagcagctggctgtgcctctgggagctctgcctatcagaaccctaccttaaggtgggtttccttccgagaagagttcttgagcaagctctcccaggagggcccacctgactgctaatacacagccctccccaaggcccgtgtgtgcatgtgtctgtcttttgtgagggttagacagcctcagggcaccatttttaatcccagaacacatttcaaagagcacgtatctagacctgctggactctgcagggggtgagggggaacagcgagagcttgggtaatgattaacacccatgctggggatgcatggaggtgaagggggccaggaaccagtggagatttccatccttgccagcacgtctgtacttctgttcattaaagtgctccctttctagtcctttttctgcccag

SEQ ID NO: 9361 - DNA, 191 bp, Homo sapiens
aagtcaccagtaggtcagtcccttccatttgctttccgtgggccactgtggccccttgcgtccatttacatgccagccatctctgcaattaaagtttctggataaaaaaatgaaatgtagaggatgtatatatcttttaagtgataattataaatcttatatttaaaaataaaatggagttaggatgatga

SEQ ID NO: 9362 - DNA, 329 bp, Homo sapiens
tgggctcatcacaaggacacttccagcttgtgcagacaccaccctgccattgagtctggagggccctgttggagcctttggacctatagctcacggccagaaaaatcactggctttggaattaaatagcttagattgtactataaccactacttatgaactcagggactatgagggactattcaggggctatgaatctgagcctttgtttcttgaactgtaaagtggagatgatgtaaaccgccttgcaagattgtagagttgggtaaggtcatgaacataagggcctggcacaaagggtgcactgtaaataaacagacatccctcctt

SEQ ID NO: 9363 - DNA, 391 bp, Homo sapiens
gaaagcaaaaagatctgggatatgtgttggaaaactgctttcccttatgttcactgtgccataatgctgctcgcaggaaatggcattttacaaaaaaaaaatgaagaactcaaaaaaactttgaaaacttcagcactgttgcactttatgttttaaaaaatgtcactctttcaaaatctataactcatgtatttgaagactgtttcatgctttgctccgaacaaatagtaaataactgagtatgttcagggtaatttatgaaattttgtggtggtgccatgcaatccccttttggtagaattgccacaaacaaggctcaaaattctcatcatctctgttatacacctgtatcatgaaagcaaaaagaagtaaacatcaggagtcagctctg

SEQ ID NO: 9364 - DNA, 4211 bp, Homo sapiens
gggcctgtagctggaatacgcatctctccagcattccgtcctgggatccgtttcagctagaatatgttggattcaggagcttgtccattatttgtaggtaaaaaaagctgcacgtagatttgacttcaactccgtaaaaaagacagctgtattttccgtccaactggaattgttgaatcacactgcatagctgcccaaaagagagtgtttggtcttgaactttctatacttttataaatgttacaaattcccgaaagaagggaatttctttttctggggtttccttcaaactcttggctccacctagcggttctatttgttcataacaacttcataacaagcctgcctctggtagtcaacagccttttgaaagctatttccatctagtatcagggtgagagcatccttgatctggctgcctgttagagaaattgcacttttcctgacttacctagaaatcaagaatttaggaaattaatgtggacactataaaggcagacttagggccaacttttttttttttttacaattattacaacactaaagagaagtttagaatatagagagtttttaaatgtctcccattcttttgatttcttactgtactggctatcttaatatttcaagtttacatcaagataaaccctgagaagaactacggagaaatcaaataaaatcctgtcatatttttttcaccctgcctttccacaggaagcactcacaggcaccacacacgtatcatgtaacttatcagtggggtgggttactgttgaagagaccctggggcatttacctcaggcatctgcactcctccgagcccggtggagaatgcaggctgctgtagtctcaggtaatgaaggcacagcacagcagtactccacattgtttcctatttggacatagacttcatttcctttcagtataagctgaataaatttagagctttcaaactggaaaaaaaaatgaaacaaaacaaatacaccaagaccaaaataggcaataggaacaggggtgaagggatgttgtttcttaaatacctaccatgtatgaagctatacacagcatataccgaaagaacctgcattgcactaggaattctgtgttagtttaaaagagatctctaaaacttccccatccctttgggcctgtacaaagaaattctggatgttaaaataatatatactcatcacagaaaaataaagtatagcaatgtccatctgtaattctaatacccagaaataacgctatttagctttataattttcgaatgaacaaggtaaacctcggttgccatggggaagaaggatgatgtggaaaccatattggtaaagttgttaatccctcgttatggagaactgatcttaagctatacctcctggaatttgctttctagttttctgtcctgcaatatgtatataattaagcactaatttgtactgcttagcataaaagaacatccagtcttagatccttaaaacttcatggattggactttcctgggctccttataacataatcgtgtgtccaggcaaacgcacactagtgtctgactggaaagctcaggaattttaatcttgcactgtttcccagggagctgtagtgattggaacccacgtttgcacaaaacatttttgcagaaggaaagtcaacacttcttgctggctgcctccccttagccattatgctaaaaacagcttctgagtttcactggtggggctcttgccagttcttaattataggacatattttctcaaagctgaaggtgacacctagaaccaggggcttgacccaggacatgatggaatgagcatcaaattttcagtgtcttggcaaccgtagatgtcctacagggttaccgttgtgctgctcaccacagagcagctgaggcattatgccttggaagacctaaatctcccatccagttcaggaggtgacaacatccttattttaaacttcctaaaattaggaattaggtagttggacatagtctgtgacctttatgtcgttggatacctgtattcttgacagttagaatattggtagggactttgttaaaattcacttgaatttcaagctcagaggaaactttgtctcatgccctgacatgaagtggcaaacacggaagttcatacttgaatgctgaattggccccgacagattaaatgcgtgttggggattggtttcctgtcatagctgctgctgctgccatgcgcagagctgctgtaacagctcttcctgttctgctcccctgagaacagtgtggtggggagaggcagggctgaggtggtctacgaatgtggcaggtagggaaggggagatgtctgtctcttgagaagagagaggcatgtgtgccggcatccttgatgggttcaaagagaaaggttggagatgatagtgggtgagaagcaggctggtgagactgggctgaggttggagaaggggcagccgggggcactgctgagggtttgccgtgcacgcctcggacggagcacggtggggtggcggggagcagatagtgctgcctccctgcgggcagacaggagaggaacctcaactcagtccatttcatagccctgataggggaagtgggagttgacaggatggtttaaaataagacgtgaaggtttcagttacctgctctagactttgcctgagaacttgtaaattaatcagtgagacctaatttgtgacatgtcagtagcatcatcttttgacacacaggaggtcatggtcatttcattcctactcttcaggagacactgctgaacagaggaatgattctgttccttgtgtgcttacttccttaacatttatacattgttttaagaaaaaacttttaaaaatatttcttatagtctcctaacatttgtctctagcctttgcctttgtacaatcacagatatcctatggagatttaaggatgaaagccctgagttgttcttgggttcttggatctggactacttgttatcttatgcttctcacttctggctaaaacttgcacctcttcttctcttagctaagccccaaaatgaagatttccttcagaagtcttgttagcagaattatttatcagtcacagagagaaaaatctgctatttttctaagtaagagtctcgagaagcagagtttttgtcttgtcattgagaggagtcagcagtcttgttctgtaaaggaccagagatggtaaatactgtcccactcagctctgctggcgcagtacagcagcagcagccccagcacagctgtgttcctgcggagtcccctttacaaagccgctgacccctgatgtgaaactttgtagagcagcagagtggctgcgtgaaacgggaggctggcaggtcctcagataggttctgcagtgttacctgtcacttggaggcagccaacacttctggacattgcatccttattcacacatgtggcagctgaacgaggtgctgttgtgggtgtctcagctctgagggtctttgtgagctcccactgttgtgggtgtctcagctctgagggtctttgtgagctcccactgttgtgggtgtctcagctctgagggtctttgtgagttcccaccaacttttaattattcatgcccttgaccatgtggttgcttggagacctggggtcttctgcagactgaagaagacacatttctagattatttgtcctttttatcctctcaaaaatttaaacactgtacctcttcagtggtcagaagaaagttggaaacttttcctacatattaggcgttagtatgaggacatttgtttgaattatagaaatttgccctgagctgaactgggttgtgttaacacattggtagagctatgattccttcccagttctaagagatacgatctgtaagtccctatgtcaccacattgcttgagatgatcattcagttacttgtcaggatttctcctcttcagagagatttttttttatagcacagattcctttgccccttttatctccttatctggatatgataagtggttatgagggtctcactaactattttgtgtttaccttttatatgtgtaaaactttgcagtagcatttaaagtgtaatttatttttctatcaagtgcactattcatttagtgtgttccagttttatatgacttgtattagaaacactgcactgagttgtttgtacactgaaatgagaactctagatgtaactctattcaaataaaccttcgtgagacattc

SEQ ID NO: 9365 - DNA, 1447 bp, Homo sapiens
gtgtcaaggtgacggatgaagccagctgctcctaaggacacagggctgggttggtaaagagaaggctatggttgacttcttgcttgtgcttcccactctccccgacttcattcactcaaacttctttaaatggggaaaaatatttgtgactctgtggctggcagaagaaataagcccatgcaagtggaagggctgctttgtcaggaggttgtggaatttctttcttctccccttcttccctcccaaaagcttagctatgtataaagtgccacagataggaaacagctgttaattacaaagagaaagaattgtcatagcatcttattttgttcctagttttataacattaccatccttcgttttgaactacagatgttgtagtgggttttggaggagggagtggagtaagatgccctcccacttttatcagtttagtagtagtactgagaaaaatcccttcagctctaagaacactgaaaaatccaccgattttttgggtaagcttcttggcaataccctgtggatctgaaacagctaaaaaaatgaatttgaattgcgccagataggtcaataccaagcttctgattcctcctcacatatgaaaagtgaaagttgtgagttgttttcctcttatttaaacattggcctattataatctgtgttggttatttttctcctgtaagcatcctgatttttctgtaggaacttttctttggcagaccaagtgaagactcaggaatggtgtgcattataaatgacacacattgccacttgtgtagatatttttaagttctttggctaagtcctctcctaactgcctgtcctctggttaggcccctccctctccactagtggtgaatgcatgtgtctgtctgatcagcatcactgcacacggaggtctagtgagcctcttgctaagtgtcacacacactcttcccaaagacgtgatgagttaaagttgtattctgaaatcatgaagccagagcctgtgccagaccttctgctacctctcatagaattgctctgtaattctaaatttaaaattagaagtagagagagataagccatcgcccctttgcctctgagaattggctgctgtttctaatataattattttctaagatagccagatagttagaaaaagattttcattgatgacatatctttaaactttcttgcatcagtattctaaattgagcaaactgaaagattttcatcaggaaaggagcactgtgggaagagcccagtattcacattttttccccatttttcagaagcgacatttcatatataggtgccaaaagtgaatcggggtgcggagagtgggaaccttttgaatttatgattgtcacagagatggtagaaattatgatctgactggaaaacaatcctgtatcccctcccaaagaatcatgggctttttttttgaataaaaaagcagacaaat

SEQ ID NO: 9366 - DNA, 1933 bp, Homo sapiens
cagtgcaaggcaggggcacggtggtggggcacggagggcagtcccgggtgggcttcttccagcccccgcgggaacgggggtacacggtgggctgagtacagtcattctgttgggctgtggagatagtgccagggtgcggcctgagatatttttctacagcttcatagagcaaccagtcaaaaccagagcgagaaccctcaactgacatgaaatactttaaaatgcacacgtagccacgcacagccagacgcatcctgccacccacacagcagcctccaggataccagcaaatggatgcggtgacaaatggcagcttagctacaaatgcctgtcagtcggagagaatggggtgagcagccaccattcccaccagctggcccggccactctgaattgcgccttccgagcacacataaaagcacaaagacagagacgcagagagagagagagagccacggagaggaaaagcagatgcaggggtggggagcgcagctcggcggaggctgcgtgtgccccgtggcttttaccaggcctgctctgcctggctcgatgtctgcttcttccccagcctgggatccttcgtgcttcaaggcctggggagcctgtccttccatgcccttgtcgagggaaagagacccagaaaggacacaacccgtcagagacctgggagcaggggcaatgaccgtttgactgtttgtggcttgggcctctgacatgacttatgtgtgtgtgtgtttttggggtggggagggagggagagaagagggggctaaatttgatgctttaactgatctccaacagttgacaggtcatccttgccagttgtataactgaaaaaggacttttctaccaggtatgaccttttaagtgaaaatctgaattgttctaaatggaaagaaaaaaagttgcaatctgtgcccttcattggggacattcctctaggactggtttggggacgggtgggaatgacccctaggcaaggggatgagaccgcaggaggaaatggcggggaggaggcattcttgaactgctgaggatggggggtgtcccctcagcggaggccaagggaggggagcagcctagttggtcttggagagatggggaaggctttcagctgatttgcagaagttgcccatgtgggccccagccatcagggctggccgtggacgtggcccctgcccactcacctgcccgcctgcccgcccgcccgcatagcacttgcagacctgcctgaacgcacatgacatagcacttgccgatctgcgtgtgtccagaagtggcccttggccgagcgccgaactcgctcgccctctagatgtccaagtgccacgtgaactatgcaatttaaagggttgacccacactagacgaaactggactcgtacgactctttttatattttttatacttgaaatgaaatcctttgcttcttttttaagcgaatgattgcttttaatgtttgcactgatttagttgcatgattagtcagaaactgccatttgaaaaaaagttatttttatagcagcaaaaaaaaaaaaaaaagaatacagttaaatgtattatacataattttggaaccaaagaggccaacagatcagttttaattttattagacggtgaggccatctgagatgaggtggacgttctgagcagtcccttgagtggcctgccaacgtttcagggtatgaatggattttgtttattcggtttgatgtgtcttttccatccttacacacccagaaggtagagtaaaaatgactatgatagaatgcaggtgtgtatccttaaatcctcatctttatgtttatttaataaagctccccttagattctgtttcataataatttaaaaccaaacaattttcccatagacttgctgttaaagtattgtacgtttgtgtacagtttaagaaaataaaagattgagtgccacggg

SEQ ID NO: 9367 - DNA, 1600 bp, Homo sapiens
aggcccgagcgcctggtgctgagtgcacccggaggggtcatcgctgcccagagcctggggattccagctgtcttgtctttttccaaaaaagtgttaaataggcttgaggggttgttgcgcaatggccgcttcagatgacagatgttgtaagagaaggtttatgggcatcctctctggtcttttggattattcctcagaacaatgaaaaaagtctccataggacaggaaggaatgcaaaactcatttacacagtgctttccagcctttggtgcttacaggaccgcgctgttccggcttcttcacggctgacattcggctaacgagggattactttggccaaaacctttcaaaggatatgcagaaagatggtagggagcatttgggtttgaatctgaatgctatactggatactctgctccggaaagatgagctttttattctactacttggaaggaaaaggaattcctggtccacctgaattcctctatgaagcctaactcttgaggtctctaacataccttgtcatagaggaaaagcacagattatacctggatgattcaggagcacattctgattccaggtttggtagagctggctcttctactccgtaaagccgagtctgggactggcagcccatccaagtgtatatgaatgaataaagcatccaagtatatatgaatgaataaagtatgtaagtatcaccagaaaaaggaaagaaaaaatgtactccttggggcaagcccagaagctgccctggcctctccagaccgtgtttacagtgtttgcatgtagaatgtagcccttcctgaaaagaagacttgtttctaaatacctcggggctgctggagccgctgtgggttagggatggactgaggcctcgaggagtgagggtgcacccggggcccagcctcaggctgccctagggatctctcagtaggaagaggaagttgcgtgtttacccaatcctgtttctccaatgcaacgtccacccactttaccaccaaaaactccagggcctgacggcagcccggtcccccagcactcaccagcagcccagtgttctccaccaagccacagtgtgcatgcctggtatcctccggattcccttccttctgcccgctgagtcactgggcagagaatgatgacatgtgtaggtggtgtggttgggggtggaaaggggaaggggttgatcctcaggactctgagggagcatcgttgaattttcctgttcagtgtgaccaagacccacctggaaatggaatttggaactggcttcaggagacatcattcctgaacacactgtagggtgaattggtgcatcttccccaccatacacacacacacacacacacacacacacacacacacacacacaccccaaaccttttcatggggaatgtgtggcaaccttgccaaacagcaccactcagagtgtgactctgactgtgaccttggccttaatgaggaacttcttaggagagtttgaggacaaggccaacatcgtcatctgggctcgctgcgtcccagcacatcaaactctgtccagagacaaggccaactgcaaatgaaagccagggaacattgctaagggtctgtggct

SEQ ID NO: 9368 - DNA, 2483 bp, Homo sapiens
gaggctctccttgctcctggccttgctgacctcagcggttgccaggaaggggtgagcacagagtgcctcttacggtagttaggatgctcagttgctaaacactgcgctttattttcttaaccagttgtggtgtgagtatcagaattgaaacacttttttgggggtaaaaaatatagcctttacatggacagaattttttttgttgtttcagtgaatatgcctgtaattcagtgtatttcagttccgtcagaaagtgtaaatgttagtttcttggtaaagtccttttcttgcttaccttgactgttgatgtactgattgagaagttcattgtctcgtttgtgattcttccagatgtgatgcttgatattttctatatgcgagttagccatccacacccaggcatagcctggatacagtataaaaatagataattaaaaagatggttgccaagcaaggaaaacttattttatattttcccttccttattttaagcattgtgagtaaatcagatgttgaattcttttgccaagggaattatagctgcaggttctctctcactgccatcaaactgtaaaagattaaactgcgaagtcaagctcaacagattattttggaaagtttttgtattaagggatttagtaacatcattttgttttccaccaggcagggagtagggcttagtgttttaaaacacctctgctttctgatgttgccttaatattctgctattgcagcaattaaaaattgtcttcatgtacatttggaactaacacgtgatgtgatatattcctaaactatgaaacctttttcctagtagtcagctagatcatttgttctgggagtataaagccacccacgtaagttaataagcaaaatcctgactattatgttgttagagaaaaatgctttgctttgtctggaagaaagataaaatagtgaattataaataagtcaggccgggcgtggtggctcacacctgtaatcccagcacactgggaggccgaggcagggggactgcttgagctcaggagttcgagaccagcctgggcaacaaagtgagactccatctctatataaaaacaaaaaccacgaaagcacacacaaaataaatcagtgggatttggtaatgtgttttagagtaagaaatttcaggttgttggtgactatcccaacagtcatgttttaaatgtacagtttggggcaagtcatgtaaatactgttggtggtcttccccacacgccccaattttcaggtagtactaagagtatgtgccaggaaactcttgctattgaattgagatgattaaaatggtgacttaatccgtagttattttgcacccactgaaaggaaagtgctttccagaataatatgaagtatctaaaagtgtcaccttttcttgcctgatcaacaatttgggcttcctgtttgtacaaggggccatttggcatacctttcacagcttttatcaggccaagttaaaggctgactacattttttcatcatgaggaaagcagttgaaatgaggcatgagttactgtgcattgggattttagaacaattttcttgtgacagctctttttgtgaagttaggttcttaaaagtgcccatgatggtcacttaaaatgtgcagtaatagcactgccaggatcaagcatgaaaggcttttaaattagatcatcccacagacaatacgtttgataatagttttttcttttaacctctttaagtattgattctgcttgagaatattgaagtacttgccagaagttgtggatttcagttttaacaaatgctattaaagtggagaagcacactctggtcttggaattccatttgaggatttagaagtgtcatgtttataactattcagttgtgtttgttgctggcttgttgtaaagcaataaaatttttttggtctttttgtaagtgagtgtgctgctgtaagaaatctcccatgtgcataacaaattctgaatattttttgaggctaaagaagaccggggtgacaagcagatactgctgtgtaatggttacactaaccaaaagacaccagccactcagagttctatactgtaaagcgcagataacatttgtgtgttataccttgattggggaattaaaagtcatttaactgaagatgttgagaaacctgggctctggttttagtataccggaattacttttttccaattttagaaaatcaagcaggttagagaaaatagagatgaattaggggacactgtcttatggattcatttataagaagagaaccagccatatacacttggggagatttgccacatcttaaacttgaataatagtatgagtaatgcttaagggagtttaatagagaaggaaagctttggcagtgttttgagaacttaagtggctaaagagatgagacaaacatgcaggtcgctactggcatagtttcataattgtgtactcggaaattaaagtttgcttgtttcttggtctggatt

SEQ ID NO: 9369 - DNA, 996 bp, Homo sapiens
gaaactgcagggttcctactactcttttttcttgttgttcaattatctcctccccctcttctctcctgtcttttgatttggtcattctctttattttctgcttgccatgtcttttctggaacatacttgcatccaccacagcatcaattcccttgatccagcccaagagaccaggcagccatggccactgccttcctctctgatgaacctatcgggtgaaaacgaccactcaagagactgacttcgccattcaagacaaggaagagacacatgtgtgcactcctgcatgttcagttctgtacttccagtttctaaaatgcactgttcagttttccaaccacttggtggttcaggcttgctttgaacctgagctcttaggcacatgacggtcattcctgacatcctccccagctcaagtctattcttaccatagaacccagggcagggagagaagaacctagaggcctggtttgctttggtggcattgtaaaaagagtaagagaggtttggtttgtggtggtttgctttctttaccataagcaatcccttgccttaactcatcaccctttttcactatgacccttagaccctgagtattttcaaatatatgattgctgatagtagtgaccaaaactactttgttcctttcttaccactctctcctggggccgacacgttgggacagcacaccatagcataaagctaggggatgcatggaaatagcagcttgaaactaggaggtaacaagaaagcttctaggaagtagatgttccatatcttcaaaatgcctcctccaattttgtaagaatgctagctaggtattcctgggattattatactgagatatatatatatacacacacacacacatatgtgtatatatgtatatatatatgtgagtatatatacacacacacacacacacacacatatatatatatacacacacgcacacatatatgttgctgcagcataaagaaattgaaataaaagttt

SEQ ID NO: 9370 - DNA, 527 bp, Homo sapiens
gggacaacagacttcacttccctgaatgcctcccccatctccatcaggaaaaatacaccccatcgcccagcacccctgctgataccaccagacagagagagagagcacttgattcttcccgagatagccacctggaaacactaggtgcctgcccagggaggaacggaggaggactcgcgctacaagaggccactcccagggacccagggaggcgatggccaccccagaggccaccttttgctccacggaggtgggagaaaatctgggcacatggggccccctgggcagtgcaggacaacatcagctcactggcaggaaagtccttgttgagggtgagggggtgctggggtacccgggggctggggaagcaaggaaataagtcatctgtatgctgactggggataatggcatcaaatgtcagtccttgacatttggggggaacagcaggtgccagagctaaaaggtacctttgtctgccattgatccagctcagaacgattggaaataaatttgaaatgtaaccgagc

SEQ ID NO: 9371 - DNA, 294 bp, Homo sapiens
cgaccctccctgcagggctgggcttttgcatggcaatggatgggacattaaagggacatgtaacaagcacaccggcctgctgttctgtccttccatccctcttttgggctcttctggagggaagtaacatttactgagcacctgttgtatgtcacatgccttatgaatagaatcttaactcctagagcaactctgtggggtggggaggagcagatccaagttttgcggggtctaaagctgtgtgtgttgagggggatactctgtttatgaaaaagaataaaaaacacaaccacg

SEQ ID NO: 9372 - DNA, 883 bp, Homo sapiens
gcggggggcgccgtccaggccgagcgcagactgtttaggactcagcagacccagcaagaggcatctgccctttccccagccacctccccagcaagcaacctgaaatctcagcagatgcccaccatttctctagatcgcctagtctcaacccataaaaaggaagaactgacaaaggggatccatcggccacccctctgcaggggcttgtgatggctacaatggctcctagacactcaacgacttcatctgtggcagggagagaggaggccggaagaacaacccctgaacaatggaggcctttctttcccgctaggctcccagcctccttcccgctacagaatcgctcatcggcgaggctcagcagaaagaccctgaaggcaggctgcaaatgacccagaagagggacctgggagtcctggtggggacggggagggagtctcaatactcctttgcagtgcaaggtactctgagtcccctctgtagtgcctctgccagacacacactgcctgagttgaagagacacaggccacacatttcaggctggttgccagcggacgtcagcactcacggcctgcagggactcagcacagctctggattctggatctctcctgctgtaaccccacgcacaagcctgcaacccccagagctctttgacaggctcccaggcctcccagtcctggacaagcatgtgcagtcacgggagctcagctcaggccagggctgggctgtgcacctgcctcccactgacccagacccacttcctccagagaggcctctctccgcctgagctatttcccttgctagtgtgcagatatttccctaacatgtccttttttgtatttgtttgtacggaccataaatataactgtagctttaagact

SEQ ID NO: 9373 - DNA, 1655 bp, Homo sapiens
ggacctcgcgccctcgccgctggggaagtacgcggagccagcgccgtcggagaccgcgccggccgagctgaggactgcacgccgctgtgcggaagcccgtggcgaaggccctgccctaacagcctgcgagtctaatccgggagcggctgctgccagcggaggcgacagcagcgttgggagctcctcgatgtcagctttttgtgctggacttggcacacgctctgaaaactgagattttgtcattgaactggtgacaggatgtgagacggttattagaagttgctttcgaagtaactgtggtcttaggttcggctgagtaaagaaaaaggatttttcttcgagttagctgctcttgtgatttttctcaggctgttttgtcattttaaaatccagtggtagatgtagcttagcgacggtagttttttgttttggctatactaagacttggaaattattctctccagtgtcagcgaatccagaagggtatcagattaaacaccgaattcagccactggacttttaaaagtacttaagatggtttatctcgggttttttcttcagttaacaaaatcataaatatggtgccttataacatgaaaggaaaattagttgtgtatttcacgacgaaagcgacggaccaaaagaaatttcctgccccaagaagcatgggatccaggaaggggcgcgtagatgcttaacggtctcttcggaaatcctgcaaatagaaagataattctagatccggaatacctgtatctggtggaaaccatggatttctacaagctcgaattattcctcattgtatagcctgctttgtaaactagtttacaatttgcaggctgatcttaagatttttttatatctaattgctgctgccttcattttaggttcagcagttacttttaactaccttaatttattgccagaaggtatgagcctaacattctgatgagtccagaaaactacgttttgtcagtagcaatacactaggaagtaaaatatatttagaatttaaacattgtgtgccagtggtcctcgcgcttgactgcacatcagttacttgaagagccacacctcagatcaatgcagtcagaacctgggaagtaggtcccagacatcaggacctttttaaagctccccaagtgattctacgttccccaagtttgaggaccacttttctgtgcattggcttgcacaatttgaaagtaatgcttttcctgagctggatcccagtgttgccttaacagggtgtctgtcgtgccgcagtagagcactgctgcttcctccaaccccaaaatttatgttcctaagtaagtcaggtccctaagccccgtcccaagaagtgacacaagtggccaacatccacactgtaggcttgcaggctacccgccctgagatttggtaaagaacactgccttgttccccatcagtaaacaaggttacctacctcaggaggctgcttgtgagagagcaaatgcagtatcttcagaatgatttatttttttaattaattgtaaagacttgtgccattggctgctctttctagtcccctaaatttctgttctagttttaaatttctctagaacttgcaatagttgggggttttataatgatgttttacaatgtttatttcttaaataaaaacttaaaaattc

SEQ ID NO: 9374 - DNA, 1668 bp, Homo sapiens
tctctggagaaggacaggaaatcaccccatttgaaaaacagtttttataataaatgctagttttttctgatctgtctatacaactgctgataagccggctgggcaggagtgccacaccttttgattctgagcatttgattctgacttctgtactctggtggccactggatctttgggattaaagctctgttggatttgtacctcagaggaagaccaagtggctgatcctttggactctgtaaagagcattcttctagtcagagggtggaatggcagcagcaactggaagaaaatgagttttttggtgcccacacccaagagcacacacatgctgcactgtctcggaaagcagggccagctagagccaccatgttcttccttacctcagtttacctgcggcctgcgctgcactgcagatgcccaccctgccctgggtctggccggcggaagctctgtccaaggtccacacacctccaggtttacgccaacatccttgtgccctccccaccttctcttccaacgcattaggtgcattgtttaattgaaatccaaccaacaattgtgtgtcaaggctggtttggtgcagtggctgggcaaattaattttgggccaggatgggggtgggttgcagtgagggtagggaaaatgtcaggagtaggaaggttcgggggttaagggaagggaaggaagaccagaactggccatcctcttttataatccattagtagcaccatggctcatttgaaatgaaaatattacacttattccccacccaaccgcagtgaactttctaggtaattgttttgaaaacaatttttgtatctgtgaaagtctttgctttttctttccaccttctagaaaagtctgctaccagtttccttactgaatacagccatactcagcccctctcgcatccagcccgtcagggtcagggtcagggtcaggctccctcaagacgagcaccgcattgtctgccctcttttgcgtaggatttttctctcagacccaggggacattgccttggacttttctctacaaatgccctcagatgtaagaccagaaatgattctgcttgtggaactcgtggctttctgtcctattttccttttatgtgagccctgcaggttgcctttggcgcccacaccagttctgtcttcatgtcgctgcatcgtgaagccccatttgcctttagtccctgctttgtgtgtcttcacttccacagccagtgttgcccctcagggcatactttgctggtgaacgggctgtagagtcttgagtatgttattggcctaagtgggcatgaggccccagcatccgactccatctgccaggctgcagggcacagcagcactggcatagacaggcacgctctgtcttccaacgtgcaccagccttttcttacatattttgcctgtttttaaaaaatacgaggagagggtgcagatggatactgtgccctcaccctcctaagccaggtaatatattgatgtgcagacttttaagaaatcttagtcttatcacaaatatcaagtaatttattttttccattttcaaatgcaaaagttagcctaggaagcctcccagtcatcctgaaggaccttttgactttgcttttataattctgttaaaaattgaggaggggattaatgagtacaatgaaaacaaaac

SEQ ID NO: 9375 - DNA, 1858 bp, Homo sapiens
tctattagcttcacaagcacaaaaaaagtcagcgtcttcattatttatattttacaaaaagccaaattatttcagcatattccggtgataactttaaaaattagatacattttcttaacatttttttcttttttaatgttatgataatgtacttcaaaatgatggaaatctcaacagtatgagtatggcttggttaacgagcagtatgttcacagcctgctttatctctccttgctcttctcacctctcccttaccccgttccctatttccgtgttcttacctagcctccccccacttcctcaaaacaaacaagagatggcaaagcagcagtccgaccaagcccactggaattatcctttaattttacagataccacttgctgtaggctgtggaccaagatgtccagaattattcttgagcactgatgtaaattacttagatcttctttgaggtcagaattcagcgatcacggtaggcagtgcttgaatgagaaaagcctcctggtgcatcttcaaaatgagtcctaaagaacatactgagtacttataagtagcagaacataaaatgtatttctgactaacacaaatggtcctttcacatgtgctttattagactctgggagagaaaagtaaccaagtgcttcagaacaggtttttagtatttacttcttcatggtaagataatgaagttctaatgaactatttctcccaaggttttaaaattgtcaagagttattctgtttgtttaaaaagtaagaaacctctgtaagcaatagattttgcttgggttttctttcttaaaaaaataatactatgcaggcaagacaccataaaagtttaattccttacagaagaaccagtggaagaatttaaatttggcactacgatcaaaactactgaattagcagaaataacgatatctaaagcttaccagcaaaagaaccctcagcagaatagcaaaaactttgctcaggacatttgaggtcaaattgaagacggaagacggaagacggaaaccggaaaccgttttcttgtaagcccctagaggcagatcaggtaaagcatacatagtagagggaaaggagagaatggaaataaaactgaatattatgcagatttatgccttattttttagcattttttaaggttgggtctttcaggctggttttggtttgtattagatctgtatagtttaactagtgatttagttttatatttaagctacgattaatattttttctttggcgatatttctttgctttttttttttttaacaactttccatttttagatgtttcgttgaatctatttagagcttcaccatggcaatatgtatttcccttaaaacactgcaaacaaatatactaggagtgtgcccttttaatctttactagttattgtgagattgctgtgtaagctaataaacacatttgtaaatacattgtttgcaggaagaaaacttcgagttacaggtcaggaaaagcctgctgaatttatgttgtaaacgttacttaacacagtataaagatgaaaagacaacaaaagtatcttcatacttcctcatcccctcattgcaacaaaaccttaaactgggagaaccttagtcccctctctttcctcttcctcctccacttcccacttattgtcactttgtaatattcagagagcacttggattatggatctgaatagagaaatgcttacagataatcattagcccacataccagtaacttatacttaaagatgggatggagttataaagtgcttttataatacaatataattgctaaaggcaagggttgactctttgttttattttgacatggcatgtcctgaaataaatattgattcactatg

SEQ ID NO: 9376 - DNA, 100 bp, Homo sapiens
gatggggcagagacttgttgcatctttgtccccagcaaaggctacatgttacctccttcaattgataataaacctttctgagatgcagagggtccaggtc

SEQ ID NO: 9377 - DNA, 156 bp, Homo sapiens
gcacactcaccactcagtcaggacatggacttggaactcaggatggggctgtcatagacagacccaccagtaggaactgtcacagaatggcctgctgaactgggatgtggaactgtggcgggtggagaggtctgaataaaccgtctgtgtcatggc

SEQ ID NO: 9378 - DNA, 1346 bp, Homo sapiens
gtctaacgccagttcctgcctgttgcctcttgtgagctcggactgctgatgccccggtgctgctgagcgccgtgcgcagaatggaaacagtgggcctggatcaaagttaaagtttctcagggtgggaaatgtgggggctttgccccaatgactgtagcattcaaggcttgaggctggaggaggtagctagggtatagtggctggtgaggctgcacagagcagattcaagaaagaagatcaggaaggggcatgacccctgagttatgaaggggagaagggacagatgagcttccggagactgctctcctcaccacacagcactagtccatcctcagcacctgagcctccctcacttggacactcaggggaccacacagagaagtggatggacacttcgccatccaggcagaactaagccaggcataaccacagccaagcagattaaccccaggcagaccgataaaaagacctccagataggcagacagacagatggaccaccaacctggacagacagccaaagcttcagagatacagtccacaggtggacaaagggatccccagccagagagagagagaccagccaacagcttgatagaccagtgcagccagagagaccaccaaacagagcccccaaaagacagacatctctgctagctggacagccaggtggaccccctaagttagattactagacagatataaacagatcccctgctgaacagatacacagagttctcagaccccacccccaccctcaggtgggctggctggctgacagaccttctggccagacagactcctaaccaaccagatggactgccagacaggcagacatcagccacatggaatcctgacatcccagccagccggccagactctcatcttgatgtcttgatggatggaccccagctagtcagacatgatcctccagattgacagacaagtcccccaaatgagtacacatctccagctattcagacagatggacccccagcaaatcaggacctatctaggcagaccccagccagacccccgccagacagactcccaaccagactgaccccttactattcacacagcctgccgagtagctgggactacaggtctaattttttttttttttaagaaatgagtttttgccatgttgcccagactggtcttgaactcccaacctcaagcaatcctcctgcctcagcctcccaaagtgctgagattacaggtgtgagccaccaggctcagccccctaagatttgaaacactttaaatggcccatggtagggttcctgctaggataaaacattaagcggctgttaaaagaaataaaaggaggacacgtctctgtgc

SEQ ID NO: 9379 - DNA, 115 bp, Homo sapiens
ttttctatgttgtaaataatagatgtgtttagtttaccgtaagctgaagcactgggtgaatatttttattgggtaataaatattttcatgaaagcgcctttggctccagatcctt

SEQ ID NO: 9380 - DNA, 141 bp, Homo sapiens
agttcttgagtccacagtctggcaagctgaggttaaaaatcatatgttgaatgcagcagtgtccacttatgactaacttcttagaacagcacaatataatagtggaattgggcctttcagaagacctcaactgatgatttt

SEQ ID NO: 9381 - DNA, 428 bp, Homo sapiens
gacaggctcacatgcaccaggaactgcatgtgtcttcatgaccactttcaggagagcctaggactcaaatctctatcttttgtccctgatgtggggactgtgttgggggtggggggtggcaggactcaggcatgcagagggtagcatgttcatgtggaggcatccttgcctgaacccaccagctcaggcagcccaccgccaaagacagcgcgaagctgcaaccacctagctgctcctcatgcaggggctggagagaggggctagggcttgaaactgagggggagaaagagctgcacattgtaaatgggaagcagagagccaatgagtctgcctgggatgtgtgtgaatcccaaaagacgcaatcccaaatgccatagtcccaagtgttgagaatccaaaatattaaaattactatactctaaaatccg

SEQ ID NO: 9382 - DNA, 1725 bp, Homo sapiens
ccaccaggcctgaggggggcccactgccctttgcagctgtttgttcccaaaggttggtaataaggggccactggggaagcctgggtcagtatatggttgacattcttactctcaacaccttggctcccccagatcagggccattggtgacaatgcttgtttccccagggttccttcctgacaggcatctggggttggtgtagggatggagctgctttccccatttctacagagagccatgcccctgaaacatcacatgcctttgcacaggccacccccctcttcaggctgctgcaggaggccaggcccaggccagagaccccaggcagcctgagctcttggatgtggtcagctctccaggagcaagtcctgtgtggcaaaactgcctcctacggcggctctgaagcagagccctgggacggaccccatgctgtccccaacagctggggtggcactctgccctgggcacccatgaccctctgctgtctctccctgttcagctgttggccggccctgctacctgacgcgccagaagcacccagccctgcccagcaaccggccccagcagcaggtcctggtgctggcggagcccaggcgcaagccatctaccttctggcacagcatcagccggctggcacccttccgcaagtgaactggtccctgcctgacagcacctgctgggccttcctgccagtggcccccagtttttcttccccgaggcccactcggcctggccttcctctgcctgcaagtgagcagggatgggctggggagttgcttgtgccaccaagacgtgccaggtctgtactcctgttgtctttttccctgctcctggtgccctgaagagaccagcaagggggcagaccccgcactcgccacaccgccgctgcagcttgggccccatccgccctctggacctgtgtagggcctcactgctggagcggggaaaccgcagctcagcccaggcccagctggggagaaggcgctacctgcgtgggaccctcttctctggaaacctaatcctcctttcatttcctctgggcaggactctctggccttctgtggcctgcaatgccaggccatgtgcccctctgccctctagttctccaagtccccagcccggccagtggtgccaggcagcttgccacttgggagggcagaagccaggaattccacacccttgtgttgcgcccggagcccgcccttcgcctcccagcccctcaagacaccgctggctgctggacaccctcttcacttgtgtgtgtgtgtgtagcggaaaaggacaagacggtgcagtcggctgcatactcccagtcgggagtgtggtcagtctgcctgctgctgtgcggtagctccagaaccacctcgttcctggttttgtttggattttggcatcttgtttttctaacaacaaacaatggagaaaaagaattgattcttagtgacacagaagattgccttacgctcgtgagcgtgagaagccataagagagagaccgaattctgtggctcagcacacaggactgacccacagcccaggcagcgggtgtgtggagatggcgccctgtcctgccaaggggcgccaggagcagagccagggcctggcgagctggcgtggagcccacaggattcagcagcatggacagtcactcttgcactattccttctccaagccagaaaccacatttaatttcataaataaatttatgaaaagtaacctggctgct

SEQ ID NO: 9383 - DNA, 3079 bp, Homo sapiens
gggcctcaaggtcttgatgtgcatagcttctgataaccctgtgtgcaataatatgatttgcagggcatttctgtttgtgacaaaagtttttaataatagttttaatcattcctttgaaagtagtgatgtcataattgtactaatccacataagtaccacagagaagggtttgaactgtgctattttgttcaaatgttgactctccgggggcactggctcattccaagactgttcttgtgcaactctcagaataccttatttgagcatacctgttttgaaaggcattttctttttagagttaggtgtagtgcttaagggttaatttattttcatgttatgccagtaatatagtgttgtatgcctattgagtgattgtggcaagaaaagctacagcttctttgcgtttaactttttcaaaccacagaccagaactggttgcatgttactttaggagttgtgggttggtaagctcccaggtacttcccgaggctatggtgtgagagcccccgtcctgccctctggggctccacaggcccctggcaaggccgatggctcaggatgatggggcacagcccgcctttgaacaatcatgcttcagaaatctgcctgaccctagctgctgctgctgctcactttattcttgtatggctttggtaggcatacttggagaacatatcccacattaggaattgatttaagcctgagagtttgagggctttaatcctttaaaacttggagaagctggctgggcgcggtggctcacgcctgtaatcccagcactttgagagaccgaggcgggcggatcacgaggtcaggagatcgagaccatcctggctaacacggtgaaaccccatctctactaaaaatacaaaaaattagctgggcgtggtggcaggcgcctgtggtcccagctactcgggaggctgaggcaggagaatagtgtgaacccaggaggcggagcttgcagtgagccaagatagtgccactgcacttcagcctgggtgacagagtgagactctgtctcaaaaaaaaaaaaaaaatcctggagaagccagaacaatatacaaacaagtatgtggaggcagatttgctttattccaagaggctgtttgagtgtgtgtctgcctaagcctccttatagcctatttttctacttgctgagagagtaatattaaaggaacagtgagggagtggaaggagagccttagttagagcgttcccatttctggcctttgggggtttgcactgtgcgggagatgctctctcatcactctgaaggcccatcctgtgcagaagtgggactctgtggctgttcactgagcaccagggcagactgtagctgagcagacttgggttatggatgggatatggggcccagggaccctcaggacacagggaccggctcaaggtaccactcagcctggccaggacccccagctttgcttttgttcttgatctctttgtgatagagaagcttagaacattgaatttggaaccccaaaatgtgtgagtctttggaaaacccattccagcctttcttcaaatgctcttattttcagtatatgaagtgtgtatttgaaatattcatatttctgttatttcttgttttcaagctctgaattattgcagttttctgtcctgcatgctttcaacagtgtgcttttacagtggcagtttagcacagcgaatgtccctgccccacactccatatggtcctgttttcctgaaaatacactccaggtagcacagacttgttattttgcctggctggttacacacatgctgtcttgctttgctgctcagccacctccctctgaggccaacttaggccaacctacataggactccatctttagcgagacaccagagacacctagtgatgaccacgggtctgcttttctctctgatcctaggggacttgttgacatgggagtgtctgtttccacatggaaggatgtctgtttatctctcatctctgaatagatgtatgacaactctagtgtccatggtttaaaatgttgctttgaggattttccatcctgtataagaagaatggctttcttcagattataatcgttattaaagctgtatgtacactttacttaaaaactattaacagtttttcatgttgcactggtggtaattttgaacttggaattactgggtgggaattccaggaaccacagagtattgatttttgctgccaaaatgctcttgaagcagatgtccctgtgctcccctggctgcttctggctgaaggggggaggtgtagactgaagcttgggcactcatgtgtgtcccctccccagtccccatcctagtggggccagtctcattaggcagccatagataagcctggaacttggctgtcattagtgacttgatcctggtatgaaatgcatactgggtataaggttgctcaggtattttatttccttggccacaactcccatagatgccaatgttttgatagcctcagtttctcaacgatgtcttttgtttacagtgctacacttagtgtgagtcaagaagtgcttgagttacaagaaacttcttattcaggtttgagtaagcattttacttccatgtgtacttttaaataatccataccttgaagaagttggccaatgatattatatacatgctgatctgattgttcttttcattccttgagtcaacttcagggtcttggatactaaagagaaggagaactgtggttaatgttttggatcatcatttgtgaacaaggccagactttgcccattttaggctatccaggacttaaggtagccatctggatcataagaaggtcctgcagttgagacaaaatgacccaagtgtattttccacaagttttgatcctgtgtaatatttctttttccttccctagtgtatgtagatacaaggcatggaatgcagttccactttctccccagagttgatctttttgtgattgctttcccgtctctagtagtattctgttgtgtctagagaactgattttttcctacatacgcaaattgtacatttgtaagtgaaaatgtcaatacattaaagcattaaccttaaagcatgtttca

SEQ ID NO: 9384 - DNA, 183 bp, Homo sapiens
ctcgcgtgctcgcccggttccgcttgcgcggccctctgcgcccccagcaccgctgccgccgccgccggcgctggcctcatgtgtcacattttcttaatccagtctatggctgatggatatttgggttggttccaactttttgctattgtgaatagtgccgcaataaacatacgtgtgcatgtg

SEQ ID NO: 9385 - DNA, 83 bp, Homo sapiens
ggggagggtgtggtgggttctcccctgccacccccgggatggctgcttccaagttgtttgcaattaaaggttctgtataaaac

SEQ ID NO: 9386 - DNA, 266 bp, Homo sapiens
gccaccccaatctggtcagtgccaggcccaccaacctgcagctggagactggctctctatagcatttcctgatacttccgctacttttaggcctggctaaattccaagacagataacactcaagatagataaagtacttgatctccaaactgacaaactgtttattttctagctgttattttgctatttggcatttacataaaagcacacgatgaagcaggtatcgccttacctgttgaaactgaaaataaagcttgtttatttcc

SEQ ID NO: 9387 - DNA, 202 bp, Homo sapiens
cgtgctgcccaggatggcctcctcttgacaggcggacagggggtgagggggccagggggcatctccaaaggaagcttttaaactcagcagctgcaccccagaatctgtatgcctgcacctgcccaaggatttattcatagcttacctaagaatttcaaatttctaccataacactgaataaagtttgactttttgaaacttc

SEQ ID NO: 9388 - DNA, 990 bp, Homo sapiens
atgtcaagcgagggagccttgagtgggaactggccctccagccctaagaaaacgtcactctcactctgcagtctcaaactatgcccccatcagggatggaatggacactggaggctttacaaaaggcagatgcccacctcagtgacttctaaggactgactctgccagcctggccttgactccggttacacagacatgggggtgaactttcactccacctccttccttcaagtacatactgaaaattcagtcaggctgaatttattcagaatgctttaccgagctctttcattatttgcacaggaacaaaagagaacacggactcccgctccctacccagaataaaaggacacccagaagaaactcactcagggaggtggggggttgggggcgagggctggaagaacaatgcaggagggggtggcatctccttcagcttcagcagtgtgccgagaagagggctaatttgaggaacaggatggtggtgcggagccctggcctgagggccgaggcagaacttccccttttcttgggccttggcccgttacaaagaggggtgttgcagcagctgatgcaaactgagttcagtttccctggggagcagaaggactggtacccggcagaggcgatgagacaggccgctgatgatgcacaggacttgcggtacatgatccctgtaacacagacccaaaggagctgagttaacgtgcaccggcaaaagaatagctgtccctctcagcccaaatccaaacggacagctcttccttactcctcccacagcccagagactaggtgaggtcagggaagtgcttcggattgtctcattgatattcaagatagatggtgaaagagacaggcactatttcattagttttaacaaaactgttccaaaagcgatttgagatgccaatacctgtgaatacctgttaataaagagctgttaaatagacttatttacattttaagtcagagttcacactgtgtacaaga

SEQ ID NO: 9389 - DNA, 50 bp, Homo sapiens
cagctacctgctcagccctgcaccatgctgctggggaagacagtggcccc

SEQ ID NO: 9390 - DNA, 170 bp, Homo sapiens
ctgaatttactacaaaggcaaactttcaaaaggatatctcatttttgtttctaaatatgtatcaacaggtatcaacaaaatcctattttgaactattttactcagaaatgaatgtcccaaatatcctaaattattcataataaaaatgatttgtaagtgttttcattctg

SEQ ID NO: 9391 - DNA, 2466 bp, Homo sapiens
tgccaatcacgagtacagtacaagcagccagcatatggactacaaagacacattcgacatgctggactcactgttaagtgcccaaggaatgaacatgtaataatttgtttaggtcaatttttcctttacttttttaatttaaaaattgttagaatggaaaaattccttctgatctagcagtggtaacccctgctgttgctgccactgcttcaatatttgtaagtgctgctttattcttcattctgaaaagaagagattatagtaaacaagtctttatctccacatatgatagtgttataaatactgtaaaagcatggaaggtgcaaaactcagtatttctacaattgcagctaagaacattaggatgaatggctggctgcttctaggaatataagatgcctcaagcattcattatttatgatttgaatactgtagctattttttgttgcttggcttttgaatgagtgtaaattgttttcttttgtgtatttatacttgtatgtatgatttgcatgtttcaatgataaagggataaaacagtatactgacaactgtttacaagaaagtggagaaaaatgtacatacatttttgtatgtttagatattaccgtaaatactcaggattggagctgcttgtaagtataacaatatacagaataactttattttatcttgtcagagtccatcactaatctaaaacaaaggtggcacttttttatgttaaccttaaactctaggccttactggaagccactgataggggacacttcactaccagatgtgtgcagtgcaacagatggtcatatacactgtgaggcactgaaattttgccttcagaggttctgaccagattggctgctgaaatagcccctaactttctgaaggcttgaagaggaaaaaataaagtttacatactcttgatgtgaagtgcatttaaatgtttgttggcttgttgcagttctatgaaacagagctgttaataatggttatgtggattactgtgatttgaaaactaaattcacaataacttacctagtagagatttagtgagttgtttcctttaaagaattttacactacatattttaatagtaaacagggatcacttttcctttagcattcagaatgacaccatattcttaaatatactccttccctgaagcgtgtttgtgtgtgatgccatatttctttttcaggtaaatgtagtcttccttataaaaatgaaattaaacctatgctctcaattcttttatattctaacaataaataaaaaagaaaagattactgactgtgcattgtacctgtatttatagtttatggttatcaggaagctctgtaagaaagaaaaggtcagcctcccaggcaaaccagtagtggaggttttacatttgtttgcacatctcagtatatttctgttgaggtaaagtttgcacagtcatctgacttctgatcaagcattagattttaacttgtttagattttgtcttaaacaccagtaatatggctcttgtttatcagctaatcttgaatttattctgtggtaaatcttttgagttgttgagtatatttgagattgattggattcgacctcttgttgaactgaaaacttaattttttctctgtatttttgttacaaagccactgatacgtgcacaattgtaattaagtatgttgcagttgtaaatattagagtttaatctcatgctctacctttatttagcaattacctaatttgccagtagctttataatttttaaagataattgttcattattttgtcaatgttatttgaacttggggtacttaggagcctctttgtagggactgtgcctaggtagcatgtcctaacatttgttctggtcttgcataacttcagtaatctttgtcattatatgtaactttgttgctctgtatggcataatattgtatccataaacatggtaattttgatacagttatacttttacagtggtacataatccaaggactagtatagaattaagctgagtgcaagatgagggagggaagggctttcttggtaatttagatgtgaaacctctacagagctatcatgtaaaaactacataaggtggttgtgctactgtataattgggggtgataataccaggaattttaataagattttgtaaagaatatccagaaaagtagtgaacttattttcagtagacatagaaaacaatgtgaatatttaaggtctgtgactatagttaaacttcactaagaatttgcagaattgttttgagatgtgtgaataaaggtaattttattgaatcttcattggtgctaatgatggacagttaaaaagatagctagtgtatattgttatgggtcagtacttattagtacttccaaaattgaatttgaaatgctatgtattcacttttcactctgtaaatgtaattctttacaatgactttatttattaaagggcagccagttgtcattt

SEQ ID NO: 9392 - DNA, 1193 bp, Homo sapiens
ttcttctagcattactcgttggtggcttcagagacagtgctgcctcctcctgagggagggaaggtaccagggagaacctgggaggtcctggagagggccctgtccagttgggtgatcaggaatcaaaccagcatcggaaagacttcccagcaccaagcttgagctgtgtcgtttcgtggagggggcagcgaggatgggcttgagctgttgagagatttctgccctagagatggcctttgtatatgggggggtggtggggggacacaaacacatcagacactccgtcctcacactggcaggacggtgttcatcgcattctcttctgtgaccagcctctaggctagcggctgcattcgtggtctgtgcaaacacttcgtggttctatatatcagcagcaagtgtgcaaaataaaggacctgttaactcagatttctggatattttggtggtagcttctagtcccagaatctgtgtttttaaaatactacatgacattctgtctattcaatcacctggtggtcatctttcttgtactaattaactgttgatgagcattttggatattctaggagaaagcctataatttcacatagtttctctttttcatgtaactgtaacctaaatgtattacttctgataaaactatatatcaaatgtcactgcaaattagttttatatctgtcatgtgagatttgtcttacttatttttcttttggttgccatggaagttatggccctgaaaatcgtctccctccccttctcttgctgtacagcatgcgttctctttttgtggttgctggctgggtactgtatttaatgaagtagagaatagcacttgcaaaaatacagtcttggtacctagagactgtcatgcagatagtataatttggtatatgtgctaatgcattgagtagaggattattttaacacactattttgcttttgtattttagttaaaataatcgatggggatgtgtagcccccccgtgtgaggatgacatcaccacatttctagtttcatggagctcaagatgtcttgtgtctgtgtggctagatggcctctgcttggtaatcttatttttaggcctaaaattcccacttaaatccaaagtaaaaatggttatactgaagcataaaccttgcctgtgtaattttaaaaaattaatagagctgtgcaaaccctgttatttttgt

SEQ ID NO: 9393 - DNA, 974 bp, Homo sapiens
cagccacctttggacccttcgcctttatggttcccctgccctctcccatctttgattggcttggtatttggagcttctgttaacattatagagactcctaggatgtgtgttcatggcattatagcttttgaagaaaggccagtgatccagcaaagggggaaaaatatgcatttcaccccacatgactaggaatccacatcagaatgatacagagttagcaggtttttctaaggaaatgccattcaaatgcctcctaacttttatagttattttgttttatatttctaaattcttgtatcagatccaaagctctattgtacagcaaattattcttcaaaatgattataaccagttgcaccctgtatttctttttgcagccagcacaatgtgacccaacttaaaatttgggggaaaaagaatgcaggagtgaaataaccaagtcaaaaccatgtactatctccttgggggttagggatgctaagaagagcccacaaatagaggattactcttcccctgaatctctaaactcagaaacaattaccaaaaaatacataactcttccttgtagggccctttccttattcatttaggtagtgtgaacattaagtataaaataaattatgttcttaatgcctcttaaaccacttacattcaaaggggaacagaaatcattctaagcaggaaaatacttccactttttttttttcaagtatctctctaataactaaatgccacttatttgcattctccttgtggattttttgtcacctaaggaaatgcatttgatgagtgctggaaacttcttaagtgctttacagtttgttttcattgtttgcagcggatcactggacatcaaagattcattgcacttatgaacaaggaaccttcttttcaatttctgtgtaatttgcaaggctgtacaatgtgtgctgatgcaagcctttttcagttcaagagaataaatgtttacaaat

SEQ ID NO: 9394 - DNA, 2175 bp, Homo sapiens
tgtgacaagtataatatgtgcaataatcattgtttctcttatgatttaattcaactaaaattctactggagaagtgggactgctttatattttccaactggtctataaaatgtctctttattcctgcttagtgggtgtgggttgaaggtgtttaactcagaaaagtaaagacaggaaataactctctgctaggtccttgcttatatggcaaccactgctagaaccctaaaagaaccaaaaatctgccacagcctgcctccatcagcttcttatttagtatttcatatgcccattagccctatgcttcagatgacacgttttgtttagagctactttgctccaagactcttaagcccaaagtaactggtatgtcactgagtaacttgactcggtgtcagagcattttaactagccactcagatgagaatttatgtttaacttctctttttactcatcagctgcaagcaaaatcttgtagtttttaatcttaaacactgaataaaaaaactttcccctaaattggaatgatcttagttttgctttgagttttgttatctagcatctttttgttgcacagggctctattgaggtcctatgtctctgatttttttttttccccagtattgccctggagctgtctctggaaagtagctggcgaggttaccttaactatcactgaagaaagaaattttctgacacactgatggcatgtgacttgtctcctaagtcagtgaggcatcactttgtttgcataaagtatacggtttgttaaggcctttgttcttgtgagatgcaaaacagctgctagtctgcaacctagttttccctctcacctttaactgacgttttgtcctcaataattacacaaggacctagagtacctataggacaaaaagtatagaataaaaatatgcctttagtcatttggtttttcttaaaaagttgagattcttaatctgacttacatgttactttatccgtatgtctttgttagtggagaccgctaaactaatgatgtttgaaaacagttcctctgttttagattggaagatagcactctagagtggacatacggaaagactgtgactttattttgtaatgggaggaagaaattttctcagagcaaactttctattttttacctgtgaaataacagtgactttttaaaatggtgacagtgttggcaaggaaacagcaacacaggctgcgctgttggtaggagtgaaaaccagtataattcttctgaaaaacatttatcagaaacttaaaatatttcataccgtttgatccagtagcttcttctaaatcataaatgcagacaatgtttaggtaaagacatactcattaagtgttatttattttactcaagaactggaaaccaactaaatgccttctatagaagtaatttttgatgaggagaaatggtacaatactaattaacaacttggtttaacatgtttactgagcatctgttaagtgttgggggaaaaagcagcaggatccagagctataggtacagtgtgatctcagctttgcaaacacattttctacatagatagtactaggtattaatagatatgtaaagaaagaaatcacaccattaataatggtaagattggtttatgtgattttagtggtatttttggcacccttatatatgttttccaaactttcagcagtgatattatttccataacttaaaaagtgagtttgaaaaagaaaatctccagcaagcatctcatttaaataaaggtttgtcatctttaaaaatacagcaatatgtgactttttaaaaaagctgtcaaataggtgtgaccctactaataattattagaaatacatttaaaaacatcgagtacctcaagtcagtttgccttgaaaaatatcaaatataactcttagagaaatgtacataaaagaatgcttcgtaattttggagtaggaggttccctcctcaattttgtatttttaaaagtacatggtaaaaaaaaaaattcacaacagtatataaggctgtaaaatgagaattctgccccctcacctcttaccccagtactattctccagaggtaatctattaacaatttcttatgtaattttcagaaaatttgtatgcgtatataagcaaatatgtaatctttattttttaaataaatgggatcatattatatattct

SEQ ID NO: 9395 - DNA, 2233 bp, Homo sapiens
ctatcaatcacaaaagtatattcaaaaattatattttgaacaactcgaatcactcatttatttccatattaaaatcacaaactcatccattaatgtagataaagcactgtttggatatgagatgtagcaaattccaatacattattggacttccatttggaatcatatgggatactgctggtcttatcctgtccctcctccaggtagagagaccacaagcaggctcaacataacataagctagaaaaattagatgactgaatttctatggcatattgataataaaattcattccatttgctgattgtctgaaattttctagaatactaataaaatacatactatagattctttattagtgaagtatgcactaatcaatactttgaacacaaagcctgtgttactgatttggccgttttgtgaagaaacatttatctttgtacgttcttctattgtgctttctatctaatttttattaatttgtaagagtaagcacctttagaatattaaaaattaattctttatcacatgttgtcatttcttcccattgtgttttctcttgtaattttatctgtgaattaatagctttttgtttgtctttttgatatactgaagttttctattatattcagccagatttttttttaagtctcggcttctgatacattttaaaagaccttctaaaaccaaggttttagaatactaacattttatcaaaataatattatagttttgctttttttaaaaaatgaaatctttactatgtttgaaatttagataagtataaacagtgagaacaaactgtttcccctcaaaataatagccagatgtataaacaaaatttattgaagaacaaagaaacacaaaactaaacctgttctagcttaaaatgcagcttttaccagatttctaggaattgggtaaatgcaaggttctagaaaaccttcaatgcattttgatactttatagtttcttatgtcactctcaagaactcctataagaccaagagtcatctttggactgtaggatttcaggggggttttgaaaacaaatttgatgtttcttatttttaataataacgctctgttatttttgacataaacagtacatttaataattaataaataaatattttaagtatgtaaataattagtactccctgtcacaaacaaaacaaaagtaaggttttactaaacagctcatgagccctcattctgccagtgaggaagccttcaaccccgtgtgatactcactctttcatgcaatagggcttccatgtaatgttgccgtataatcactttaaaaagttaaacgacccatctcaatcacctagtttatccccagggaatacactggcatagagagcctatttacactaataaactaccaagctttgttgttcataataagtaaaatggacttgcattgctctcttttttggacaacttcatcaatgctttttgaattatatgtttcaacaaatgaaacgacagttatccaatcagattcctgaaaatgaacactgaaccgttaatcatactgatatgtactactgacaaaggaaatctgtgaggcacacatgattgatgggtatggggccatgaagaccttgaagagcttcaccagaagtatggaaatcaagactttacagagtcttttgtataaagcacacgtgcaaaaacaaacaaaattagaactaacaatgctattgaaagatacaaaagaattgcagtccatagattggtgtttgtaaatatggcctttttctcgtccttattaaacccttagtatacaaggataaataaattctcacctgcttaattttagtgcaattgaaacacataagcctttttaaagagagaaattcccatgaaaacctactagtcagcaatgggaagttgtataaattcaagggataaacctatccctgttttcttcctgcactgtatgataataccaaaatttgggacagtcacatactaacttttcagatttgttcttgtgtttcagaaaaaagtgctcagcatgaatttggaatgttgttttatgtattgttgtggatctctcagtgtttaacatggtgccttgcatatggtaaatgctaagtaaagcgggatcaatgaattatttccttctcaaacatttatcttataccttgtgtgttcatattattattataaacagagctcaagaaacccaataaagttatgtgttgccagtgtaaaccttaactt

SEQ ID NO: 9396 - DNA, 328 bp, Homo sapiens
caaataaaatactggccagatgtgttggttcacgcctgtaatcctagcacttcgggaggctgaggcgggaggattacttgagcctaggagtttgagaccagcctgggcaacatagcaagatcccatctctacaaaaaagtgaaaaagttagctgaacaaggcggcatgcacatgctactccagacgctgaagtgggaagatcacttaagtccgagagatcgaggcttcagtgagatatggctgagacactgctctcagcctggatgacagagtgagaacctgtctcaaacaagagaaaaaaataaatcaaatgctactcaaaattctc

SEQ ID NO: 9397 - DNA, 271 bp, Homo sapiens
gtgtcatcttttccatgaagcctactagatcacacagttgaaaattgcaaagtcttcacaccgcagcttcccctttctttgttgctttggttttctccgtgggacttcccaccatccgtaaaattaggtgtttttgcctgttttattcactgctacgtctccaatggttagaacctgacatttagtgggtgctcaataatatttgttgaagtaatgtataataacttcactttcttgagtaattactatatatcatgaactgtggtaaatt

SEQ ID NO: 9398 - DNA, 4150 bp, Homo sapiens
aatcttccatgaacagttgaaaaatggaattgactttcactcctccaggtccagaaggattctaatacacaaaccataagcaagagttgtttctgttattttgtccacagaacagaagctgaaaaagcatattgcttgcatttcaggtggataatttatggtttattcttcagctttaaattagactgattaattcacttcaaggccttaaattatcttcaatgacttgtcttgttcatataatactttaatttttttttattgtgccttgtcattttgaccaaggctatgcaggattgcactagctccataatgcagtaatattgataactgaagatactaagtttcaaaaggatcttccattattttgcaaaaagaaaaatgaattttatagggtttgtcctatgctatctcaaagtttaagttctctttaaaagcacttgtattggagattaccagtaatatctccaatctaagttctataaatatgggagaaccctcttaccttcaaggtaagttatggcaatacactgcttcaattctaatttatttttcatttcagggggcaaatatgcaatgagttggcctagatttttagtgacatttatgatgtttgtcttgtatgttaactgtccaacaaactgtgggtttattctaagtttacaattattgagaactgattgaggttaagatttcatgaagaaagcatgtattgtgtggaagtaatttttttttaatttatactgacctacatttatacgaagaattctgtacatgttaaaagtaaggatgaccaaatgcaaatttaatgagtgggccaattaagaaagatacatatgcacttttactgtgtaacttttgtatgctgaatggtacatatatttttttgcttttgagggaattaataaggtataattaattgtgtcttaacttttcaaagaaatttttagatggaggcaactgggatgtttgtgataatagatgagaaagacatccttgattgtagttaaattggtttggattacagatattcattattgaattgactcctattttctcacactttggaaaagacacctgaacaataaatgaatcctggatagtctactctccttcaaacaattaactgatacttgcctttgggagatgcatacaaaaggagagaacccttagactatgtcaggtcacactaggaacctcccctcactccccgtttttcttcattgtgtttcagttactgtactaacattgtggatgatactgaaattctgcataatgtgaacaggataaactatttataaactgcttttcatgggccagttctttattataaatgaattttagctttaaatgcatatacacgttcagtgtttgatagttgtgttcttaagggaggtttgttctggtgcattgtcctggagaagcagaagcagtcagtgttggggtaccacatctgacttactgtggtggtgaccagtgtgcttcttaagggcaagatttatatttgaccacaagggaaaaagtgtgtcactggaaaaaaacgcatatacctatgtttgcaaacataactattcttcagattaaaatttgtataatttgtttatttaatgtttgaattcaggacaaaagaaaaaatgaagcttgaggtgttttcaaatagaccttatttttgctatctctttgttaggtgttaactgaagcaattcgaatatgtccagattcatttggattcatatttacattgaaaaaactcaactaagcatttgttatccacaacaacctagagtttaaaaagatcgtattttcacctgtcttcattactttctatgtagtttcattctttgtcgtggtaacttaaatttgaaattggaagaatctcttgggatagaagaaagattcttacctggtgatggaacttcatacttcatcctgtgtaagagtattatgggaagtagaaattcacttccttaaatccatcgtaagattgagcctcaagtttgcaatatacaattttaaaaatacacatacatacatacatatgtatacatttccagttttaagattttgcgagggtcttataagaaaacaaaaattccctcaggctatagaattatgttgtcatatatcagaaaagtactgatgtatccatttatatccaatgcgcaccacaccggcacattgtgatttaattcaccgcttgaatctatatttctaaccacagtgacttcagtaaaaataccgtataatgaacatttcagcttcttcttacttactcgagagtttattgcaaatcttaaggattttattataaagattttttttttagtttggtagcacattttgtaccaaaaatgtcaaacactgtgctgtaagaatatccatgtttgtagaaatgtccacttttcagataatataatgcctaccattatactaacagaatcatatggtagttgatttatttttttatttattatgtatatttttggtattgtgggttcttgaggcaatgataaaaacacttaatgtattctgacatgagtgctctaatagcctccttctcctcatttttaaactgcatacattactttcaaaataggtatagatactctgtcccgccttttgagctattagcctgttcctgtttccctttgtcacctaagcaaggctttttctgagaaggtagtgaatggtttcaaatgttgcatactataagaataatcattgggtaactgttgtttagaccaacacttagaaatactatatttgtgccttttcatttttaattttaatgtgtgttgatatttggagcacaaataatgaaggtgccataatatggcttgccaatgttacctccttgaatagtcatgtgtcattgtcttgaattggtaattggagaaccttgcatgaaatatgtgatcgtgtgtgtgtgtgtgtatgcgcgtgtgtgtctgtgtgtttgtgtacatacctgtatttgcttggggcttgtgtgtggtatgttacaaagagtgaatttctggaaatagaaatcagttaaatgttgaaagttcaggttagcagaaatatttcatttaaatatgctttactttggaggacaattgattaacagaggaaatgataattttcaaaaatgtgatcaatttactgcatgatgaaatgtgaaaacagtgcctttttaggacatcaattataataaaattgttttaaaatattaacaaagatctcaaaaagttgtcatgaacattattcatttatttttaaactggatctaaataagagcttagatggccaaaattagaattaataatatacccatttaaattttgttcataaatttaaaatcttaatcagaattctttataaaatgtgggtcatagatatgacccagtgttactaaaatagaacagggattgtgaaaatccagctcaacatacttaagtatacttggcttagagccaagtatacttgaagaggtgaattattctgacttggacatgcatgctctttgatggataaaataaaaatattcaatttattcttacaaaagaaggtgggtgggtgagtgggttcgttttagtgttctcagattataaagacagctataaagacagcactttccgcacacaaagtgtattttacaaaccttttttatacaaattaatgagctctactttatttaagtgttcatggaatgatgtaaattttaggtccagttgaacaaatattgagtgcctatcatatgcaagactaactccttactaggaatgaaatcacacagtgtcttctgtttgcagtatgtgaactttatgtttgaaaagaaattattatatttaaatttttttgttgtcagagtttatcattgtatactgtaacccagtaaattttgcattcagttttaaaaaatgaagatgtaacttacctgagtctcatttttgaaaatgaaattctgcaaaaattatttaaaaattagttcttggggaaattgattttcaagattcaagtgtataaaaacttatattgaacttttcagcctcgtttttaattagctgatgttaatgataagatacataatacatgtatcttgttgctgaaaatattttttgcatttcaacacattgagttaaaataaagttgttactacttattcaag

SEQ ID NO: 9399 - DNA, 194 bp, Homo sapiens
agctttagagagaccaaagagtttttcactgttaaagtgtccagtatgtagccgagaaccatatggagaacatcaaatacagtggaacaaatgtaactgctattgatgtcacactttgtgaagtagtctttgttgcttaaaaagggtgacatctagtggctaaacatgttatttcaaataaataatatcgaaat

SEQ ID NO: 9400 - DNA, 143 bp, Homo sapiens
cagtgttttctagaacaacttaagcaaattatactgaaagctgctgtggttatttcagtattattcgatttttaattattgaaagtatgtcaccattgaccacatgtaactaacaataaataatataccttacagaaaatctg

SEQ ID NO: 9401 - DNA, 179 bp, Homo sapiens
cagacaagacaagctactgaatacgttcacatctgtcttgatgcctaatatttttacatttctgtaaacatatttctgaaatattttttgcctttcaagcgacagatgcctcattttgtgaaaacttaatgatgattttgtgtttaagttccaaacatttgaataaaataattgacaat

SEQ ID NO: 9402 - DNA, 3549 bp, Homo sapiens
tggttgcgccatctgtgcacactaagaaatgggactctgaactggagctgctaagctaaagaaactgcttacagtttattttctgtgtaaaatgagtaggatgtctcttggaaatgttaagaaagaagaccctttgttgaaaaatgttgctctgggagacttactgcattgccgacagcacagatgtgaaggacatgagactaagagaaaccttgcaaactctataaagaaacttttgaaaaagtgtacatgaagaatgtagccctctccaaatcaaggatcttttggacctggctaatggagtgtttgaaaactgacatcagatttcttaatgtctgtcagaagacactaattccttaaatgaactactgctattttttttaaatcaaaaacttttcatttcagattttaaaaagggtaacttgtttttattgcatttgctgttgtttctataaatgactattgtaatgccaatatgacacagcttgtgaatgtttagtgtgctgctgttctgtgtacataaagtcatcaaagtggggtacagtaaagaggcttccaagcattactttaacctccctcaacaaggtatacctcagttccacggttgctaaattataaaattgaaaacactaacaaaatttgaataataaatcgatccatgttttgtaacaaattcactgtgttatttaaggaaaaaaaggtaagctatgcttagtgccaacaataagtggccattcgtaaagcagtgttttagcatttcttgtgctggcttgtaatgtagggaaaaaaagtgctgttttttgaaaagatggtgtcatttcccccttcttcccatgttttaaagccccatcttatatccagttcccaaaatttgcatacttacctaagtattttttttaggtgtgctgtgtttggggaatatttgaaaatttaaagcatgatttaaaattttttaaagtgagctgtgacactggaaagctcttcattttatcttttaaaatagagttttttctatttatatatgtaaaattgtagtgtatttcttttcaccaaacagtgtgtgggacattctttatcactgttttaggatcacctcaggaagtgtcgttacccagaattccccactgtctgctatgagacttgtaactttatcactatacttctgcttggtgccatcttgtcagagtaatatttgatgtctgtgatatgtaaagaattatcctaggataaagatattaaactttaagcagatttcagatgttactgctttaaaacaaatcagggataacaaattaaacgtataacttaaaatatgcaatgacatttagaggtaaccaatgttgatataggtagcatagcctagcctcctccccaaaattgcttttacaactaacactgatactaatttaggatagttcatgccttatccttgctaagaaaatggaattgatggtaggcaggtgctaaagtgcttttcaaaacaatattacgttagaatacaattggattcttcctcaaatttatacaggccaaaaagtaaaacattaattttctgaatttccagattaccaatcaattaatcaacaaatagccagtattatgctgtgtatttctgtcaggtcattttaaaatccatgttaattttataaaagaattttttacatgtcactgtcaggagctcactgtgaatgtgttgtcttcaaatggttatttaaccacacagtacactacattttacatatatgtacgtaatctctgggaatagtaaattaattatgttatttataaacaatacataggtcaacagactttaagcagggaggaaaagaagagtaatagcgtctgtgtgctgcagaccattcagaactgtcacgtgtgtccccatggtctcattcattgtattcctagcaattcccttttcaatgttgagttcacctctttatttcacaaagtacttggtctctcaatttcttgatctggttttgcttccatttaaaaactaatcaagaagggaaaatattgagaatgtgcatacaagaaaatcattaatttcctgaagatgaatttctacctgttgtgaacatttaactttctttttaaaagttaaacaaaaataaacaagggatattatgatgaatgtttggcttatgtgagtactagagataaaatttttaaacccagttattcacaatataaaatgttttcaagttagaaaaaatttttagaaatcctgggtattgtatttaactgtagctaaccaattttaaaacttgtattcttttgagaactattattaatagaaaaactttttataagcagtaaaataagaatgttccagtgactacctgtccttatacctagtcttgttaaaactttcttttgcagggtatttagtgtttggtttacagtcagtgcagagtgggcaagttaacagaaagtttgagctagagatactggaaaaaaaaaagatcaaagaatgagaaaaatggtgatccattttggggcaaactgagaccccccaaataactctttcctcatgtgtatggtgctcctcatgactcgtcttgtattttgcctttctgatacccatcagaactgctgctgctctaacttatactctttaccttgcccagatctccgcgtaaggaatgctttatgatcaacttgccataggactgatggattaaccagtgttcggctttatttgaagtctatgccctgcacagctcttgtatgtattttagatgctagaagtttttttagcatgtgatgtgtgattcttgtttgaattctaggtaccttgtgaattccagaaaaagagactgtgcttcacgattgttagtcccatgaacttgcactatctatctttcatggtgatgttttgaaaatacaatcaggaaaaaacccaacacctttggaatttaaaatagaatcatatcatgaaatttaaaaagaatctcttctgttgcatttcctcacccctaagtaacagctacatttaagtaaaatgcaggtggtaggggaaaaaaaaccatggcgagatggtggtttagtggaataaactgattactggtttttttgtttttttttttttttttaaagaaagaagcttcatcacagatactttccagtttctcttttatacttttttgaaagattactttttaggaacatttggtatgatatgcataaaattatttatccatttatgggcaaaatgatacaagtagcatcttgattgaacatcatttacctcagatattcaaccagcagtacgttttttatgcagtctcaacccatatcccatttgttacctctcagaatattggtaagcagttattttcgctttactctgtatttcttgtgttttgggcacaggttattgtactactgtcaaatcgtacttgctattttttctgcaagtatttaacagaaagcttaaaatccccataaaaccccaccttggataagtgattgttaaatattgtacaaataaaatgtatgctatccccattccatccccaagttaaataaaaaaatgaatacggt

SEQ ID NO: 9403 - DNA, 532 bp, Homo sapiens
cagagactactccactaatgcgcagtgtttattaaaggaacatgcacagatgtatctgtatataggtattgatatagccacagttatatcaatatttagactatggcagatagctaccaccaccacagggtgctaaaagaaacagtgatacaaaatttttttgatcaggaaggataatgaatgctggaaaagccaatcaaagtctctgtgtgatgagagtgatcaatggtcaagagattactgagaaactctttttctataatactaaattgtgattataagaaatagtccaaatgtttctgaagaattttcaatgttgtatatagaaaatacagaatttcatggtgatatcagaaatgtaaatattgtacagtattgtcatgtacaagcgtacctaatgcacactttatcttttattgtacaaagaaatagtgtacaaaattctttggtttctatggagtacacctaccagagactaccagtgtaaagtgataaataaaaatacaacctaaatgcttttctatgataatgt

SEQ ID NO: 9404 - DNA, 1184 bp, Homo sapiens
cctaaaacacgtggctctgacctgtgctgatggtgtgcagtcattcatattccagctgaatgcaaaaggcaacactctgtggatcacagagtgtaacaatggacctaaatggactatagtatattggatgttaaatccatatatgatgtatattttgtaaaattgggaaaatcactaccttgtaaaatagtttatttgtatcatcaatattatttctgttacttgaatagtagatattcatcatcatgcttttgcacttgaatttgcaactgaatggattttaaaaaataattctttaatgggatcatgagcatgaaatgggatcctgcatcacttgttttaactatttattttgccatgtttacattttgtatcttgtaaaaataaatccaactttgtgtctaaaaagttaaagattcatagctaggaaatgaaattcttgtaatttttttctaaaggaactgtaaagttttcacttggttcattttgtttcacaatttgactagatggactttttggtaaatactttagtggcatttcactgtcaaatatgaagttcaaggcaaaatagtattttctattactgtgcaggggaaagggatggatcgatacatgcaaatttaatgtagtaactcacttttccatatattttgaatgtatatttctatttatgataccaatttataaaaaataattacacagaaaaaatggaataggaaaaattatgcatctagcacatttaaactgtgcaaatatgaaaatttttcgaggattacattttatctgaaggctgcatattttaactggctttaaaactgtaacacatcacataaaagatactttaccaggtatgtattgcattatatcattgcaataattattggaagtctagatatcgagccatcccaggtgttgggcggggggagggttgtggcaagattgtcttttcaattttggagagttttcctgtggctacaaggcaagtaacgggttggaaaaagtctgactgtaagcgttggacaccttcatagtgtagtgttttagtgactttttttatacggttcttgtaaattagatacgtgtagtggtgtttcagaatgtttgtttatgcactagttcagacaactttccctgttacttgttcttgataagtgaaaactgcagggaaataaaaaatacatatc

SEQ ID NO: 9405 - DNA, 548 bp, Homo sapiens
tgccaccattcctaggagaggcagagaccagcctctaaagcacaagccaaaaactgtgtgaacggtgaactttggagtgaagatcaatcttgcacttggtgaagagtgcacattggacctcaaggcgaaagccagtggtttgcttggataaaatgttcccgcatgaggccacaggactgaggatgggaatttggcagggcctgagaagatggtctgacttccaggcttcctggtcaaagagagctacgtttgggcagttctgcagagaggatcctggcaactagtcccacctgactaggcctttagctgaaaggatttcttgacctccttgactgcctcagaggctgccaggtcaaaccctcttgtttatgtgattagctcagagcatctctatgaaatctaacccttcccctcatgagaaagcagttttccccaccaacagcatagtcaatgagaaaggcaactgtacgaagaaaacttccagtggaactaatatgaaatctatttgcaaattatggggggaaataaagcttttaaattatacaatg

SEQ ID NO: 9406 - DNA, 2773 bp, Homo sapiens
tggctcagtggctccatgtgttaatagcgatccatggggatctcgatggtccacagacctgcatgagtcattggcctgacagtaattacacatgtgagacacaacactcttggaggtcatcacagccaagcattgccacttaccatgaggaataaatgttgcttcattgtagccattttgagtctaaccgagactcatcaaagccttctgtcagtacagcccaagttccataccataaacgtttgttttcattccaagaagtagttctgcatttatcgagatctggggttcttaatttggaagaatacatgcatgagatgcagtaggtcctgagactgtaagatattaggagtatgttataggggcatgtatagatgtgggcttttcaggagaaaagtaaccattggtttaaatataatcatgagttcatttgtagctttagaattttaaaacattgactccaaactgaatggactatttccttggaaattctgactgagtccctggaagagtagtaattccaacaattccagccatttgttcaattaattttcccaacattcttctcccagtgctgggaatcacatttcctctgttctgtgcagaagacaaaaaggcaatcataaaagtttgttatatttgtgggggtgcctggaggaggattttcctcaacttaatggagccactgtccataaagtggctgttatcccttcatataattggtgagatcagccttctccttgacttggcacctaattatgcttcatgagatcctagattccacctgagtcaattgtgtccagagccccaaaccaggatggagttgttttccccagatatggggttctattcagccatagataatctagacagaggatttcagaatgaaaggaaaaatgtgtggagattagtcctagttcattctgagggccgactaagtggctcagccagcttcttactccatctgcagttcatactgccaaagagctcccacttccaaatccccagtgactttatggagaagattctgcattaaattgtctttcgaatgatggggaagcaaggcataatatgcgatgatgaggagaaagtagaccagtgaggtgattgcaagactaacaaggagactcaatgggaagtttttctttcttttagatattgcttttgaagtagatggtaaaatttttgtcatccttcttgtattttttgtaccccaagttacaatttttcttcttccttgtaaataatttaaacagtatttatttttgtaaggcataactagaaactaaaatatattctaaaaaattcattattctgaacaaagtgatcaaattagaatacatatttttcaacagtggtagagcttttaatatatgtttattgaaagttatctataatacttgcaccagtgttgaaaaaagttaacatgtaggcaagagcaatatgtttgtctcaaggatttttccatggtttcctcagtgatggtgtcctggaattattcaggtggtgaccatcactggtctaagtttgtgtgcagggttttcagatgtgtttttgtgaaacttggtagaaccatggctaataaagaggacagtgttgtcagggtccatctgccctccatagaaaaatgtctctggctcataaaatgagactccctcagggactaaatatgaactgacagcagtaactctgatacagaataatctaaattgcatcaaatggccttaattcagagtttgttaggcttatcagtatgttgcttttaattggggtgggaaagtagagggagagaaagcaagacatttattaagcacctcgtatgtgccaggcactatgctaagcactttacataagttaggattaatccctgcaagaatcctataaagaatgttactagcatttacacttcccaaatgaaggtaccaaagctcaaacgcaatgttgtgaagctgtttccttcagatttaggttatgtgggatgatgtgggattgaagaggaaagaaaggtgggattatccccctaggaagactttcaggcctgacttcataggaattcatccatcttatcatgtggagtttatctcaccctgctgttgcaggatgctatttgcatgtgtccccaggtgatgttttttctttggggagtaggggtttggcttcctcattcatccctcttgctaaaagaggagatagttgatgttgcatctaaagatgctataagacaatgaaagtttgatgttgtacatacctacaagtaccatttttgtgcatgattacactccactgacatcttccaagtactgcatgtgattgaataagaaacaagaaagtgaccacaccaaagcctccctggctggtgtagagggatcaggtccacagtggtgcagattcaaccaccacccagggagtgcttgcagactctgcatagatgttgctgcatgtgtcccatgtgcctgtcagaatggcagtgtttaattctcttgaaagaaagttatttgctcactatccccagcctcaaggagccaaggaagagtcattcacatggaaggtccgggactggtcagccactctgacttttctaccacattaaattctccattacatctcaatattggtaatggcttaagtgtaaagagccatgatgtgtatattaagctatgtgccacatatttatttttagactctccacagcattcatgtcaatatgggattaatgcctaaactttgtaaatattgtacagtttgtaaatcaatgaataaaggttttgagtgt

SEQ ID NO: 9407 - DNA, 512 bp, Homo sapiens
aaaaaaaaaaaaggatgatcaaaacacacagtgtttatgttggaatcttttggaactcctttgatctcactgttattattaacatttatttattatttttctaaatgtgaaagcaatacataatttagggaaaattggaaaatataggaaactttaaacgagaaaatgaaacctctcataatcccactgcatagaaataacaagcgttaacattttcatatttttttctttcagtcatttttctatttgtggtatatgtatatatgtacctatatgtatttgcatttgaaattttggaatcctgctctatgtacagttttgtattatactttttaaatcttgaactttataaacattttctgaaatcattgattattctacaaaaacatgattttaaacagctgtaaaatattctatgatatgaatgttttatgcattatttaagcctgtctctattgttggaatttcaggtcattttcataaatattgttgcaataaatatccttgaacac

SEQ ID NO: 9408 - DNA, 833 bp, Homo sapiens
tattttcagagaaaattgaaggtttttttaaacatcactggatttcttgattgaggaaacaagttctgaaataatagcacaatttcaaagaagagactctttgcaaagttgataacatttcaaaccctgaaggacagtgacttattatgtaagttcaattttgtaagttcattatgtaagatccttttttttttcataatatgtattcttggctgctatgcgtggtttttcaggaaatttaattatcttactgagatgtgaaagcaaaactagtaacagaacttacattttatttcatgctttcttaaacccgtgcatattctggtgaaacatgtaaaatactttaagtaaaattgaacatttttatttgaatttttgctgaactgataaaggtgtttatatttttgtttgttggtttgtttaattcatgtttgttgggactgaggtttaggaagtttgttactggttaaaaacctcaaatgaaatgcgaaagaatttgaatttttcctgcatatgtcaactttggacagctttcaagaaaaatgagaaaagtttcaacttctggcggttaaaatattaatgcagaatttactaagattttattcatttgcattagcaaatattcatgcagcagcagttgactgaaaatttattcttatgagacgtatagtattcatttttaaatgcatgattgtacattatgtatagacgacaatgtttttaatttataaatttcattctttgttaattgcatgggtttttctgcagcttattgtgaataccttggttctgttcaatagaaacattttgtatatattaaatactgaaatatc

SEQ ID NO: 9409 - DNA, 1927 bp, Homo sapiens
acctgagactggcctgcatgaatacagggtgtgcgtgaatgaaactgcccacatgaactttatgtgctacgatttaactgcagccttgaacacacacaaaaatattcttaagggctcagatttagcaaacacggaagaattttaaaatgagctctcctttcaacccttgttaacaagtgcctaaaaatggaagtacctgttcagattaatcaaagcaataggatttgatttgattaggtatctttttacaccagtatgttatttttaaccaaaatgtaaagttcttattaaactcattacctgccattgtgattgtcccatcatggcccacctggtttcctgatgttgtaaataacatcaatgcatctgctgtgggtcctttgctgagatgtcttcgaaggaattttgttttagccatatccatcaactttgtattttacttgcaatttggaagaaggaaagtcacatgatgaaactccttttgtctataaccaggccctggcaaagtgcaaacaggatgcaactgcagtggcacaaaggtcactcaatcctttgtttccagtttcacattctactacttctgcgctagagaacgatgctctgtgagaggcattcactagtatgaatgtggggatatagtgtataagacttatttgcagtactgtgttcttcagctagaggcagctttttaaataatgcaagtgtatttattagcattaaaattaacatctcagtaatcagcattagcatttctgaggaccattattaattctgagaacagaaattggtgccttgcaaggaagtttactagctctatcaacaagcattcaaggttacatctgctagcagagtagtgttaggaacctggccttactctcctctgacaatcgcaattttttcttattttttataaattcaagaagatacacttggcatcgtgtatcgaggctaagtttttcatgcatttcccagactacttatggagaattgcagtttaagttgctgaaaagtattaacatggtattaagcttaaataatacgtaatgggactagatggcccactaagccactgttattttccttcctctctggcagggcacttgatccattccaaagtcaaaaactggactgaagctaaatttgtacttttcataatatacattctgcttctggcttatcttcttggtacatcaatatattaattgtaaagtttattgtatagtatttaaccgctgaagttcctattttatgttgtgcttatgtgaaccccttggtgaaggtcccttttccttggatgtgtagttatatgatctttttaaatgtacagatattttgctataaaatcggtgcagttttttatggtttttacacttctctttaattcccacctaagcctctgggtaatattgtaaatattgttttaaaatgcatcagcctatgctatacaatctgaatgttattttaacttatagttttttttaatatatatatttaactataaggacagtttagggaacaagttacctaccacatttcactttagtgtacctatttacagaaagattaaactgccacctgcgggcacattcccataaatgtgtactttactttaaaaagaacatgccacgattttgtctttctgtggactcaacattcacttcgattaaaaatagcaatttgaccaagttggacttccactacaaagcagctgttttccaaagttcaatgctgacatatatgtatattaaaataattgcctatttattaatctacaaatagacaacgttggcatgttcttttctgtttgtctattaatgggcctgcttcttagcaatattagaatgttttataaaagcaattcatgttacttttctggtcttttcatggcatatgagcaaataataaactatttacactactattctgt

SEQ ID NO: 9410 - DNA, 1069 bp, Homo sapiens
acccacactggagcgatattgttggcaaaacttaatcatgattgttttgtaataacaagaaggagcatcactgtctactcagaagactgagaaacctgctgttcattatgtagttcagatatttatcacaatcatcctcattatggaagaccttttaaagcattgttttagaatgtctgagtattaagatacagattaattgggaatatctgagtattaagtactttcttcagagtataagatgtttacctcatctttttacttttgtgtgtgtagttctttcaagttgtaggaaacattttaatggaatttaaactcaaaaacttgaatacaggacaatgcttgccttttcatgtatgtactacattttttgctaagaaatactgatatttctgtttagttgagctagaaatacttcttatttatacatttaggaaagcaaataatgcctactactccgacttttatagaagctacttttaaatcagaatatttaatttttgatattcatataattaatagaagttgcatttatattttttatggggcatagttccttatgtgtttttttaatgtattttcatactacatactgaatttgtatgtttttaaaattgttacatctagacaactgtaaacattatttttttagctagtgcaaacctagtacctgccatttttactaatttttgtctttaaaaaaagcaaaaaagcacattgacctaagttgaaaattaagtaagtttatttttaacaaaaaatgcctgaaaaaagctaaattatttaagtcattaagatattgagaaaaaatttgaaatttttactatttctgtttccacaattccaaatatttatcttggtgtatatattgttactttaacagaacttgcattattttgtttttaataaatataaacatgaaatttttgtatgtgagaatgattgaactagtttgttcttaatctcaaaaatttagttaccaaagtagaaaaggtattttgatactagatattaaaaactacatatagttaatataattttataatttttgtaattaaatgtgctcctg

SEQ ID NO: 9411 - DNA, 3426 bp, Homo sapiens
agatcatgtcctccaagccatgaaagtgtctacgcttttgtttttccattatttcaattgggggaaaatattaactttgctgaattgaaagttttaaaaatccttttagtattctaaaacacaattgtttctaattcgtttctagaaatgtttgcttatttccctactaaaatttgtatctgatcaaagcacataagaatataaataatagcaaactactattaaacaacagaacaacttgtaaaacaaattgtgtttgctttaagaaaaatgtttattgcactcatgtcatagggttaattggaggttattttatttttggttgtcatggtgattgaaagagataatgtaaatgccttataaaatcttcattatgaaatattatcagttgctttataaactcactctttttatggatccttcatggaaacatgtttgatttctgtgtctacaacagggccacatattaaattacttctgaatggtgaattcatcttacaaaatgttccaagttttggacaaggaaaaacattacattggatattgaattcatggagcctttacagaagcatcacatttaaaccaatgtgaattcaaaaaagagaaggaaactttttaaattcaatttagagtacataaaaaaagaaatccgcgaagcattgaggggaacaagatgagtctaatccgcagcacttcgatcactgtgagagaactcaaagtgggttgcaatcattcctaacacaggctgaaactaaacaatcttgctcctagagtttatgttggatactcaattcttaaccaaaatcttggtctccacaaactctaccatcccttttctcttcactctatagacagtggcatgccattgatgctgtacagaattgcaggtgaaagggagaattttagacttaatttttaactctattgcacttaaagattttagttaggttaccactgtcattttcattttctatgttaaagaatacctttcagtgctgtgctccagtatctaaaaattttatcaccaggggaataaactcaatacacattcattaaacttttgttgtaattaaactgctatatattgtttgccatatattatggcccaaggaatatagttataatcaggctacattcacattttcttttctcatcttaaaaccctttatgttcaaaatacattagcagaggccatgaaagtgaaaaaaaatcagatttttgctagtaagtttttatatttgacatcattttaaatgctcaaagagttgccctatatatgcatgttatccattataaatgcactcagcagctaagagaaatttgagaggaaaagtggaagaagtgttttctggagcagaagattccacttctttggtcctcatctttacttaaaaagctcttatagaaaggattaatcattttgactgcatacaaactatgtctctgacatgcacatacactgctttataatgaaaatgaggacactttctgatggtcagtaaaatcttaaatgatttttgccactggtattccttcctcttttgactttttattggtacaactgtagggaagaatctacaacctggagcatttcaggtttgctctttaaatatagacacccctcaccatgagctctctgtgaatccgtgaatttcctaaaattgtaagcaaaatgttgaatatcagggcatttttttttctgaggtgggagtatgtcactcacagcaaacttggaaagaaggctatgactcccaagaggcagtgaaccattgccttaaattaatagcagcctctcaagtccattgaggcctcatgtaaaattcccatttttcatctttacactccttttctcccctcatttcctcttctccttactaaggtaaaaagaccctgcacagcattattacttaagttgaaaaagcttcaactctcaaggactcatgtataccatatgttccacttattgctttgttagtcaaaatgcatgttatgtagaaaatggtcaatggcaaatttttataaatacagctaccccatcaaagctgaacttgaaacgttttagcagaattttaaatatgtgaaagttcattgtggtcatggtgagaaaactaaaactacatgagtttcatgttagaaaagaatttttaaacaatcttcagatggcttgaacacgtgccattatagtatctaacaaaaagtggcataaaatattacaaaacatccaacactagaaagcaatgactaacatttaatttgtttacaaaaatgtttattgtcttcagtacaaaaagttaaaaccatgattggattcataatgcacttgtcttatcccttatttatggagctagactgacatatttcaaaccaatctcttctgtggtcttctccatctcagttaatgcaacttcaaccttccagatgctcaggtcaaaaactgaaagttgcttttgactcctctatttctgtttcaactctcgtctaatccaacagcaaatccccttgatgctacctttgaaatataactagaaaagaatgacttgccaccatatccactaggtgtcactacctctaacctttttaatcgcaatatgcttattatttagttccctaatttcccagtccttgtcttgaacaatcttttctcagtacaacagccatagtgattctgttaaccatgaatttgattgtgtcacttccctgctcacaatcttccaatgacttctccctccggtggccttcaaggtcctttatgagtgttacccctctacacgtccacaccactcaccacacatacatacacatgcacacacacacacatgcaattctacctttttctaacaccatctcttatctctcattattctgcctcttacttaccctattatggctcccaagaaagttcctgctttagtgttttgttccctctgccccagagagctccccttagtgatctcagttcaaatattatcttatcagtaagacaaacccttctcccatctgccttccctatcccctgtacctgacaatctatgagtttgcttctttatttctgtctatacttccccctccccagccccaaacatgcccatcacatgccctagaaggtaagtcccatgaaggcaggggctttgtcagttttgttcatttggtatttctggcatatatattctctaaatatttcttgaattaatgaactgaaaaatgtgtgttaaagttgctaagtgtaactgtatcatactttttttgtattttaaattttaaaataaaggctaatatatttagacaggatttccaaaaactttgtcttcaaattttaattttcttcctaatattcttcacattaaactatggactctaattttctggataaaatatcctgccttatggaaatgaaatatgaaattttattaaaatgctgctatatta

SEQ ID NO: 9412 - DNA, 1189 bp, Homo sapiens
caaagcactcccttaggcattatttaatgtttgatttagtaatagtccaatatttggcgatgaggtaattctccctaaggaatctgaaagtatattttcctcccagttctacaagcatatttgagaacccttcctttcccaagtattgcgaatgtgcagaaagcaacagttacggagggaggacatcataaggaagttattaacgggcatgtattatcacatcaagcatgcaataatgtgcaaattttgcatttagttttatggcatgatttatatatggcatatttatattgtatattctggaaaaaaaatatatatatatatttaaaggggagatactctccctgacatttctaacatatgtattaagccaaacatgagtgaatagctttcagggcgataaaactaaatatatgtctgtgtgtgtgtgtgtatgtatacacacatatacatatatatatacacatacatacacatacatacatacatacatatatatctgataaaattgtgatgttttgttcaaagttgtagttcttgtgcatgtttactttattagagtaggaaggctactggcattaattattaataccaaatattttagccttaaatttttgtcattttaaaatctgatttaatgttttctgctgtttaaggtcttgggaggctttcaattgtattttatatgagagaatcacacaagtttgtgctatctatggccctgcaaaaatataaccattacatgtttaaattgtaaattttagagcataccagtactcagtatagcattgaacatttcttatgatttttaaaagttgctagtactggggagaaataattgttgattaatttgagaattattcctttcctagactaattaaaatctggaaatctgttttgtatatgatctaatacaaagatgagctctgaacaaacactgaatcatgttaatagacagtagccaagttatattgaatatatcagaatctgtgtgaagttacacaattaattgtccctgtttcaaactgagtaaattggaaacattttctttctttttctggaaattttgtccattttaaaaaccaatcattttaagaagacatgacaatgcaatgaaacagatgataaatatttatgcttaaaatatgtatgtctaattgagtctcttttttattctgttttcttgttt

SEQ ID NO: 9413 - DNA, 3485 bp, Homo sapiens
gtctgggcagtaaatccacagccaacaaacatagaaacgacaaatcaccatgtaacaaccagagatgactgaaaccactctgaaataatgaatgtggatagctgccttttttaacactagaaaacattccaaaactttaaggtgttggtgtatttgccagctttatttgctgtactttatttgtatttgccattcagtctagcttttaagtatatttttttctttttctcattttcaatgcacattagttttgcatctgttttgtgacctgttagatgtgacacattctctttttgtttattcccttattctaaatgagttctaaaaacataatattttggcaaaaattgaaaaaagctggagacattttgtgacatgcatacagatagcatgtgttattaaaaagagttgcctattgaaatgatcatgtttctggagaaattaagcttatagacagcatgtgttattaaaaagagttacctattgaaatgatagtgtttctggagatttctcagccccatcttcctccagcttgtctaccttcctcatgcaaacaatattccacatttttatatctagagcatgactggctaactggagagggaaggaaaagtttagatctggttactggagcaagtctcaaagagaaactctgaaagcttccagaatcacaggtataagataaggatagcattgacatttgctgggagttacagtgatagtttcatctcagcagttcatttttttcttcagtcactgctggttttctttgactattatagttgccaggaagatccttgctcttcttactttaaaaccagcatttaagtggcaatttggatgtaataggatgagaccaaatttatctaattattacagtagtaatacatttaagagttaaaaatgtgtttttatatatccacatatgataacaaaagattcaattcccaagcctaaattttgaagcatgtggtattgtcaaatctagcttaccatcttttttgggggtacttgcaaccatagtaaaggaagatggaatagactttagttaactttaattataattatatgttaaataaggcacataaccagtttccaaggtcatcatggttgcttaaagtctttccccttctgtactccatggaaatattctcagtaaaccaaaaacaaaaatggaaaaataatcaccaacccccatcccgacacacacacagagtccaaagcaaaagtcagtgtgtattgaatttaacaagtaatgcagtttgggatgcttttgctacattttggtggcattttaactagttatctgaatatttattaatcgtacttcctcttgtaaagttaactacttacttttttgttgttgtttttttaacatcaggttctgtatctaataggagatgtaacactttatttcatggcaggtttttattgcagagacttgaagtcttagttttttaaactggcacataaaacactttttgctgttatttttatttatgtcaatactgcagagtatctttatgccttattcaagtggattctgagcctgtatgtcacaatgtaaacactggaggttcactcacctacgcactcacccaccacctctgaaagaaacagaaactgcagagaaagacagcatcttagctcattttgtttttaaatgaggttttagacgcttgccacttcctaagggaaatcctaaaacagagcaagtgatgctcccaggtatcactgtgaacttttttctttcaaagtgtgaatttttacactggctttttcatttttttaaagtaattgaagcttgtggctttacaacttagtgttttttgctatccagataacaagtttcattgtttagaacccagtgacacttaataggtagataaattgtcctttaaaatatcccagatgatatacacaatatggtacatttgtgctctctctctctgtttttctctctttctctttctagttagatcaagataacgatgacttgtaccctccctgattctgttacagtagggcccgggcagatctgtgtttgttaaacaggccttgtttgtgcatgctttgctatgaatgaagttcctttaaggacaaagaaaagcacacttttcttcttttgagcatatctgcttttactttaaatctgctaatttctaaaatgtagagtccttcaccaatcccagagactcaatttggaaatgaactgatttcaagccgttactgtgaataaagcaccccagcattttgtataagctcttaattaaacctgtacagcttctttacctgatttaagaaagggagacaagcaataggggggaataagcttcttcaaaattcattccaagcacaaaagaaattttttccctttgcatataaacttgacatcagttgattctgttggggtcggggtgggtatgcagggattgccttttattatcaagtgatttatttcaagagcctttgaggggattcaggtgaaggaacccccatctgtgctggagagttggatactcctttaaatagcccccaccacagtcataacaataatgataatgctggattatttgttaagccaaggttgtctgcctcatatccatcatgctgtttgcaatattcttgctttcaatcaatttatactgagtgtaactttaggatttctgctattaaatgcatgctctctatcctgcttcagtttctggctttgctttgtctgtttcaaaatatgtagcttcctcttttgtacaacaaaaaactcattctcacttttactaaatatactgtaggagtcatcattgatgttatttttctcttatgtatctgtaaagatttttggcatatgaatgtaatattaaagtcaatgatgctataacttgcgatgtttgcatcatgtcaacctttttgaaggagtgaaaaagccctactatgtttttaaatagcaagtgtaagctcagtgctagagtggatatacacaccgcatgttttcatatgtggcacttttatgtatcatgttgggttattgttctagactggactgttaaatactatgtttgaggctgggttgtcatttttataactgtcttggtgttttatggccattatttattacttttgatacacagaatgagctgcatgcatttatagagcaataagaggatgtatttaatgtgccttgtttttaactgaataagaactggaagcatgaatcaataaaactgattaaaatggtctatttgctagcattttgatgttacttgcagtcagataactttgattactgttgaagtttaaaaaaagtttgaaaatatttttacaaactgtgtttttgatgacacaaaagtgaaatatctacagagatagatgtaattttataagactgccagaattatttgtattaatttgttgctgtagcctttagggcatgacttctgtatttgtgcaatcctattctacaattacattcatcctattacaactca

SEQ ID NO: 9414 - DNA, 52 bp, Homo sapiens
agtgtaactgatgtttttatatagtaaacccattaaatactgtgaaaataac

SEQ ID NO: 9415 - DNA, 1075 bp, Homo sapiens
acgtcctaactgggcagcccaaccctcccctgcaagtttgtagctcaagttgtaatgtgaaagtcatattttatttgtggcatttttatatagttctcatccacatgctaaatggaaagactttatgaaatccttctctcttaaaaaggaatttattgtaaaagaatactcacactaaattaaattcaaatttcattttagaataagttaactaaatcagtctaataattaaaattttaaaactcctggattatgacatttggagtttcatatgcagcattaattaagctcacatcaaaatagaccagccatttgcacatagttaccagtcactctgtttctgaaaccaatccagaaattcatgttagaacattgtcaggcacttctaggtattggacaagtgacagaaactgatcatccatattcaaaatatttacagaaaaaagtgtcagtgaaatgtaggtctatatggaaaagttaccattaggaaaatatggccatactgcttttttacccctgcactatttcagtgcaccacagaataggattcgagatttacatatgcctgtttgtgattttatctcagaatataacaactctggattacattttcctctcaactgaaaaccctcagtaatgcaaagaaaggccttcctttttcttcagaatcacaagtgactaaattgccttctagccattttttcttgtaaaaaaagtgttttgaggaggctgtattttttattccatttcaatattaaccaaataggctgagaaattcatagcaattgaattaagacttgagttcaagatgttaaaggaatccttttgtatgacttgtccagaccggcctattgccctacccgtttgattctctgggaggcatggtgctcctcctggctgcacatgctctctgtgaactgatcgcatcttgggttcttctcaatttgacatacttgggagtcggaatgactggatgggggatgggtagaggatgactggcacacttgtatagtatgtaatgttgtgtacatattatttatatggttgtggctcaaataaagtttaattccaacac

SEQ ID NO: 9416 - DNA, 749 bp, Homo sapiens
catcaagatgcccaacagaggaactctttctttctaaccttgttcagattgaggtgaaaagtccatcttgctgatttgatgattgaaatgtgaaagtgaagtggaaggaatgaatgaagtgtgttttttttttcttttttgaggaattatcagggaagtgaggaaatgtttgggagaggactttctaagctctatttaggtgttagatctaattacttatagattctgtagtctggtgaaggtgtgggtgacgtgatgagaggtttgagaaatgggtgaaatgaaatgggggatatgtaggtcaaatcaaattaaagatgatttttttaatgtgaataaagttatgttctgatagtttgtacagaaaaaataaaatggatgcccatgttttattgctattactaaatgtcaagattgtatgctattatgtcttgtaaatttcttttgttggtgtaaatatggaaatgccacattggttaagtgccatcatttgtaatgcaatgtgtcacttgaaaagagatttgaagaaactgacaacttcaaaaacaaatgagaagcccaaggaactgtgagcaattaaaagcaaaccgcgacaccctttgtctccaccacacatagtgtactttggaagcacaacgtccaggctggtaccgcagcgccatgcccattcctcgcctcattcataggacacttcactgccattttctattcacataaaagaaaaataaatgtggaaatttcatccttgg

SEQ ID NO: 9417 - DNA, 161 bp, Homo sapiens
gcctggatttaaaacacagccgtctggccagctgcctcgaatatctgacagcttagcaaaaagggccaaagctttccataggcgtgctgcacttgcttggtaaattaagcagcttttgtatcttcccctttgactttaggtaataaagcatccaaacttgt

SEQ ID NO: 9418 - DNA, 1645 bp, Homo sapiens
accttaagaaatccccatttgtggaatttggaaacgtgtgttgactcctggtggtaaattaaatagtttttttcatcagaaaaattattttttagccattttttttctttggggtggatctgatgccattgatatatctaaaatgtgggataaaacttctttaatagctagaaatcaccataaataagaatgctaaacagaattgaaaattatatcaacttaaaattttaagacagcccagaagacattaatgactctcacttatgaaattgtttggcttttgccactttcttccttgcctttgctatatggtagaatcacagaacttacttagagaataaatatgtctattgttcaagagtaacaggtttaactcatgaccaagtgatgtacatccaagtgatgtattctggaaacgatggaattttacagttacagttccattgagtcaaatcccattttatatatacataaaaattaagttctgagtgagttctagctaaatataagtgcgactgtaaacgcagccaatttttttaagcagaatatgagaacacctaagtattctcttcatagcagttcctataaagggattaaacacttatttctgtgttatggttcttattcatatatttttatagcacttttggaacctatatttgtgcttgaaggtgtttttgatatttggaaacagtataagccatttggagtcatgattggtggtcaagtggattcaagctaaaatactaagaccagcattcttagtggcgcttataaattagctctcacctggtttccaaactgcttttaacaatggtagtgctcctggaacaatccttccaagctcctctaaggacaatatttaattcagatactaaaggtaagactggttgttacttttgttttgttgtacaattagtactttatagtcacatgttgtatatattaaatagcccagttttattcagacttgtaaatagaactatttcaatgtagttaatctaaaaacaaaaaagaaaaccccagtcacgatttgcatgttctctgtaagcttcatccatgctggttattgcactgaatgatatattattagggcatgttaacagtataccagtaacagcactttatctcatttatatgaacacctttgaggtgctacttaagtccaagctctgatgtattattcatttgtaaagataaggtacaggaatgaaccttggtttaaaggtatttttatatgaaaatggtgtgttattggaagatgttaaaatgctaatttgagagaagtaggagtgtatctgttttatatgttgggatgtgaaatttattttctaaaattgaggagaaggaagttatatatttgcagaatgttttaaagtgaattgttgtaatgaagttcctgtgaacatcattatggttttgtacaaataggaacctctgatgtcattcttcaacgtttgttcctgtgtgtacaattgtactttgtatgaacagctttatcatttttataggctttccatgagttttgctgtaactactatggcttatttattttctttaatatttgtgaaagtcttactcctttgttagttttgtttctgcacaactactgtacttttccatatggaataaagactattaatag

SEQ ID NO: 9419 - DNA, 1230 bp, Homo sapiens
cttcatataagacagatggatgatctgtgaacataagtgtttattaaaaatggcaattaaatataaattacttttgtgggggaatgcctaataaatacattgactatatataaaatgaatatatacatacacatgtatgcctgtatatatatattcattctccagtgttgctgaattaaaattctgctggactttttaacatagcaaatccgatgtttataaactggtaatcaaaaaggttttttcttttaggtgagtgggaaagtattacccttgttttaaatatctaagcaatgcctatcaacccttttttgtgttatgattactgtagtcatatttatgaaaaaaggtttgtgttttactcttgctagtgagaaaagtgggacaaaatatacttttgaaataaaatgctatatggcacctaattattttttcttttaaaatgccttaagttgcagtctcattttgataatcatttgcttccagtgtttaaaaattaaaaaaagaatggggagaaggttatgagaagagcattattaagtttccaaatttaatttgaattccaaattcacctagcaataaaatctaatttttaaaaagtatataaatataaaatgtataaatgatggatagatttttgtattgatttgcaaaatgcagattatatttgataggctatagtatgtagatattccttttaggaatattacagctgtaaattatatgagacttgccagtcaaatgctatttggtttaaaaaaattattgcaatctcaagttaatggaatatttttaaatcccacattcagagtttaaaacactggttttcaatgtgttttttagtgttgtcacttgtttatagataaatatataaataacctgtttggatcctggtcctttttaactgttccttggtaattctgagcatttatttgatgacttaatatttttcactacctttggagaacagatgaacattattcaccatgaatggatctatactgtgtggtcatgagttgtgtatacttccataacactgtatttttcttctgtcagtacccttaggatacactttaaaacaccttaaggtctgatgttatggcaacaaactactttttcaaacctaaataggaaccatgtaatttctcaaaagtgattgaacagtttgcccacacttagtttgttggtcttatgtaaaacattggctcaaaataaagtacacactgattt

SEQ ID NO: 9420 - DNA, 653 bp, Homo sapiens
gacacatttgaaaacagacatatcaagttctatgtgatgattttgggtttttaatactataaatacttgattgtaaactaaattcaagatcatttataggaaaatctagtttcacagctatttgaatttttttctggatttactatataactcttattttttaaaagatcattctgttctttcaaggagaaataagcctaaaagaagaaaaacaaaaaaaattctgtataaaactgtaatcctttgtattcatgtttacagtgctattactataattcaaaattatgtatgtgacttagagttatataatcataatttatgtttatttcaaatatctaagtttattgcttggatttctagtgagagctgttgaatttggtgatgtcaaatgtttctagggtttttttagtttgtttttattgaaaaatttaattatttatgctataggtgatattctctttgaataaacctataatagaaaatagcagacaacataaacatctttgtaaatatcaaacctaatacatttcttgtccagtgataaaacaactggtagaattatttaaacactttagatttttaaataatatacatggctttaatttttactgtgtgtatagctacatgatgaaattaattaaatattaagaggt

SEQ ID NO: 9421 - DNA, 153 bp, Homo sapiens
atgctgatgcgtgacatagcttcctcattttatttttctgaagtgatctgctggaattccaaacagaagttccatatatacaaatatgtggcttaaatatttctaaatagaagaactattttcaagtaaaataaaggctgaggttttgtattt

SEQ ID NO: 9422 - DNA, 15 bp, Homo sapiens
agcaacgaaaaacgc

SEQ ID NO: 9423 - DNA, 835 bp, Homo sapiens
gccgcccctgcccgcccggccccgccgcggcccggacccccagccagcccctcacagctcttccccagctccgcctccccacactcctccttgcgcacccactcattttatttgaccctcgatggccgtctgcagcgaataagtgcaggtctccgagcgtgattttaaccttttttgcacagcagtctctgcaattagctcaccgaccttcaactttgctgtaaaccttttggttttcctacttactcttcttctgtggagttatcctcctacaattcccctccccctcgtctttctcttacctcctacttctctttcttgtaatgaaactcttcacctttaggagacctgggcagtcctgtcaggcagcagcgattccgacccgccaagtctcggcctccacattaaccataggatgttgactctagaacctggacccacccagcgcgtcctttcttatccccgagtggatggatggatggatggatggtagggatgttaataattttagtggaacaaagcctgtgaaatgattgtacatagtgttaatttattgtaacgaatggctagtttttattctcgtcaaggcacaaaaccagttcatgcttaacctttttttcctttcctttctttgcttttctttctctcctctcatactttctcttctctctcttttaattttcttgtgagataatattctaagaggctctagaaacatgaaatactcagtagtgatgggtttcccacttctcctcaatccgttgcatgaaataattactatgtgccctaatgcacacaaatagctaaggagaatccacccaaacacctttaaagg

SEQ ID NO: 9424 - DNA, 2098 bp, Homo sapiens
cattgaaagccgaaaagagaagaaagctgactcagggaaaggtgttgacagggagacttgtctatgactcgatcttcaatttattttttacatatatatgagaagagtgtcacaattattaataaaactgctttgatcatgtattgtaaattctgtccctcaacccaaatccaccttcatactgtaagtagtgcaatacttgtttcatttctgtgtttaaacttctgagcagtgagacatccctgtgagcagatacaatagccaatgcaagaatctgtgtgttccttgctgtacgttagacatttgtaaactggattctgattgtcagttttatgagagcaatagcttccttaaagagataagtcatatttacctagtttgtattttcctactttagtgacctgaagatgcctgataatttcattcagaagaatttttgaaaggtagtcttacttctttttagtttttatagcttagcattagtgacttatttcaaaagacccaaatcaaaaagttagtttgaaagcattttttaataattgtatttatgcatttccttgatttaatatgataaatttaatacttaacaatttatatgtaactaaaacttaaagtcatttgaaaaatatatagaaacctatttacaacttgttaaggacaatcagacataatgcagagttaagtagtatttgcttaaaattcaagttgtgactaatgatcaaatactaggcttgtacgaaatgctttagaaaaactttgtaacagttttgtgggatttttcaatataaacctttatcagaaatatactaagtttgtctcccactgacaacagatgttttccaaataaacatattctatacatacttgtggaatgccacatggtgaatcattgtatatgaaattccactcctgtacagttactctgcagctaatggtcatgcactgcttaatgctggtcctgaatcatgttctcatgttagaccaacagctctccaattgtcattttttttctgcagagttttttttttccacttttaaattaaatgcatgttgtggaaaaacagtcttttaaaatgaaatttcagattccatttgagaaggttctgtagatatttcagtccatataaaataatacatctttactaaacttatataaggggagagaaagttatgaagttttggacattactaaaagtacagtatttgatttcactttcaatgaatgtgaagttaataaaactaaatctcataatgctcttggttcctaagaatgagtagtaatcatcaactttataatactccaatattccgttttataataattcagagccctgtggcttttacacaccgttaattatgtactctgttggaagtgcacatgaaaagtgaagaaaagttcctcttgtgattaaactaatgggaggaaataaatcaacaaagtctccattaagttctacattttgagaccttttaaaaattcccctcacaattctttaaggagcccccctttttatggaacatgagcctaaaaattatagaaagaagaattttaagttaataaagtttgtatttataaatgctgaaaaaatacagaaactttctgttccaaatgtgttgcctttgtgtattttataatacagatactacattgtaaacatttccattgttttatgatttagccagtgattccccaaagcagcctcttagtgttttaatatattaataactgttttgttaaaaatgatcatagtgaatttaaatcttcacatgatcacctatttgaataagcaatcatatccaatgaaattctgtatttctgagtatttttatagtcattttgttcttgtgtgaattttaaagctatccctatgttaatcctaatattttgaaatcatataaaatataataaaaatgtagtattatatatttacttctaatttcagattcctggtcaaaattactaaatatcttgaatgtaatttagtgccaagtttaaataatgtgtaaatgtgactaggatattgtgtttttcacaattaagaaatgttatgtggaaataaatatttatcctaacttccttgcacattttaaattgtga

SEQ ID NO: 9425 - DNA, 876 bp, Homo sapiens
atgcttagaattttaaacctgaagagacactgtgaattcttttgtttggaagaagtgaactggactactttaaaacttttaagggttttctatgttcttcctacctgttaaacctcttccctttctgtgtgtttttattttagcagatagttcaaagcaataaaagatttcttttttaatttgaggtattactgcttttggaaaagttattttataaatatgtgcatattgtcataaaatattgtatgattaattgatttaaataatgcttagccttaattttagataatgtaaatttagaggaatgtactttacaagatagattgtataagaagccaaataatgaaagcctagaaaaaactaatttatacttatctgaaggttacaaattagacttttaaattttctttgtagttggtggtgtttgagggttggctagaaatgaaagcctggattttgtgccatgtttgtaatatagtttgttccttgatcaaataatcagagaaaagaaacttaaagatctttgtctgtgaagaagaaaattatctccctagttcaatctgtagtgaaataagactacagaaggcattgttttttccttttttattttttgtattatatatttttcttaaatatgttttattgtcttctctaagcaaaaagttcttaataaacatagtatttctctctgcgtcctatttcattagtgaagacatagttcacctaaaatggcatcctgctctgaatctagactttttagaaatggcatatgtttttgatgatatgtcaacattcaaaattgtcctaattaaattgttgtttaaatgtaatgtcaactctttataaacttaaaaataaacaagtaattaaccactc

SEQ ID NO: 9426 - DNA, 2484 bp, Homo sapiens
aaagaaaccaagaattttccattttgtgatcaattgtttacagcccgtgatggtgatgtgtttgtgtcaacaggactcccacaggaggtctatgccaaactgactgtttttacaaatgtatacttaaggtcagtgcctataacaagacagagacctctggtcagcaaactggaactcagtaaactggagaaatagtatcgatgggaggtttctattttcacaaccagctgacactgctgaagagcagaggcgtaatggctactcagacgataggaaccaatttaaaggggggagggaagttaaatttttatgtaaattcaacatgtgacacttgataatagtaattgtcaccagtgtttatgttttaactgccacacctgccatatttttacaaaacgtgtgctgtgaatttatcacttttctttttaattcacaggttgtttactattatatgtgactatttttgtaaatgggtttgtgtttggggagagggattaaagggagggaattctacatttctctattgtattgtataactggatatattttaaatggaggcatgctgcaattctcattcacacataaaaaaatcacatcacaaaagggaagagtttacttcttgtttcaggatgtttttagatttttgaggtgcttaaatagctattcgtatttttaaggtgtctcatccagaaaaaatttaatgtgcctgtaaatgttccatagaatcacaagcattaaagagttgttttatttttacataacccattaaatgtacatgtatatatgtatatatgtatatgtgcgtgtatatacatatatatgtatacacacatgcacacacagagatatacacataccattacattgtcattcacagtcccagcagcatgactatcacatttttgataagtgtcctttggcataaaataaaaatatcctatcagtcctttctaagaagcctgaattgaccaaaaaacatccccaccaccactttataaagttgattctgctttatcctgcagtattgtttagccatcttctgctcttggtaaggttgacatagtatatgtcaatttaaaaaataaaagtctgctttgtaaatagtaattttacccagtggtgcatgtttgagcaaacaaaaatgatgatttaagcacactacttattgcatcaaatatgtaccacagtaagtatagtttgcaagctttcaacaggtaatatgatgtaattggttccattatagtttgaagctgtcactgctgcatgtttatcttgcctatgctgctgtatcttattccttccactgttcagaagtctaatatgggaagccatatatcagtggtaaagtgaagcaaattgttctaccaagacctcattcttcatgtcattaagcaataggttgcagcaaacaaggaagagcttcttgctttttattcttccaaccttaattgaacactcaatgatgaaaagcccgactgtacaaacatgttgcaagctgcttaaatctgtttaaaatatatggttagagttttctaagaaaatataaatactgtaaaaagttcattttattttatttttcagccttttgtacgtaaaatgagaaattaaaagtatcttcaggtggatgtcacagtcactattgttagtttctgttcctagcacttttaaattgaagcacttcacaaaataagaagcaaggactaggatgcagtgtaggtttctgcttttttattagtactgtaaacttgcacacatttcaatgtgaaacaaatctcaaactgagttcaatgtttatttgctttcaatagtaatgccttatcattgaaagaggcttaaagaaaaaaaaaatcagctgatactcttggcattgcttgaatccaatgtttccacctagtctttttattcagtaatcatcagtcttttccaatgtttgtttacacagatagatcttattgacccatatggcactagaactgtatcagatataatatgggatcccagctttttttcctctcccacaaaaccaggtagtgaagttatattaccagttacagcaaaatactttgtgtttcacaagcaacaataaatgtagattctttatactgaagctattgacttgtagtgtgttggtgaaatgcatgcaggaaaatgctgttaccataaagaacggtaaaccacattacaatcaagccaaaagaataaaggtttcgcttttgtttttgtatttaattgttgtctttgtttctatctttgaaatgccatttaaaggtagatttctatcatgtaaaaataatctatctgaaaaacaaatgtaaagaacacacattaattactataattcatctttcaattttttcatggaatggaagttaattaagaagagtgtattggataactactttaatattggccaaaaagctagatatggcatcaggtagactagtggaaagttacaaaaattaataaaaaattgactaacatttt

SEQ ID NO: 9427 - DNA, 940 bp, Homo sapiens
tagcttaaattattctaggaccaactcttctcttatttaaggcactgtatttaattggatttcctgggctcatcattgtttaaactgaagaccaagaaaacttggacggtggttaatcttccagactgtattttgttttttcctttctagccacatgactgtggcattgcacaaatacagtctctgtagggattttaaaagatttcagactgttttgatagaaaaagctaaattttaaaatgcatatctcacagttgcctacctgtcaaactgtgtgaaacctgccaatctgtgtagatcagagctccaaattttggattatcgggcctgtgcaagattgttaactaaggctgggaaataataagatttagagtcctaattttcaatatatctgaagataatgatgactttttaatgtaaaagtaattattgtaagaaaaagatttaattgttccatgtgtattttatttatggtagtttagaagacatgttttgatgaaaatgaacagccgcatgttcattcaagctgaagatgcatagctagttccacagagcatgcccacatggattgcatctggaatccattcacatttttatgatcatgactgatcagatttgcaaattcttaagggtgaaataggcctatttttgctattttggacaaataaatgattctatatgtgcaggtccttacacagttttctctaaagttaagagttaggacaatcctctggggagagtctagttcactgccctccctcagctgactccagagatggaggtagaaggaattgcctttcttttttaaacagcatcatcttgattcttagcttggacagcacctttaagctctaccccctacatcaaaatgcactttagtgccccttcacggtacctcgtgtggggtggggactgagaactctttgagatgaaaaaattt

SEQ ID NO: 9428 - DNA, 1893 bp, Homo sapiens
tttgggaaattatgcatcacttcatggacaaatatactgtaaacctcactttaaacaacttttcaaatccaaaggaaattatgatgaaggttttggacataagcagcataaagatagatggaactgcaaaaaccaaagcagatcagtggactttattcctaatgaagaaccaaatatgtgtaaaaatattgcagaaaacacccttgtacctggagatcgtaatgaacatttagatgctggtaacagtgaagggcaaaggaatgatttgagaaaattaggggaaaggggaaaattaaaagtcatttggcctccttccaaggagatccctaagaaaaccttaccctttgaggaagagctcaaaatgagtaaacctaagtggccacctgaaatgacaaccctgctatcccctgaatttaaaagtgaatctctgctagaagatgttagaactccagaaaataaaggacaaagacaagatcactttccatttttgcagccttatctacagtccacccatgtttgtcagaaagaggatgttataggaatcaaagaaatgaaaatgcctgaaggaagaaaagatgaaaagaaggaaggaaggaagaatgtgcaagataggccgagtgaagctgaagacacaaagagtaacaggaaaagtgctatggatcttaatgacaacaataatgtgattgtgcagagtgctgaaaaggagaaaaatgaaaaaactaaccaaactaatggtgcagaagttttacaggttactaacactgatgatgagatgatgccagaaaatcataaagaaaatttgaataagaataataataacaattatgtagcagtctcatatctgaataattgcaggcagaagacatctattttagaatttcttgatctattacccttgtcgagtgaagcaaatgacactgcaaatgaatatgaaattgagaagttagaaaatacatctagaatctcagagttacttggtatatttgaatctgaaaagacttattcgaggaatgtactagcaatggctctgaagaaacagactgacagagcagctgctggcagtcctgtgcagcctgctccaaaaccaagcctcagcagaggccttatggtaaaggggggaagttcaatcatctctcctgatacaaatctcttaaacattaaaggaagccattcaaagagcaaaaatttacactttttcttttctaacaccgtgaaaatcactgcattttccaagaaaaatgagaacattttcaattgtgatttaatagattctgtagatcaaattaaaaatatgccatgcttggatttaagggaatttggaaaggatgttaaaccttggcatgttgaaacaacagaagctgcccgcaataatgaaaacacaggttttgatgctctgagccatgaatgtacagctaagcctttgtttcccagagtggaggtgcagtcagaacaactcacggtggaagagcagattaaaagaaacaggtgctacagtgacactgagtaaaatatctatggccactgacagtccacacttaggcactgagagatattgatgttctgaaataagattttatgaatttggatacccttttgaggaacttgatgtaaacatggtgttcagaaatctcgtgtctatctcaatgggatatttcttgtattacaccttgtcatttttttcacaatttatttacatctacttttgtttgaactggaatgaagagatgaaacactatggatatgttttccattcaaatggcactttagcatattgttctgttttcctgtaaaacatcatgggtgtgatttttatactgctgctgcttgtcacaattattataacttctctgtaatttcctctgaaataaaattgaatcacctgaggtgcaaacc

SEQ ID NO: 9429 - DNA, 836 bp, Homo sapiens
gatttttaccaatgtaaatatgtttcttttctttttttaagaaatgggacctaaggtgttggtattttccaggtgtcgggggaaatgaactggtgaaggggttttgtaaagtttttgcttcctgctataagttcttttcttggattaccaatttatgaatgttagactctggtcatagaaacaataaatgagttagaagggccagatttcattctcagtcccagagcattgctatttatctcaaaaagtgacttccaaacaactcttaggattgacgtaccgtgcatctgagataaaaatttggttctgggaaactgaaactcacagtaatgtgtcatatcatccctgcaaaaattaatacacaaatagaaaccattttcaaaagcaattcagaaaggatgcacagtcaggaagacacactggatgtgattattaatatcgtgtgtgttgttacattatatttttacatatattcccatgtaatgtgtacagtctttgcagttccaccaagaaatgaacttggtacctgcagagtggctgcagttaaatagatgggagtttaaatttgagaatcaaacattctatgtgtttggaagacaactctgcttgctcatccaaggattaaatctggtcagcaggtggaatgtgtataaaatgctacttaacaaagtaaacaaaagattttttttttctttttttttctttcttttttgttttgctctttcagaacaaacattaaatggtgcctccaaggaaactttgccaaatataatctcacctgcttccttccagacagtgtcgctaagtgcatttcacagtttttggatctggcaggc

SEQ ID NO: 9430 - DNA, 4980 bp, Homo sapiens
ttactcaaaactacaagtcccaagcaaagtgaactatttgttcctggaagtatttaataagttgcaaatgcagttcctttcataatatctcagcaccagaaacaaaaattaagattatcaaagcattttgaatagtgcactgccatgtgtcctgtctgtgaatgaagaagaattaccattctctctttgtaggcatgctgtatgtaattgacacaagggaacagtatttgcatttgtactgtcttagaatattatttatttttttgtatttgtaaatctgtggacaaaagagggtttcctcactccttttactcactgggctcatgacagtgaaggagatgctccatctgcttctccccctttctcttgctgtagtccaatgtgctatgagcatcagcttactttgtcacttagagcaagcaaaacccagtgcaagagtctcgttcagctctaaataggtttgctttcttttagttacagtgcccattttgaaattgcctatacagtcttagtgaccatttaaaccggacgaactaggtgtttaattttcactcttcatgttcaattagcagttcaaattaaagaagatggttattggagaacttttttgaatggttttgtattaaattgctttgaaatagatttcatttcttgtgcacacagccaagatttcttcaatgggtgtgagctagttgagggttaaccttgtaggttgcagagtgtatttgtttgtttgtttgtttttctctgtgatgaggtcagtgctctgattttgaaggaggatattcactgaagctcatagttataaacaaggaaatcactgttaagaatgggaatttgtcctgtgttctgggaataacataaagagagcaactgatttcagccaggttttgccactaccctataattagtgcagtcttatgttataaaagaaagaagttaactatatttggggacaaaaaaatatttcaagagttgataaagattacctgtgcagtgcagagcactttaatgcaaccagctttcaagaaaaagccctatctagtacttgatgttgatgtttttattttgctgagcaaaataaagccaatgggagaaagactattttaccctttgcttttctccttaaacgtaatccagatgactttcctgttactaaacactgagcagcattacactacaatgcttctttggtttccaggaatttttttcaaatggggctgtttctggaaaaatgaaaaattctattggacaatggcaatatcaacaatgaggaaaattactgaagaataagtttccataagtctcctacatagcagtgttatttatgtacagataagaaaaccatatgtcagccaaagattttatctcttcttctaacttttagtaagaggaaaaagggattataaaacccttcataaatcaagaaggccatcacttagaacgaaccccaaacaaaaatgccataatataaatgtgtgaatcagggctgtgaagacaacagcagaaatgctaacaagcgtgcagaaacaccagagagtgcgtatcctgctcagaaccattcacatttaattcaattcttggaaaaaattaaagctttttgcccacaatttgcaatctgtgggttaatagttaaaagaatgttcccaaccaaaaaattcttaccgtaatattatatcttgccctacttatttacaaaataatatgtttctgttatggtccttagtaataattgaagaggcttagaaatacatctgcttgtttattgagaaaacgatgcaaataattctgcttttagagccttgttattttatttcacaaaacaggcatatgtctaggagtgtaatttgtggatggttgagtttgtaagaacaatcataaaaggacttgttagtctccagaacatctgctaaaatgcaagtatatgtataaggtaatagcatattacagctgaaaattttgagaaggtaaaagtttcttaattaaaatatgaacatatttagcttgctttagtgtctggggcaagtcctctcaatggctaaaattaactttagagatccatgtgttcaggtttagatcatatgacactcgagcacagaagaataatttcaaggaggtcatcttgtaaattaaaggtttagaagaattgcataaaacgtagtaaatggggtctgtcattagcaaaggcaaatctaagcaatcatttttccccccagaagttacttagaaggagaactgggaacacttggggtctctctaactgatggcattcacttcacacagtcgtctatgttatccagagatttttatttcattttacattttagggcacagttctttggggctaattaaaatggggtttgcaggctttttatggtgaagaataatatatctctgtctatagctttcccatggtagcctgataaggctgagagagaaaaatatgtgcagtatctcatcctccccctgtaccaggccatagctttgaagtgtattttgtaaattcaactataggttagtcagaatgctgtttttcgttaattaacttagcctgtgttgatatctcctccttcctggtcacattcaaaccttcccagagtacaaaggggtatgtagaaaggattccagaagaagtaatactttattctctaatgttaatagcttttctggatctcttagtagggggaaagtagaaaatcgagtagaatttggcctcaggtcaataaatgatataaaaacatgtgttctatttatgtatatatatgtatgtttctccaaaaagtgataaaaccaaaatatcactgactcatccctacccatattcttttcataaaacccactcaccaggtacaatagaaacttccctccttgtttgtcagcctcctgttcatgttccccacacacctgaaggtggtagaatcttttcagcctcttagccagtgagctaaatatggctaagcacaggtcataagagcacctaaggccagcatataagccaactacagttcacctttccaaatttggtcctatggatgttgagcatagggaagcaactctcagtattttggattattcaagtgtatgtggtaaaaatgcagatgattgctgctttaccccagggtttattagcatcctacttctgctgggctgcatcattatataatgccacaggcatctagtcaaggtaaagaagccagaaaggttaggcaagaagtgagataaaatcagatcacctttgatcaaaatggttggtgaacctccacatgtccagttctgttgccaaactttccattcagagtatttggtggagtttgaatttgagcaaactaaatgccttcatcttaggtagaaagggcctgaatcttccattttatattcaaacctcattgttatttggcctaagtaaaaagtcagatttcatttccatttacctgagttcgctttaaagagcttttcaaagagagctttatagacacccacaattgtccccaatctcttcatgatgttgcattaatagttgtttttgtccctttcttggaaatgttaatgccaaagttgcctgaacattgggcggttttcttaatttgaagtataaaaattataaagagtaattccaaaggtattaaaagattgtttaacagtatgtgtggtgatgtcattatctccagagaggcttcaagaaatcctttggaaataaaaagttaaatgtttacatttcatgtggtatttcaggtcttcaggttctgattagcttacttttttcctttgtctttggctgatttctgctttgtagataaataataatagccctgagatgtttctaacatttaaataagaaaaaaatcaaatcgaagtcagcctgctggaaaagtgatcacatggcagttgcagtaacttgtatggaaagagaaaatgcaatgagcccagttactgcacttgccactaccatgctgtccatggaaggaataatcagcagttcagttgtcacaagccgcccttgaagaaaacgcagcaaaatattttaaaatgaagatattgcagtccccagagccagtgaaggtttcttttggtaaaatgaaattgtgccattgtcaaagtaccccgtagtgatgagcactgactggttcactggccacattttagttcttcataataataggccacaaaagggctctgtggtttgcctccatgtgcactggcccctccccacccctagggggcactcagtagctgctgagaaggcctgtccacgaggctgttggaacccctccaataaatacttagaggtagtgtatctgatgcttgttttcgtggagaaaattgtattggagaacttaaaacatcacgaatatttttaataggatccgcagacacccaaaggagaagcttggtcttttccaggtatttccaacttgagttcaacccaaagcctttgaaaggaatgcattaccacatgaccacatgctgagaccccatggggtctaacacgggacctaagaaagtctctgcagccagatagtacatggtgtctccacaaaactaggcattctggagattgcccagaaagggatgtgaggggaccgttaagatctgtcttgcttatctcatgcactcacattccttcagcctcctggagttcctgataaaaggaagccagggtgtggacattttttagctattgatttcccaatagcttgtggatcagttgtacacccacacttccttctctgcctaattccgtttttctggaaaaagtagtatgcccatgtatgtgtgtttttcttaacacaggtccatgaaagtttggcttcctggtttgatgtctgttgcgtggcctggaaaccagggagcagcaactattgagatggtttctgtgttcagtgaaaaattctatttcattgagacaattttttctttatccacagtaattttttgacactgtcatcatgaaactacccttaggaaaataagattacctgc

SEQ ID NO: 9431 - DNA, 84 bp, Homo sapiens
aacaagactctgaacatactaccttcacactcggtaatcaacaatacagtgtggttcaaataagaataaagtgctcttaccttt

SEQ ID NO: 9432 - DNA, 1921 bp, Homo sapiens
agtggtgcctagagttagtgctctgtgtcacagatcacccttctccatccaccagtagagccacagagtaggcacagaccagaggcttctaatccgacttcacagaatagcggcacaggccccattccccatagagatgtttagtttggccttcgcactggtctttttttttaatccttcagttaccaatatttagatacaagaatatttgacataaaaatcggaagttctgtatttcttgaaaaatctgatagtatgacaacacagagcctgcatccccagctggagacaactgaccagagctgcatactaacagtccccagtaggaggcaaggactccattttctcacagtcttcagcatcccagcaggagccccactatgattcctttatcttcttaaggccaggctgcatctgattcctgttgacattttagtggggaccacagccatatccagtttcagttttcagatgaggaaatggaagcctatttaggtaaaagaacttgcctggagtcacgccaccttcagagcaggaattagaacccaaggcttctgacacatatccccattacactgtgtgtttgagtgtgcacacatgcacatgctttttgtttgtatgtttcctttttagaaccagggacttgctctgttgcccaggctggagtgcagtggtggatagcggctcactgcagcctcaaactcctggctcaaatgatcctccctcctcagcctcccattagctaagactacaggtgtgcaccaccatgcctggctaatttttgaatattttttagagccagcttcttactatatttgcccaggctggtcttgaactcctggcctcaaggagttcccttgaggatgttccacccatgtcagcctcccacagtgctgggattgcaggcttgagccattgtattaatagttggcctacactgtcttttgtttcttcatttacaagaggtaaaaatcagtaagaatgaatgctttcatttagattctatgatgactgccatataaatcagctaccttttcagaaatgacattgaaatactgcatcctctttgacttataccccacacatacatgcagggtctaggtgggaccaacagtggctccagatgtatatacacacgggtccagggacaacagaacaggccaggctacagtatggacttgaacctctgcttcacttctggtctctgttttacagtagtgctcaccaatatttcaataaattctactgaacttactctaatagaacattattcaacccccaaagacttatctcttcactatgacatctccatactttatttttaggagacagactttcaaaaccagagaaatcaggtgccttcctcaaggtcatgctccaacccaggccaactattaaatgcttgcatctgttagctggattagtctctatgtatactgaactgtgatgaaaatctatagctttgttttagaaaattattgttgatggactattaatattatattaacaatttctcagtaagtgtgttttttcctcattgaatctaggaatgctgggctttaagttgataactgtgtcatttcaatcaagtacaaggattttgaggcagattttgctagatatcttagtaatcccccacaatgttttatgtaactcttctcagaatatcaatacattaattattttagatgacatattaaataatctatgaatattaatgaaaacaatacagttgaagtgagtgttgtttaacatgatagtagctgaggataacaaacctcaaaaaatcaaagtattaattactcctttccaagtatatgtatagagcatgtgtcattgcttttataaaacgcacttaatagctttctttctaaaaggcaactgaactttctaaaaggtaaataaactgaacttgatatta

SEQ ID NO: 9433 - DNA, 400 bp, Homo sapiens
ctcagctaaccacaaatgtctcctccaggctatgaaattggccgatttcaagaacacatctccttttcaaccccattccttatctgctccaacctggactcatttagatcgtgcttatttggattgcaaaagggagtcccaccatcgctggtggtatcccagggtccctgctcaagttttctttgaaaaggagggctggaatggtacatcacataggcaagtcctgccctgtatttaggctttgcctgcttggtgtgatgtaagggaaattgaaagacttgcccattcaaaatgatctttaccgtggcctgccccatgcttatggtccccagcatttacagtaacttgtgaatgttaagtatcatctcttatctaaatattaaaagataagtcaaacatt

SEQ ID NO: 9434 - DNA, 2072 bp, Homo sapiens
ttgaccttgagttgagatggatttctattaaagatatctctagtttaaagatactagtcacctgccataagtcatggaatagtttttatatttacagcttttatatttaaaacttgtaagagtttttttaatgattgaggaaaaagtcatttagaaaacttcagttttcggccagcgcgtcgagggaggggccagcgacacatggcctagtaaccgtccggccgcggcgctggcttaagccatggctgagggtagctggattcctcaggcccgggcgctcctacagcagtgcctgcacgcccggctgcaaattcgcccagccaatggggacgttgcggcccagtgggtggaggtccaaagaggactggtgatctacgtgtgctttttcaagggagctgataaagaacttcttcccaaaatggccgaagctggactgtactgctgccatctctggctcactgcaacctccctgcctgattctcctgcctcagcctgccgagtgcctgcgattacaggcgcgcgccgccacacctgactggttttcgtatttttttggtggagacggggtttcgctgtgttggccgggctggtctccagctcctaaccgcgagtgatccgccagcctcggcctcccgaggtgccgggattgcagacggagtctggttcacttagtgctcaatggtgcccaggctggagtgcagtggcgtgatctccgctcgctacaacctccacctcccagctgcctgccttggcctcccgaagtgccaagagtgcagcctctgcccggccgccaccccgtctgggaagtgaggagcgtctctgcctggctgcccattgtctgggacgtgagcagcccctctgcctggctgcccagtctggaaagtgaggagcgtctctgcccggccgccatcccatctaggaagtgaggagcgcctcttcccacccgccatcccatctaggaagtgaggagcttctctgcctggccgcccatcgtctgagatgtggggagcacctctgcccggccgcgaccccatttgggaggtgaggagcaactctgcccagccgccccgtctgagaagtgaggagaccctccgcctggcaaccgccccgtctgataagtaaggagcccctctgcccagcagccgccccgtctgagaagtgaggagcccctctgcccagcagccaccctgtctgggaagtgaggagcgtctccgcccggcagccacccagtccgggagggaggtgggggggtcagtcccccgtccggccagccgccccgtccgggaggtgaggggcgcctctgcccagctgcccctactgggaagtgaggagcccctctgccccgccagccaccccgtccgggagggaggtgggggggtcagccccccgcccggccagccgccccgtccgggagggaggtgggggatcagccccccgcccggctagccgccccgtccgggaggcgaggggcgcctctgcccggctgcccctactgggaagtgaggagcccctctgcccggccagccgccccgtccaggagggaggtgggggggtcagccccccgcccggccagccgcccggtccgggagggaggtgggggggtcagccccccgcccggccagccgccccgtccgggaggttaggggcgcctctgcccggccgcccctactgggaagtgaggagcccctctgcccggccaccaccccgtctgggaggtgtacccaacagctcattgagagcgggcgatgatgacagtggcggctttgtggagtggaggtggggggaaggtggggaaaagattgagaaatcggatggttgccgtgtctgtgtagaaagaagtagacatgggagacttttcattttgttctgtactaagaaaaattcttaccctaaaacttaaagtataataaaaaaaaaaaaacttcagttttctaaaaattatatttaaaattgtaatcaaaatgtacctagtttataaatgtttattttgtacttaatacctgtaaagtcttagttttcagacattaagtgactgtatcatgttcggtttaataaagaatttatgcagcacc

SEQ ID NO: 9435 - DNA, 566 bp, Homo sapiens
acaaggtgacaaaacataatagattgggaggtggtttgtttggtgaatggggctttaatttattctgttttttaaaagcttgtacagacactcatgtagaaattattcaagaagttattgtctaagagatgagcagtaggtaagaaaacctcagtcattgactcttcaatgtaatgatcagagtttaaaaccattttctaataataaattaaatcttcagttgaacaaattattttgtgaatctgtttcactcaatggattgtaaagaaggctcctaaatttgagttgtttgctaatcatttcatttgcatcattagggtatccttaaactgattttctattacaattggaagtggagaatatgtgcatctacactaaaaaaatgtttaagatatcaaaaacctctcctcgtgcttcaaaatgacaggaatcctgtgcattatactaagaattacatgccataagatgacttcagaaatcctacttcagaagtgtaataaatggatggggaaatcgtttgatggggaaaagtctcttgtaagtaaaagtagtcaaattcaaatggc

SEQ ID NO: 9436 - DNA, 214 bp, Homo sapiens
gtgagttatataaacttacttccattctgtttcggattttaagtttgagagacttgctaatgaatctcctttatgttgttttccttttcattgtttttggattgttttatgtttgtccttttttttcttaatgtggatttcattgagttgattttttgataatctgcaatctggataatttgtactgctaaagttttaataaactcgacatgag

SEQ ID NO: 9437 - DNA, 196 bp, Homo sapiens
ttgaatctgcagaaatgaccaagcaatcacttttttggagtatagttttataaaaaaagaatgcagggtttgaagttccttacctgataattgtgtctggcacatgataggggatcagtaaattgtaattcctaaccctactgtactcccaaacatggtgattcatggtcaagaaaaatcttatatatatatatat

SEQ ID NO: 9438 - DNA, 309 bp, Homo sapiens
tttagtaaaccaattttttattcattttaaataggttttaaacgacttttgtttgcggggcttttaaaaggaaaaccgaattaggtccacttcaatgtccacctgtgagaaaggaaaaatttttttgttgtttaacttgtctttttgttatgcaaatgagatttctttgaatgtattgttctgtttgtgttatttcagatgattcaaatatcaaaaggaagattcttccattaaattgcctttgtaatatgagaatgtattagtacaaactaactaataaaatatatactatatgaaaagagcaaaaac

SEQ ID NO: 9439 - DNA, 2284 bp, Homo sapiens
ctctccacctcagcattgcatcgtatcatcattttcgctacgaatttatttttcaacaataagctttaacttaatttgggggattaacacttttgctgagggagaaaaagaaaacatacattatgaagcctttccaaaattaggtgcttggtaatcacgttaatggtataattttttttttttaatatctggagaacattaataacaagttaaattattctttagtggtcattttttaagtgcacaattaataagaagcacaacttgttcacaaactcattcagaaatgattctcccaacaatgcgtatcagctattcattgatacttagagtgggtgtgatttatttgacattttactgcttctttctgtctgtgtgttttaatttgcatctgccaagcataatgcatcttttttcctctgccattcttgtgttgattggagaatttttctgtatgtaattagaaaaaaatgtaaaacatgatttatgtgaaatactgtatagtaaaagttggtctaatagtagaactttaaaattttttcttattgtgaggaatctgttaaaagtttaaagctttgctgaaaactgaattcattctcaggaatttcataaatcttctccccaggtaaataattgaaatagctgtaaaataagtagatagctgctgttaatataatacagtacattttggggggcatatgtgtggttggggggtccttaaaaatcaaaatttgccatttcagttggatgaattactagaggtaataacaaatcttactatgaaatcaagaggtttaagaacatacactgggcagatgttgattccgtgcatgcccaccttttattaccaaacaaggttttgtttatatgattgtattagaaatgctcagacttccccagaaatgaaccataaattttggaacttcctttcagctcaagaggttcagctatattgtatttgtgcagtgtaatcactactatttctgctcggtttcctaaaaggaaaaaaaaggcgcagtggtgatgaccctcatgaatgagccacgcttctgcattcttcttagaaactgctgtgaaaaacaatttatgtttgcagggtttaaaaatcagtaaaaatgggaatgattgagctaaaacccactctatgagaaggaagattactgaaaagcatgtgacatattgctacaaagattttttttcctaaatgattcagtaattgaatgattatttaatatatagtgctatcaagcaatccctggtactttggacttccatggcttgttatataaaattacatttttacatgtaaaaataaactaaacaaatctaatgataaaatatgtcagatccatgttctaaaaaatttttgtaatgacatgacattacaagagtataaaaatggacattaaatcatggccttgcattaaaatatggaaagcagagcagtacatattcaaatgtattcagaaagtcaaaagattacctatcgttctacaataaaatacatggaaatagcttgctatttttatatacatttccaaaatattaagataactttctgtaagagtcaatgattctgttcgactaaatagctgtcctttccaacacattgctacttttttaaatactgtatcataagttcagcctgtcatactttttgcattgatcgttatgaataccagaccatttgtaagtgtggttgaagagcaaaatgctaattgacatctctagtaaatactgttacaggattcatgaacttgaataattctacagtttgaaactctgatgctatatatacatggtataatgtattcagactttgattactacttatttaaaatggaatgttttatggttgtgcatatggatgtgaagtgaaaatattagccttaactttaaaatttgggtgtttgatagtgtttattttgatattggtgaattagtcaccagtaaattttaaaaaagcacttggttgaaaattgtacttgaatacatacatgcatgctgctaaactagaactttaatttttccccataacttttataagtcccatttataaacccacttttaaaaataacaggtccaagttagagtgatgtgtgtatattattcaaaaaaatgtactggtgtgatatcttgtatgaatgatcatttaaatacagtacattactgtagaagctaaattgatctttataattaagcagaaattacaaaactaggaataatcaacattgtaagatatgttaataaaaacctgctgtcatttggtttgtgaaaggtcctt

SEQ ID NO: 9440 - DNA, 1354 bp, Homo sapiens
attgtgcttcctaaccctaaatctgtccagagtaggaacattcatggtaatcgactgtctgtcattgcgtaagaaagcactgatatggggtcagcttctttggacatatggtccatgcctgaaccttactgaaccacttgcagattccaaaacatcttatcctatcctctaccactctcccacatgtgttgtgcagcctgagctgggcgctgccttcctttctcatcccatggggccctgtgggacactgagaacacctttacaatagtttaaacagtcattcatgcccccagtgtctaggaagataacagccagtctcaccccagtctaatcatggaccctgataatattgcttgatttttcctatcaagttacttttcaatccattcagaatctgccccagtggagacccaggagttcctttcctgcactcttctccatcctcccacctttgctgggcttttctatcactcccacctcccccagagtcagggctccattgctgagtgccccatcctggaggattggccccaagatctcctagaacaggataattgcctgtgtttaggcagataggcctaaatctttcagattctttctacaaggcaaataacccctctcttgttaattatgatgctgagaaagcctctgtctctttatttcaccttgccaagacacccacactactttggtgatgaaaagaaaggaatgagagggaaagtttggacctgtcactttggtgacagggaaagtccaggtcactttattctgtaactctccattcactggtcaaataactccatgaggctatcagtggctacagtggaaggacctgatcttgtccatctttgtgtgcacagagcctagcacagggcttggtagagggtatatctagtgaatggagaatacatggagaaacttaactaagttacacaagcatatctgacaggaatgttaccttcaattgtatgttacatatgattagtcacttttcatacactataacctctgatttttcactcaagtttgggctgattatattgtaatgatgttagataatactcaacatgattcagtatgacaaacttttttgagcacctactttatataaaacatgacaaattgcagtgtgatgtaatcaaaaacaaagaagccctataagaccatttctctagaacagatgttcttaatatttttcttactctaaaatatgtggtagatagtatgcaagaaaagccgggtgcggtggctcaggcctgtaatcccagcactttgggaggccaagatgggcggatcatgaagtcaggagttcgagaccagcctgaccaacatggtgaaaccccgtctctactaa

SEQ ID NO: 9441 - DNA, 583 bp, Homo sapiens
gccctcccggaggtggacccccttcccagcacctctgcgagagatccggggacctgtgggcagctggcggaggggagactcagcagacggaccctctccgttgcctgcctcccaaaatggagccaggcttccaacttccgctgccttcggacatagggacccagttcccaggagcggggaggtagggttggggctggggcatttggattgtaattgggagctctgccgtacgccagggcggttccaaactctaaaccgttcccaccgtcagggagacctacagtttcgggggaccaccctggtctggccttgtatataggaaatgctgctgaactgaatagaaaggaacttgggagatttgaaacagtgctcgggttttcgctaggaccggtttgggctttgtacaggttatttaatagctttgttaaagataattataataattataacattaataaaaatgttgcttttgtcttcagctccatgcagagctacagcatgatatgtctctgtaaagtgatcagcagttgcagcgtgaaaataaatactttaactcaggggtcactacaggaagaccccgttg

SEQ ID NO: 9442 - DNA, 1265 bp, Homo sapiens
tcatccttcgcagaacatgagtttatgggaatgccttttccctctggcactccagaacaaacctctatatgttgctgaaacacacaggccatttcattgagggaaaacataatatcttgaagaatattgttaaaaccttacttaaagcttgtttgttctagttagcaggaaatagtgttctttttaaaaagttgcacattaggaacagagtatatatgtacagttatacatacctctctctatatatacatgtatagtgagtgtggcttagtaatagatcacggcatgtttcccgctccaagagaattcactttaccttcagcagttaccgaggagctaaacatgctgccaaccagcttgtccaacaactccaggaaaactgtttttcaaaacgccatgtcctaggggccgagggaaatgctgttggtgagaatcgacctcactgtcagcgtttctccacctgaagtgatgatggatgagaaaaaacaccaccaaatgacaagtcacaccctccccattagtatcctgttaggggaaaatagtagcagagtcattgttacaggtgtactatggctgtatttttagagattaatttgtgtagattgtgtaaattcctgttgtctgaccttggtggtgggagggggagactatgtgtcatgatttcaatgattgtttaattgtaggtcaatgaaatatttgcttatttatattcagagatgtaccatgttaaagaggcgtcttgtattttcttcccatttgtaatgtatcttatttatatatgaagtaagttctgaaaactgtttatggtattttcgtgcatttgtgagccaaagagaaaagattaaaattagtgagatttgtatttatattagagtgcccttaaaataatgatttaagcattttactgtctgtaagagaattctaagattgtacataaagtcatatatatggaaatcctgttacttaaatagcatctgctcttctcttacgctctctgtctggctgtacgtctggtgttctcaatgcttttctagcaactgttggataataactagatctcctgtaattttgtagtagttgatgaccaatctctgtgactcgcttagctgaaacctaaggcaacatttccgaagaccttctgaagatctcagataaagtgaccaggctcacaactgtttttgaagaagggaaattcacactgtgcgttttagagtatgcaagaagaatataaataaataaaaatattctccatggagaatttgaac

SEQ ID NO: 9443 - DNA, 153 bp, Homo sapiens
tggggctcagagcagaaccaaagcatgattgtgacctccagaggtgatggtaactgcacacatggtttccaagggtcttcctcctaaatttccaggggcctcccaaggaaaatggacatattctttttggaaataaaatacttctaccaacat

SEQ ID NO: 9444 - DNA, 999 bp, Homo sapiens
ctttgaaccattctttggaattggcgtggtatatttaaccacgggagcgtgtctggaaacgcaaactatcattaatttcatactagtttgtaccgtatctgtaggcatcctgtaaataattccaaggggaaaactaaacgaggacgtgggttgtatcctgccaggttgagtggggctcacacgctagggtgagatgtcagaaagcgcttgtattttaaacaaccaaaaagaattgtaagggtggcttgctgccaggcttgcactgccgttcctgggggtgtgcatcttcgggaaaggtggtggcggggcgtccactaggtttcctgtcccctgctgctccttccgtaagaaaatgaaatattctatgcctaatactcacacgcaacatttcttgtactttgtaagtcgtttgcgagaatgcagaccacctcactaaactgtaaacggtaaagagatttttacttttggtctccgtgagtcgcatctctactaaggtttacacaggaattccacctgaagacttgtgttaaagttctacagcgcgcactgttaactgaacgtctttttcttcagcctatacgcggatccttgttttgagctctcagaatcactcagacaacattttgtaactgctgctgttgctttctacatacaccttataaagtgacatttcaaaagaaataaggtgccacagttttaaaccagaaggtggcactctgtggctccttgtagtattatagctatactgggaaagcatagatacagcaataaagtacagtaattttactttttttcttgtgttacatctaaattacaacccttaattgccacgtgtgcacttactactctccagtatgtcttattactctccagtatgtcacgcatctttaacttttcacgtcctatgtttgctttctcccatttttaagagatggtaagttaactggaattgatttactgaatgaaattaaatgcagatatccctgtttttgaaataag

SEQ ID NO: 9445 - DNA, 3936 bp, Homo sapiens
aaagagtgagataattgtaacctaagagacttttagccaaacaccccagcagctgcgtccaatccattttattatctgcatggcacattctccagtattttccaaaaaagtcttgtgttgacttcagatgactatgacttcttttttaaactcttgctgtaaaagatggtgaggacttcattttttttaaaggttttttagaatactgttccaagaagtttagtgttttgcagctttgagctaggtggtaatgcaaatataaaatgctgggaacagaaaaggacaggttaattccaattgttgaggagttaagtcattgatggggtgggtcattgatgagttcttaaaggatggtatggaattttgtttgttaaggctaggaaagacagggagagacaaaagtaaacatgcagaaagaaatcttatatcctctataccaaactttgcttaaggatgagaaatgagatgtgttatgtgagaacattattttgagcccaaaatgtgtcatcacagtttttaaaaatcttatatatgtatttatatgtgtttcgtatttgtatatagtatcaggaattggttctagttcccaaattatcttttcttccttggttttgttctcttggcttgatgttcacattgaatatttgtgtttctatataggctaatgtaaaagattccaagcaaaccttaagtgaaattgttttctgatttgcatcctgtttagctcttaatgtatctaaggatgttctcatctcaccattctactcatttagtgagttttctgatcttgtttaggcaatatttgcatacttatgcaataagataaaggtacccttgcctgcagtagttctgtttcctgtagaaaagtggataaagagtcccagaagaagttcttactagcttgggagttacctgattaaccagagaaaatttttggcttacttatggaacaagcattatttcttctttgttaggaaagatctaaatatggtccttgacttttaataatcattctttagaatgttaaataaaggcaacccaagtaaagggagaaaatgtttctttgtgcttcctgtttgagaaattcagttgcttccatttcgcatgttctgcacatttatccgatgtaacctcaaaagaataactggtaataagggaaggaaacagcagcaacaatcattgctgattcaagtttaaggttaaaatatggaatttttagcttggatgatttatattaaaatctttccattttttttttcagttttggcttgatgccatgttaagaatgatgtgaattcttcccagttctgccctggtgctagacattgccccatactttcaattagacactagctgtatctaaatagtcccactcagtaaacttacatcttgaaaaacaagaccagtaagaggccagtgaaagtactaaagaaagaaaccaatgttgtgtgagtttcaaagcagctgcaatgctgtgtaaaagtagagtgttcattctccatttccaagagtgtttcagaataggatgtcttaagacttcagtcatgtcagagatttttttttttaggtgattattgagtttctccttctcctttaagtcatcaccttccttttatgaaatgatagtaaggaactcgtctattctgaaaggcatttgagaaatagctgaattcctggctgcttttttgctgggggtagatggtggaatacttctggtctagatataacttaccactaagaaacccccagtatgtcaccactgcctaaatctaactagaccagggtccaaatgccatccaggccaggcaggaaatatacctcatgtgaaagacagtaaggagttgtgggcagtgtaacaaacaggagagctatgccccaactaaaaggagcagctgctactgcttagtttcagccagttgcaacagtatgtgggaatgtaggctgcatggttgttaacaagatagatggtaaaaagatgccagaagatacagaagatagcaaagaatgtggggaatttggataccacacatagcgagagacaatgaagcatgcttcccagctcgccagagtgtcacacagctgctcattctgccacctgccagacattaatgtcttcctgccctacctaaaccccctctttacctgatattttaattcgagactctagctacatgcccacctacttaacaggtactagtgacaggtacaaaacattatgggtaacaattctgagtgtttaatgcaagcccaggtgaagcagggtagcttccatcagcaggtacagacgttacgctgaaaagaggtgcattctgcattgcactcctggatctaagtttctgcattctcagagcatcaatgcagcaagcttattgttcctcaattttttacaatatttatcacaactctgggagaaaacaaaacaaatcctatcctatttactatttgtgctacctagtgaggagataccgctctgtttagacaaattaaggcacttcacattcttccaccaattgaaagttttgtatcttacagttctttttttaaataatatatttattgagcactttctatctactagtcactgtgatacagtataagtaaagtgggttgtctcatttaatattcagaataaccacatgaagtatgaactgccattatctttcccctttgtacaaatgaggaaagtgaggctcacagaagttaattggcccagggtcccacaactagtcagtgcagaggtgggaaacataaccagatttgttcggcatgaacttgtgccaaatttcctccaaagttctcaaaaggcaaggcatgttattttatcccaatttagcataccaacaactataatactagatatgtaggaaagtgcttaataatcgttttttactgatgattcagtgtctaaattttgaacaaatttgggtaagatacaagtcacacataaattgacagaaaatgtagttcttcattcaatggttagcagtcattaaaaggtactttccctttgtttgtggtgataatcagtattagtagttttcatattatttggcttccatattaatcatttttatattttcttctccttcttaccatgtttacttatatcatccatcttttagaatcccagggagctaatttctggtccctgtgttgctatcaaatctgtatcttgcagaaagaataatttatttcaaacaagggacatacaatagaaagataagacctactgaggtctttttcccatcattttattatgaaaaatgttcaaacatacagtaaaattgaaagaattttatagtaaatactgaccacggggattctacatcttactctacttgttttattattttcctatccagcgtactttttgatggatttcaaaataaattgcagttgctgatatacttccccctagtacttcaactgcagattattaactagagtttagtatttatttagtttttaaatttttttgatttaagatttacctgcaataaaatgtacaaatcttaagtataaatttactgagttcttgcagacatatacacctgtgtaacccaaaccctttccaaaatttagaccattgcaatcatcttcagaaagtttcctaaatccctctcccagtctatcccctccccacccctcaggtataactactgttctcattcttttatatcaaaggttaaatttacctgttctaaacttcatatgagtgaaattatacaaaatgtaatgcttctttcacttagcataatgtttttgagatttattcatgttgttgcatgtgtcagtgattcatttctttttattgctgagtattctttcgtatgaatatatcacagtttgtttttttatctttctgttgatggacactgggctctttctgcttgttttttactgttatgaataaagctgctatgaacattcttagac

SEQ ID NO: 9446 - DNA, 3300 bp, Homo sapiens
aatgttgtagagatagagccatataacgtcacgtttcaaaactagctctacagttttgcttctcctattagccatatgataattgggctatgtagtatcaatatttactttaatcacaaaggatggtttcttgaaataatttgtattgattgaggcctatgaactgacctgaattggaaaggatgtgattaatataaataatagcagatataaattgtggttatgttacctttatcttgttgaggaccacaacattagcacggtgccttgtgcagaatagatactcaatatgtgaatatgtgtctactagtagttaattggataaactggcagcatccctggcctgttgtcatgcagtcatttcctgttaattctgggagacaatgatttcacaactagcgggaagcagtcctaaaagtttaaaatccgataaggaatatctgggacagggtttagatcatgactctacacagataccatgatgagagtatattaaagaaatttaggaaagcacctggttcctttctccccatgcctgccttctgctccctccccagctggtttgggctcaaattgtccctggagactagggtttatgttagggtattgatagattagagcaggtggttgaagagatcttctctggtcagacttggaagaatttccaaaactgaagttagccccaagacttccctagggttgatgtactttatgatccagatgctaaacttcttagaatgaaaatatgcttcaacacttaagtagcatacactgccctacaaacctcagagagcacttttccccaagttcttgtttttatttttgaaagtactcacacagcacttactatgctccaaacactcctctaagcactttacacatattagctcattcagtccccagacagacgggatgaagtaggtattgttactgttcccattttacaggtgagagatttgaagcctggggaggctagtaactcaccccaaggtcacacggctcatacatggtgggactgagactcagatgcaggcagtctggcacctcagtctggattctaaccatttcactaagctatttttgtcttgtactactttgacccacccctgaataaacctcaattgctggagtggggtgtagttattaaagggatgctttttaccttttgctgtttgctgtggcagattccccagataaccaaggaaaaggggccacccatacctggaaataggccatagggcccctactactgccaacaagccatggcctaccttgacacttgtttgatcttaaaattgtgtcttggtaacaaaagatttggacaggcatatctgtagctttcaagttaattaattgcaatatttttttcttcaggattttagctgctgaacaactttcagtttggagctaaaagagacctgtctcatggtctgcccttccctggggcaatagctagggtctttcctgatttttatggaattttaggggatattttgagctttgggttctcagtagtgaattgagacttggaggtgacttttcatgtttggagtatcatctctgtctgggatctgggctgacaaattaaaacctagagtagtgcttatgctgaaatgatacttttcattttttggttgatttttttgccttcccttcaattttaaactgaagcattttaatatgggtagaaactctacaccaaatacactaaacattttggtgcttagtggatttctttttaggtaactggtacttacttccaaagactgaatacaagccacactccatcatatcccttaaacttcatgaaaaaccattcaagatccccttgctgcaacactgttctcttcttctctactaaattctatttccaaaattggtaatagagccagaaggatccccagtacccagccctctgcctggcacaaagtggtagcacaattaaattcagtatgggtggagcatggtacagtcttggtgccatagaaggagtagttgcatagtcacacatcatttgataagttggatgttccattacatagaggaacacaaaattccagggtttttggaggaagggattagatagtgactaagccgccagaattgaggtggccattcctttttgtataggctaagaaacaggttatcagtgaaaagttaattatggctttggcactagaatagcactgttgcaaagtatttaagcaccccccatctcagccctttattttatctttcatgtgggctaatgtgaggataatcttacagatattataggaatttcttttctatctttatgaaaacaacgtatataaaatatatctagaaaacctttgtttgagactcttatttaatgggcttttgattctaatgataattgtacctttatctttcaaaagctgatatttcctacctaagcatctcccgagaaaaatatctcattaaaaagcccataaataataggggagaagaaagccttaggtatcaattccaaaacagtgattgaaatttcccaaaataattatggcttctgtcatctccagagataatctggcttggtttaccccataatctaatttcagaaaagaaagctttattttaacactcatctgaatcaacattaaagccttttctctcaaagcgtttattgagaaactcaaatgaatatactttttgaattactgtcatcaaaagtgtacggcttcctgtgctgcttgtgtcaaatggaacctgccctctaaagcactttctttcctttacttgcgtggtttcatgtaagctgtgctgtttagaaacaacatctcagactttacaaagaaatgacaaagaaggcaattgcactttttaagggatatcgacaagcagtttctgttttctaaaggacaaaatacagagtgtgtgtcatttttaattagattctttcccctgctgagttggaaattccagtgcagcactgattgaccacagttgccaatctaaaagcacaaagacagaagtaaagctttatgctaattttatttcaatatgatagaaaatttatcttggtatgtccttttttagataactccagcaggaaactgtaactgctatgtctttaggaaaatgtagaagaaagaacattattgttctttaattcctacaaggtactcgaaaaccttaagtgaaaaagatttctatctttttatcttagcgcatttatggaaaaaatattaactatcctgaatattttataattttgtaggaaaaatatgcatctattttttcttgacttcttttatatagtaataaaagttattttgg

SEQ ID NO: 9447 - DNA, 520 bp, Homo sapiens
ttcctgaaaaggggagtgtaactagtggatttgggaaaggttcttaagtagatcctgagactatttgcatgcttctgtctaaatgataattaaaaggaaatttcatggattaaaccatgggtttaatgcagcaaggaaacttacaatgtccctttatatataacatgcatcttgttttggatttgtgtcattttttaatatagctgattgacttcacagaaagcagcttttttgaattctaatacataggtgtatatttggtattagttattttgagttcttttcaacttataacactgtatacagttatttctaaagcacagatgaaataagttctgcatatttttaaataatcacagttccctgttatacagataatgttctcactacccataatatgtaggaacattgtttctccttagccgtagtatgcatacacctatccatgttcattctgacatcctttgttgtctttataattcatgtggtagttacctataaataaaaacaaatatgcgtt

SEQ ID NO: 9448 - DNA, 333 bp, Homo sapiens
agattatactgctctgtacaggaagcttgcaaattttctgtacaatgtgctgtgaaaaatctgatgactttaattttaaaatcttgtgacattttgcttatactaaaagttatctatctttagttgaatattttcttttggagagattgtatattttaaaatactgtttagagtttatgagcatatattgcatttaaagaaagataaagcttctgaaatactactgcaattgcttcccttcttaaacagtataataaatgcttagttgtgatatgttaatgtgtgatgatatgattcttaaatacttacaataaacctcattcttaaatactt

SEQ ID NO: 9449 - DNA, 452 bp, Homo sapiens
ggagccgcccgaaggtcgcggtgacctggtgcctttttaaataaattgctgaaatttggctggagaacttttagaagaaacagggaaatgaccggtggtgcggtaacctgcgtggctcctgatagcgtttggaagaacgcgggggagactgaagagcaactgggaactcggatctgaagccctgctggggtcgcgcggctttggaaaaacaaatcctggccctggactcggtttcccagcgcggtcaacgcatctggaggggactggaggaaacccccttgttggaagagattccaagagaagcacggttttctctttcccttgccctgactgttggagtaaaaaacctcttaaatccattgtatcagaggtccttacctctctgacagttacagtgatctttgtatctgaactttgcacgtctgccgaaaaatccgaacctgttgactggg

SEQ ID NO: 9450 - DNA, 1592 bp, Homo sapiens
tgcgttggccaacggtcgggccctgtctgctggctccccacccgtgccgcccggctggaaccctaactcttcatccgggaagggctcaggaggaaacgcgggctcctatatccccagctacacatcgtggtacccttcagcgcaccaagaagctatgcagcaaccccaacttatgtgaggttgcccgcccgtctccttcttgtctccccggcccaggtccctcccgcctccaggtccatccatcccgtccggaaaagaaggacccagagggaagaaggaacagtggaggcgggacgccctccatctcctcggagccccgcgaggtccggcccagcaacttcccggcatccgcgctctagcctgaaccctggcctgggccgagcagtggcagcagagagtggcctcggagggaagccactgccacctgagacagcccaagcagcaagataaacccgctccacccgacccgccgaccttcagctttgtgggactatcaggaaaaaacaaaacaaaaacaaaatgtagaaaaagcaaaagctcttttctgtcctgtcagtctcctgtctccttttgctctgtctgtgcgctggtaaagtccaggtcctcatccgtccgctgtcctcattctgcggcctcagcaaaaagccacaaggtctgagcggcccgggtcctgccgggctgaccatctccggatcctgggacactctgcctgaccatctgtgtagctggtgtgggaatctgggggcattggagggagggggttttatttattgagaaatggacttcgcctgaggctgtttgccaattcagggttctgctgggcgcaaggaacgcactgttcaaacgcactgtttactttaagcgcacggggagaaacgaataaggaggacgtggtgatttttaatttatacagtaacttttgtacttctctggtatggagagtttggagccgaatgatttgcattttttacatgtccgacattatttaataaataatttttaaaagaaaagaacgataaatgaagccaacatgattttctcatttcgggaggaactctgttgcttcgcctggacaagaaggaaaatgctgatttcctccttgggtagaaagagggagcgagggcaaatggggagtagagagaaaacaggcgagaacaagcactctaattccagtgggctttaaaataagacaaaatcagctttacaacaatccctagaggctcgaccacagaataatgccagtcaccaccctgaacgcacaatctccagtgcaggatctaatgactgtacatattattgttattattattattgttattattgttgttctgtaaacatgttgcacaagcttagcctttttgcgttctgttgtgtgtggctgtaaaaccccatgctttgtgaaatgagaatcttgacatttttcttgtgaaatttggaaaatgtgatcaattgaaatcaactgtgttttgtgttctctatgtcaaagtttagttttatattgagaatgttaacttattgctttgtatcttgggaaaaaaactttgtaaataagttataaagtttctttgagacagtaaaattatgatttcttg

SEQ ID NO: 9451 - DNA, 2363 bp, Homo sapiens
tgtggattctttaaacgctctaggtacgatgacagtgttccccgataccatgctgtaaggatccggaaagaagagcgagagatcaaagatgaaaagtatattgataaccttgaaaaaaaacagtggatcacaaagtggaacgaaaatgaaagctactcatagcgggggcctaaaaaaaaaaagcttcacagtacccaaactgctttttccaactcagaaattcaatttggatttaaaagcctgctcaatccctgaggactgatttcagagtgactacacacagtacgaacctacagttttaactgtggatattgttacgtagcctaaggctcctgttttgcacagccaaatttaaaactgttggaatggatttttctttaactgccgtaatttaactttctgggttgcctttatttttggcgtggctgacttacatcatgtgttggggaagggcctgcccagttgcactcaggtgacatcctccagatagtgtagctgaggaggcacctacactcacctgcactaacagagtggccgtcctaacctcgggcctgctgcgcagacgtccatcacgttagctgtcccacatcacaagactatgccattggggtagttgtgtttcaacggaaagtgctgtcttaaactaaatgtgcaatagaaggtgatgttgccatcctaccgtcttttcctgtttcctagctgtgtgaatacctgctcacgtcaaatgcatacaagtttcattctccctttcactaaaacacacaggtgcaacagacttgaatgctagttatacttatttgtatatggtatttattttttcttttctttacaaaccattttgttattgactaacaggccaaagagtctccagtttacccttcaggttggtttaatcaatcagaattagagcatgggaggtcatcactttgacctaaattatttactgcaaaaagaaaatctttataaatgtaccagagagagttgttttaataacttatctataaactataacctctccttcatgacagcctccaccccacaacccaaaaggtttaagaaatagaattataactgtaaagatgtttatttcaggcattggatattttttactttagaagcctgcataatgtttctggatttcatactgtaacattcaggaattcttggagaaaatgggtttattcactgaactctagtgcggtttactcactgctgcaaatactgtatattcaggacttgaaagaaatggtgaatgcctatggtggatccaaactgatccagtataagactactgaatctgctaccaaaacagttaatcagtgagtcgatgttctattttttgttttgtttcctcccctatctgtattcccaaaaattactttggggctaatttaacaagaactttaaattgtgttttaattgtaaaaatggcagggggtggaattattactctatacattcaacagagactgaatagatatgaaagctgattttttttaattaccatgcttcacaatgttaagttatatggggagcaacagcaaacaggtgctaatttgttttggatatagtataagcagtgtctgtgttttgaaagaatagaacacagtttgtagtgccactgttgttttgggggggcttttttcttttcggaaatcttaaaccttaagatactaaggacgttgttttggttgtactttggaattcttagtcacaaaatatattttgtttacaaaaatttctgtaaaacaggttataacagtgtttaaagtctcagtttcttgcttggggaacttgtgtccctaatgtgtttagattgctagattgctaaggagctgatactttgacagtgtttttagacctgtgttactaaaaaaaagatgaatgtcctgaaaagggtgttgggagggtggttcaacaaagaaacaaagatgttatggtgtttagatttatggttgttaaaaatgtcatctcaagtcaagtcactggtctgtttgcatttgatacatttttgtactaactagcattgtaaaattatttcatgattagaaattacctgtggatatttgtataaaagtgtgaaataaattttttataaaagtgttcattgtttcgtaacacagcattgtatatgtgaagcaaactctaaaattataaatgacaacctgaattatctatttcatcaaaccaaagttcagtgtttttatttttggtgtctcatgtaatctcagatcagccaaagatactagtgccaaagcaatgggattcggggtttttttctgttttcgctctatgtaggtgatcctcaagtctttcattttccttctttatgattaaaagaaacctacaggtatttaacaacc

SEQ ID NO: 9452 - DNA, 3163 bp, Homo sapiens
acacacttgggacatcggaaaatccaaatgtggcttttgtattaaatttggaaggtatggtgttcagaactatattataccaagtactttatttatcgttttcacaaaactatttgagtagaataaatggaaactgaattccatttgtgcccgttaaacctcctaaaggatgaaattgcacctattttacacttatattttcacagttaattgaacatatttttaaacaactgtagttttgggcaacttttcactttgtggtagacttcagaagtgtggaaatcttcgggtttctataggaaactagttttttttttttaagaaatactttcatttatgtttgctagaaacattttctaaatgatagtgattagctggttagccatcttcctgttatttggaggagttctgccatcttttattcggtagtgacagctgtaatatggtcttcatgtttatcagtgacttgactacaagtaaagcagaaaacagttggcctgtaatcacagaaccagccacccttcggcgtctacatgcattgtcttagctctgaggttaatttaccatttttaaattttattgtaaagaagtgtaatgactagctctctgtggatctatgccaaaatcatgggccatcttttctaagtgtacttctgattaatgcaaggggaaatttttatactgaaaacaaacaaacaaactagcagctactaaaatagagaagaaattgagggcaaagtaatatgtctccaaaactgaactgattgcttgttgagattacctagaaagcttttggaaaaaaatagagcttttctgcatcctactccagatacactgaatcggaatccctagggctagagcctagaaatctcactttttaaaatgcttccaaggtaagtctgatgcctaccctaggttgggaaccactctttcaaagtaaacagtgatgacacagcatttgctaaagtaacatctgtaggttttggtttccacctatttaaagtcagatttatagactcgaggagacagaaactgaatcccacacctggtgcaattagaagcataattagaagcagaagaacaaaatgccacgtaaccaaagcatcagagccatcattgcacgtgtctttttttcttttttcttttttttttttcaagacagggtctcgctcttttgcccaggatggagtacagtggcatggtcaaggctcactgcagcttcaatcttctgggctcaagtaatccttccacctcagcctcccatatagctggaactacagttgtgcactaccacacccagctaattttttgatttcttgtggagatgaggtctcagtatgttcccaggctagtgttgaactcctgagctcaagaaatcctcctgcctgagtctctgaaagtgctgggattacaggcgtgagccaccacacatggcctattgcacaagtcttgacaaacaacatatattttctaaaactatccagatttcattatcagggaaaagtttgcttaggtttattacagcagtccttggcatttgtatggtaatttgtactttacaaatactttgatatattataactctattggtctttgaaacaaagcgatacagtgtaggtggtatcattctctttctcactcagtgtggcccagagttgctcagaattggagcagagcctgagacgtatctgcagatcctgtcatcagctggcaagtccaggagactgtgtcatttagagactgtgttgttagttatccctcaacatcttctaaggtggcaggaaataatattggaaataacattttaaagtaaaaattttaaagtttaaagaagagttttgccacttaaacaggggagctttgtctggaaaatacactgagttgaaacacttcatccttggaaggattatataagatgaacagttgtgataaatgtgtagattagagggatgtgaatgggcagttagtccagtgccctcatttaagaggccaagatcctgattcagaggaggcatcctttgcccagagctgcttagctaatctgaccaaatgttgggaaaaatgtctcacctaacccactattccttaattatggattttgtgaaaaacaatagaacatgttaatgagtaatttatattagttcgatgtattacaattttttagctttaaattacagttttcttataatgttgaaatgttttagaatcctttgaatctaagtatttgtttcctaaatgaaacatttgtacaacatttgatgtttttacttatgaaatattctcctcccccaagaaaatttaaactttttctctctatttaaaagctaagaaatgttttaaaggaaaaatgaaattatcttcctttagcttatttttaaggtaaaacagctttttactctgttattgtggtaatggacagaatattacatacaaaaatattctgggagagctttttcctagttggttttaaatcattgtgccacctgaaaggtttttagattttataggagctaatttgtccaccagcattaatgtaacacagtgtagttatgaaaatatattgaaggacaggaagtggacacgaagtgatttttgtaacctgagcagttaatgaatgtgccaacattttctaggaagggacagcaagaatattctgctctgtagttaaaatactggctggcttttgatgtcttcatgcttaattgtgatcactttcttgcactgtgatgtttttacgtgaatatgttgaagtagaagtctaccatattattttataaaatgttttctgtatggcaataaactgaaaacatggatcaacccttcttttgaaaataaactgagtcaatttagccttttaaaaatatagtcatctcttttaaatagaatcctcttccaccatcaaggctcaacattttgtaagcatccaaaaaattggtaattagggggcttgcactaaatttcactatcttcagtagagaggaactgtttggaacttagatttccaatgtgtatattctaatggagaaagcaagaggtagagtttgtatgtttgacttaccttagatttttattttccatacatactgcaaatgattgacttgttgcataaatgaagatcttctgttgtgtgcttttcaaacactgtaaataaatttgaaatttg

SEQ ID NO: 9453 - DNA, 1125 bp, Homo sapiens
acatttcaaatgcccaaagcaacagtttgtctccagtccacaatctttcaaaaatgccatttatgctactactgactgtattgccactagagaattctacaaaacaagcaaaaacacatcctgagacacctcagggctgcattcagcttaccagctacctagcaagagaaggaattatttgacatgcctaaagcttacacactctagcttaggaatccccagtttgtggctaccctgtttcatttccacttgtgccatcttctttgctgaagtgttgaataaggcccacgtgaagagtttggtagaaatagccttgtcaagagaactagcaagcccctgacatttttttctaagagtgtttatgggatgagatgtgctacaaatgggatagatttggataaaattttaactcaacatcttgatttggagcctggggtttcgggaaggtgttgaggaatctatagaagtccaaattataggttgtattcttccatcttcattgtcttacctctgaaggaatagaacctgaccacattattatgaaacattatggctgtttatgtaatttagggaggactggtctgtaatttctgaatgtatatagaataatatttatgtttacaatgtaacttttcaaaatttacaaatcaggattatatacataagaattccactaagaaatgccaagattcttaaatttgccagcgttaaagtagaaaataacatttcagaagagcacaatatgcataaaacatttttcaaaattgaaatattttcctgggcattaaaaacctttactattggctacaaatttattgtacctgatgaaaacatattttctggacttaaatgttattacaaatatcttaattttcagtaattgttttgcactttcaaagattgtaaatagttcattcaatcaatggtatggagttatttatttgctacataatagatactgtgccaaataattactttttatttattttatttagtacgtaattttgaagtacattttttcctgttttcacaattagactacatttaatgtgtaggaattgtatgtatgtatatcttctgtaaataacatctagtatcttcactaaatataattgtcgacaagaa

SEQ ID NO: 9454 - DNA, 5613 bp, Homo sapiens
aagcagaaagcaaagtaataaaatcacaaatgtttggaaaacacaaaagtaacttgtttatctcagtctgtacaaaaacagtaaggaggcagaaagccaagcactgcatttttaggccaatcacatttacatgaccgtaatttcttatcaattctacttttatttttgcttacagaaaaacggggggagaattaagccaaagaagtatatttatgaatcagcaaatgtggtgcctgattatagaaatttgtgatcctatatacaatataggacttttaaagttgtgacattctggctttttcttttaatgaatactttttagtttgtatttgactttatttcctttattcaaatcatttttaaaaacttacattttgaacaaacactcttaactcctaattgttctttgacacgtagtaattctgtgacatactttttttttcttatagcaatacactgtaatatcagaaatggttggcctgagcaacctagtaagacctcgtctctactaataattaaaaaactagctggcatggtagcacacacctgtagtcccagatacttgggaggccaaggcaggaggattgcttgagacctagcaatcagtcagggctgcagtgagccatgatggcaccactgcactctagcctgggcaagagaacaagatcctgtctcaaaaaacaaaaaaaagaaagaattgatagtacaaaatccaacaacaatactgagatgatctaagaaggttataacaaaatgctcttcagaaatacctaagtgctgagaatttttagtactaaagagcacagctgctcaaagtaaagcctgagcagtgttctcagtaatgtatttgaaggaaaaataccctgatttgaaaccaacagcagatgttgcaaactttcataccactgctggccatggaagcctcttaacaacacactgtcatttaaggctgtgcttgtgctttatacaaagagaaagaggtggtcttaaggggatgcttccaggggggtgagttcatgcctctcctgtattttccagcaagtggggtatgtgtggtggtttgttttttagaggggcataataatccaggattctaagcatatgctcagctattttaaagaggaaattaaatattataaaagaaatagtaaagataagttatcctcacttaggcaaaagcacaggtcctttccatatcaagtttagcctaccagggttgttttttgttttaaccctgcttaataatgttggtgttttagaagtagatacaggcactgctctgaaaacctggctagccaaggatattctcagaatgttatcacctgtttgtcaaagcttgtttaaattataaaacacttttaattatatatatgaggcaaaagaactaagacttttttcaaactaaattagaaaggagtgtcattatttgactgttaaaccaaaatatttttggtgggtctttttatggaagtttaaagaaaggacatcatcatagatatgatctaacagtatttctaactatatttgatcattaaaagcctcttggaatttgaagcgtgacgtgtttctaatgccccttgagaggtgaaaaataccacataatgatcagtatgctgtgccagcttcatttggggagaaataactagtagaaagttctgggtgtgaggtgtacagcagtctaggtggcatagtgatgaagaaagggatcagagtctgactgtcactcagaatcctgggctcagttgcttgacaaccttgggaaaattgttttatctttgtgcgtctgtttgctgatcttcagcgtgggaataataacagtacctacttgaaaggatcattgtgcggattaaaagaaataatatatgtaaagcactttaacacagcaccaggcccacggaaagtggctaatgttagctactatgaatggtgccagtgaagacactgaaaaataagtgatttcagtaaccttctggaaagctatcagtttcaaataatattttctctgtagtatgagatgaaattaaaagtggatagctttcaggaaagataaagagaacatgcttagaatgtaagctaaacagattttttctgttgctctttgaaaactatgagccctggccagcttaacctggtctgaggtgagactaaacacaaaaacagtagataaatctctccctaaaagatggattcccccacatacccatgctactagtttctctgtctattcacacatatgtacaaatacatgaacacagcctgtctgtgctcagacatagagaagtactacctgacttgagtcaatgcacccaagaagaaaagcttggagtagagcagaagggagggcttgggactcctgtctttccagcatgccctggggtgcagtggtcagccacctgaagagagagccaatagcatggggtttacaaggcaaagatagtcattcattcaacacatattcatagagctccttctctgtgccagacactgttctggaagatagctagatgaaaatctttgcactcacagagcttacatgccagtgagtgaagatcgatgataaataaagcaaatgcatcatatgttcacatttgataagtatatgccaaaaaatgaagccgggaaggaggacaaggcccatgggtgggtgttgaggtttttaaagtgtggtcaggaaaggccccactgataaggtaacatttgagcaagtctgaaaaaggcaaggggatctttggggctaacttcgggatccctgcactttatgtaagaatgtaaacctggagtctcatttaagaatgatcagcaatacgtttagaacatatgaactgaatgaaatggacattttttcttaatttatgtataaatccatatgattatacataaagttctgatgcattaataaaagcagccaaatagggccaaagagaaaaataacaggactctgtactggacctaactttatcattaattaggtaatattttcctcatttctttactgctgccattttcctcaccagtattccagagatggtcatagctcattactctaccaccaagaacctaaaaggaattagaatacagcagaattggcctcagtgaagagcttaaaattgttctcctcgtagaactggactattgatcattaccacgtgacgttggctctattactttctgttcccaatgtccttctagtggtttgaaaatgttaaaacatccctaaaatctaaatcatataatcagaattctatagtgtcccactctatctgtaaagatcatttggaagactttagactctattaattttaaaaggaatatttattagccatatgcagaatttctaatgatgatattgtacagcttctaattcacttttcagatcagtgtttgaaatggcaattatcagtgttggatttagttccaactacttgatttacaaaaatgtacatttagaggttaaaagaaacagtgagaaatgtaaacattcaaaatgataattgaatctctcagttgtgggaataattatcagagacatgcaactgaaaatgtctcacctttcatctttttttcttaattcataaagttatcttgtagaatttgatgagaccctccctagtcattctcaactggggcggtgctgtcaccgaatggtgtttgagagtgttggggctagggcacatttttggttgtcacagcaactggggtggcatttgctgcccagtgccaggaatagtaacattatgaatgccagggacagtgtgctcagtaaagtcttccatccaaaaggggcagggcacggtggctcacgcctgtaatcccagcactttgggaggccaaggtgggcggatcacctgatgtcaggggttcgagaccagcctggccaacatggtgaaaccctgttgctactaaaaatacaaaaattggctgggtgtggtgtcacatgccagtaaccccagctactagggaggctgaggcaggagaatcacttgaacccgggaggcagaggttgcagtgagctgagattgcaccactacactccagcctggatgacagagtgagacttcatctcaaaaaaaaaaaaaaacaaaaaaaaacaacccggtagcattgtcccttccccactgacaaacttatcaaatccagaagctttagagtttcgtctctaattatttttctcctgaacaaaattacccaagtcaaaacaaaatgtatttttagaattacggcagcatacgacctgaattttgtgagtttcgtggctttatcttaaatcaccatttccctaaaaatggtttctttctccttagaaatgctggtggcaacttgatgaaacagccaaatgcaccagggcaggtcactttcccattacactgattccacaattaaaaaaaaaaaagaaaaaaaactcattgagatagctacagttctataggttaatttaaagcctcctttttctactcatttttgaaagcaaaattacattttactattttacataaccagtgaaaagacgttgaaagcctacagctcactgtttttggtgctctggaaatgttgagggtgggtttttaaccagtgatttttaacgtgcagtgaatttgttagacttttaaacaccagctaaggtagtcaaacttgatccccattaaaaatcaaggaattaggggtcgggggagggtttaggagtgatccagaatgacctcccagaattactgtgcgtacaactttatttttcagagttttcattggaatggtaagagttttatgaaagacagttttaaaacttattctgagttaaatattaatactttaaaaaattattgtactagacttattgcagccttttgaaagtagcagagtttcatcataccacatatataacagagcataaattttctataatcaggcaccttttgctgcttttgagtaagactgttttcctgtttaagtgttaagcatcgccagacataaaaatctattctctcctctcgattgtagcatagcctgacagctctagatacagcatttctatgatgaaaaatgagtatccatcaggaaatctagaagactagccgtgttttctcagactccacctttgtttgcactctgttgcctgtgaggagctttctggcatgtgattatttacttcaaaactagagttccaagcacctacattaattattttatattgtgtgcagaatagtatatcttttaatgtcagatatgatacactgcacatattgcttttgcactcttaaaatttttgtactaaataatagaaaatatttatattctttgagtgtgagctttgaatagatggcattatcactttattgtttttttaacaaaaactttttctcaattattctattgcaatgttattctgagcaagtcctatgccaaatatcttgtataatgtttgtatggaagattaaattttactcttgtgtggtaagactatttcagttactgattttatagttggaatttgatattccagcacaaagtccacagtgtattcagaaatccaagttggtgtcatacatttcattttgatgtgaacttttctttgctttcctttgttctaagactccattttgcaataaacgttttgacagt

SEQ ID NO: 9455 - DNA, 1258 bp, Homo sapiens
tgaattgaactacatagcttttctaagcaggttaaaaaaaaaaaaaaaaagaaatgtaatggtttttgataatatgatcccttcagattgaattaacgaaaagacaacacttccagtttttggattgggaaataccttctaattgagactatagccaaaccagggccaaaattatggatattggtcacccagtgatcataactaggcttgaaaatcactacacatattttctgccttgagtgaacatttttagaggaaaggttatgccatctttttaccctaaccactgatattctggttagcagggccaggacaaggggaaggaaaatgaggtcaacaaaaaaatcaaatttttaggaaaagataagatgaatgttactgatttttccttttggctgaggctgcaatatggcctggcaaggcactgttactgatcttgtctttaacattttgatattttgttcatcataatttttgcatttatttttttaaatattgcattaaaatatcatttagcttgattatcgagttttttggtttgaggttttttgttgcttcttttttcttttctttctttccccctcttttttttggatgtccccttaaattttgtgcccaaggcaggtacctcactcatctcatccttggctcagccctgctggttagtatttagtatttattttagtaagatatttgtgtctgtatgatggtcagagttgaactgatctggcttgtcatttttcagtaataaaaaaagttactgaatttaatgttgaatatgatgcatatctcattcattacgatttatcagaaaccaaagatttaaattgcctagatttgtggttctttctcttcctaagttcccagcgactgctttcaaatactattttctaaatttcaccaaaggagcaaagaggataaaacaacactccataaaggcctcttgggatgtcagaaatctaaaatctaaaagaaaacagacacagagcaagacaataacatcacaagctaaaagccagagaaatttaaaattaccaacatccttgttggagtaagacagtaaatatcagccttgcagcaagacagctctgagcagctgtgggcaaagaggtaaaccagtgggggtgcaaggagactgtctgcagcttagggcagaaatggtgggatccaacttgtgaaatgcttcatgttttacaaaccaaaaagtcaggtagcaacaaacttattgtatgtcaaatcaataaatgttactttcaat

SEQ ID NO: 9456 - DNA, 1326 bp, Homo sapiens
tatctggaaaatttgctgcctgccttctacttctcaaatctttcttgtaaaagtttccaattttttcactgaaacctgagttaaaaatcttgatgatcagcctgtttcataagaaactccaatcaagttaatcttagcagacatgtgtttctggagcatcacagaaggtatattgctagttacactttgccctcctgcagtttcttctctgctcccaacccccatctcacagcatccccctctatttccaatgctcctctccaaccgcttagtttctgaatttcttttaaattacagttttatgaaagcatattttatttacttggtgttgaaatagccctcataaaacctaagcacttggaaacacaataatagtattaactaactagatctattgaatttcagagaagagccttctaacttgtttacacaaaaacgagtatgatttagcattcatactagttgaaatttttaatagaatcaaggcacaaaagtcttaaaaccatgtggaaaaattaggtaattattgcagattgatgtctctcaatcccatgtattgcgcttatgttacaagttgttgtcacagttgagacttaatttctcctaatttcttctgcccgaagggtaagtggtgcgtccagcttacacaatcataattcaaaggttggtgggcaatgtaatacttaattaaaataatgatggaagagctatctggagattatgagtaagctgatttgaattttcagtataaaactttagtataattgtagtttgcaaagtttatttcagttcacatgtaaggtattgcaaataaattcttggacaattttgtatggaaacttgatattaaaaactagtctgtggttctttgcagtttcttgtaaatttataaaccaggcacaaggttcaagtttagattttaagcacttttataacaatgataagtgcctttttggagatgtaacttttagcagtttgttaacctgacatctctgccagtctagtttctgggcaggtttcctgtgtcagtattccccctcctctttgcattaatcaaggtatttggtagaggtggaatctaagtgtttgtatgtccaatttacttgcatatgtaaaccattgctgtgccattcaatgtttgatgcataattggaccttgaatcgataagtgtaaatacagcttttgatctgtaatgcttttatacaaaagtttattttaataataaaatgtttgttctaacttgtctgcttttttaaaaataatcttactgtacttaattctaattttttcctcatatttaaataaaaggccatttccaccttttc

SEQ ID NO: 9457 - DNA, 1105 bp, Homo sapiens
tgatcatatggtcagctaatattagttcttagtgatcagtggtcagtaatcttcaaagtcagaatctatcaccttggtaaattatataaacctaacttgagcagatctgattattcttggatagtattcaagtggtatcttgactattaaactacgtatagtgttgctgaaatagaaagaaaacagcattggaattggattcatgtatcgtgggatacaggtgttatttcaggtgatgtacttgcattattttctttagccatagtaactttttgtcacaataactaagtattcaattatatataaagagtgaaacattaaaatgacgcatggatttatatttattataattatgtagtaccctcaaatcattttgtcagttacatcaagaaagcagatttttctttagtcatgaaaaatatctcaagtggtaagttgtttgtgctttaggcaaacattaaccagctctaacaagaaaaatgtctagatttacacattgtcaatacagtatattagttctgcaaatgcacttttgttaaactcaaacatgctctttgtcaagacttggctaaccagtgagcttgtagctctgattatctagcatttttagggtcattctccttaataggcttttatgttaataagatatatttttagaagagcttgtttgggagattagagaataagataaaagaaccaaaaccttaggatatactgtttctgggtctgaaatctctctcattgtttacttctgttcactcagtgaaaacagaaacaagaatgaggtagtggcaatgaaatagaattattagtatattatgaacattataacattttgaacactataatgcattatatattatgaacttttatgaactttatacatgagtaatagcttcctaaagtttataaaacattgtttaggttacataaagattaccaagtaagactcaaaattgcaaatataaacaaaagaaaaatccaactgaaaataacactaagtatttttgagttcctagaatgtccattttggtatttggttacattatcatatttactagtcactatcagcacaattaggttaataaagaagtgggtcattata

SEQ ID NO: 9458 - DNA, 1208 bp, Homo sapiens
tgtggtccaggttggccacagacagcttagaagccattcggttgtctccaaaaggcctttggaaagacttgaatatgtatttaattccccccaccccctgccaatggtggcaaattttgtgaattgtttttctctcttccccttatctggctctaaaaccttctgctgcccaacctgactttgtagttctgatttttacttgtttattattggttttgttcttgcctagggtttttaaaatatctgtttttaatgttttgtttctccctccaggccagtataaagggacttgaagtattttttaataatccgccccccaatgaacttcagaagtgccattctgatttaagggtttttttaaaaaattactttatttgttcattcccagcactgattatcttcataatccattaggacagaatggttttcagtcgttcatatcctgtaattaggtaattgaatcattagctctcagcagttgccctgaggcaagtggaaaggcaggcagtgctctggggtcaccgagaaagtctaaaaacaggaggctgaaggtactgtgatggctttaaaaatggccaccttattaaatagggattgtatcaatattgaaatgaagacaatctttccaactttgggtgtttcacttgctgttttaattgtttgtttttaacactttgtaggtttgtgttttcataatctttaatttgaaactcatgtgtcctcatggatcgtggatgccttcatttcttgagctctcaatgcagacatttaaatggctgcaatcagtagagtgacccgcggatggcataaatgcacctccttttcttggccttggatctatgggtctgggattgtggtcatctcctcaatcctcaaaaagaggctgaatcaatgtggccgtgggtgggaacttacatacagaacccaatgaagaacttgactgtctaaacaagggggcctcgcatggagctgtaaagcatctaacaaatatgaaaaatgtgaagttccaaggtccaagaagaaaaataatgatgtttctgaaagtgatgataaataattacttttaaagtgctgcatatttatacaattgagagattatttttgtaaatgcaatgtctgtgagctgggatacatgggcagtgcttcagacatttaaaaatcactttttactcctagggagatgccaataaacagaactcttttgtttc

SEQ ID NO: 9459 - DNA, 444 bp, Homo sapiens
gagctccaggaagcgccctcaccccagccccactcacccaccctccttcccaccagcctgctctccgcaggcccactgtccttgggtttaatgacgtctcttctctgtggaacttcacgattccttcccacggtcaactcgggacctcccagcgaccactgcagcctgcggacgaggccgggacttggccgagcggatcctaataaggggaaaatggtaaatgcaaacgtcccgttacaattttaccgccagtgtgctgtcgttccccctccccctctccgagtcctcgtggggacacggcggggtctgtaggaagttgggccgggttgggggttgctagaaggcgctggtgttttgctctgagttttaagagatcccttccttcctcttcggtgaatgcaggttatttaaactttgggaaatgtacttttagtctgtcatatc

SEQ ID NO: 9460 - DNA, 710 bp, Homo sapiens
gtctgaggccggtctgaggccggtcagaggccaggattggagagggggcaccgcgttccagggcccagtgctggaggactgggaaagcggaaacaaaaccttcaccgctctttgtttgttgttttgttgtattttgttttcctgctagaatgtgactttggggtcattatgttcgtgctgcaagtgatctgtaatccctatgagtatatatatatatatatatatatatatataaaaacttagcacgtgtaatttattattttttcatcgtaatgcagggtaactattattgcgcattttcatttgggtcttaacttattggaactgtagagcatccatccatccatccatccagcaatgtgactttttcatgtctttcctaacacaaaaggtctatgtgtgtggttagtccatgaactcatggcattttgaatacatccagtactttaaaaatgacatatatatttaaaaaaaaaagattaagaaaacccacaagttggagggagggggacttaaaaagcacattacaatgtatcttttcacaaatgaatttagcagttgtccttggtgagatgggatattggcgatttatgccttgtagcctttcccttgtggtgcatctgtggtttggtagaagtacaacagcaacctgtcctttctgtgcatgttctggtcgcatgtataatgcaataaactctggaaatgagttc

SEQ ID NO: 9461 - DNA, 621 bp, Homo sapiens
cccggcgcggtgctggcgggagcgctcaagggcagcggatttgttgttgttgctgttttcctttgtgggtgtttggtgcttgatttccagaaactctccagcgacttggacttcttcttctttttttttttctttttagatagaagtgactgtgtggttggtctctgaggtatttgggggactctgtatttgctcgtttacgtgttggaaaaaccaagtggctttggggtttcgccctatcccactccctctctttcctgctccattggttccttaagaaatgctatattttgtgagtgcaagctggcttggggagccctctcttgtgtaaatgtcccccatgtttctgaaaagtgctgtagtttagtcccctcacccccagcactgcccaaacaggggccaagtgcgccccaattccaagaatgaaggcagagcgacaacagtgcggacaccccggctgctagcccacggtgaagcccggcggggttgcccaccagttgcgaaagccccctttcctcagggagcacgcgggacctcggtggagatctccagtgaggcttagaggagcccagggcctcgggcgggttggggtttgtcctcagtgcattggacgcgctgctc

SEQ ID NO: 9462 - DNA, 386 bp, Homo sapiens
cttctacctttaaaatttaccacagactattaaaactaataatcaccatatgctgtggacaccacctattttctttgttggaaaggaccttacctgtgtttcaagctaccttcatgtcactgctcttgaggttttctgtgctttgagagggatttgggtgtttaaaaaagtttctagtatcacatagaagctgtccttgagctgtcctatggaagggtaatttgatactgaccttgtagctatatttttataatggtttttaatgtctgagctagtgatttgcctcaacaacgtaaacttcctaatgattagcacttaataattgcatataaaatgctttattaattaaacaagtgcacttgaacattttaatatttgtggtgagt

SEQ ID NO: 9463 - DNA, 277 bp, Homo sapiens
aagtggggaccctgggcccatctctccctgcgcaccaggctgagccgaagctgcgggggcaggccgggcctgctgtcacctcgctgggctctaaggtactgtggggtggacctgggacaagcaggccgccctcggactaggttagcatcctgcccgagggcagccccctccctagagcgggatggggatgggagggggggcgggattctctctctaagtatattatatggcaggagctactgagaacataaaatcttggcgagtcattaaacttatg

SEQ ID NO: 9464 - DNA, 824 bp, Homo sapiens
cggccgccgccagcccgaactcgcggcaaaattacctctcttgctgtagtggtggggtagagggtggggcccgcggggcagttcgggaacccccttccccgctcttgccctgccgccgcctcccgggtctcaggcctccagcggcggaggcgcaggcgaccgggcctcccctccatgggcgtcctttgggtgactcgccataaatcagccgcaaggatccttccctgtaaatttgacagtgccacatactgcggaccaagggactccaatctggtaatggtgtcccaaaggtaagtctgagacccatcagcggcgcgccctgcagagggaccagagcttggagagtcttgggcctggcccgcgtctagcttagtttcagagaccttaatttatattctccttcctgtgccgtaaggattgcatcggactaaactatctgtatttattatttgaagcgagtcatttcgttccctgattatttatccttgtctgaatgtatttatgtgtatatttgtagatttatccagccgagcttaggaattcgcttccaggccgtgggggccacatttcacctccttagtccccctggtctgaactagttgagagagtagttttgaacagtcgtaaccgtggctggtgtttgtagttgacataaaggattaagaccgcaaattgtccttcatgggtagagtcaggaagcccggtggcgtggcacaacacactttggtcatttctcaaaaaccacagtcctcaccacagtttattgatttcaaattgtctggtactattggaacaaatatttagaataaaaaaatttcccagtc

SEQ ID NO: 9465 - DNA, 765 bp, Homo sapiens
ggccggtacttggggccgaaaaactgtggcctgcagaagtcccaggcgacccccatccctatctagacttaggagctcagtttgggatggaggtgggagaacaaaaatgaatagggatttcacttgggaaatgaagtactttagttggcttccgagttccagactatatgtccagatattaattgactgtcttgtaagccacttgtttggttatgatttgtgtcttatcagggaaaaggtgcccagctgccagcccagctccgctgctatctttgcctcacttagtcatgtgcaattcgcgttgcagagtggcagaccattagttgctgagttctgtcagcactctgatgtgctcagaagagcacctgcccaaagtttttctggttttaatttaaaggacaaggctacatatattcagctttttgagatgaccaaagctagttagggtctccttgatgtagctaagctgcttcagtgatcttcacatttgcactccagtttttttttctttaaaaaagcggtttctacctctctatgtgcctgagtgatgatacaatcgctgtttagttactagatgaacaaatccacagaatgggtaaagagtagaatctgaactatatcttgacaaatattattcaaacttgaatgtaaatatatacagtatgtatattttttaaaaagatttgcttgcaatgaccttataagtgacatttaatgtcatagcatgtaaagggttttttttgtaataaaaattatagaatctgc

SEQ ID NO: 9466 - DNA, 359 bp, Homo sapiens
agttatgtgttagtctcaggagtcttaacttttgaaatatgttttacttgaatgttacattagatattggtgtcagaattttaaaaccaaattactgctttttgaaacctcaaattatataatgtatcttatgtatgtgctttatattgttatttgtgtatacattaaaataattctgaattatttaatctgatatgttgtattctgtatcttgaaatttttgtttccttgaaacatgcatgcatttaaaaataaagcttaaacaactgtatggatgttacatttactttcttttgatttttctgaaagtcattcactgaattttacacatgtggaataaacagtgtcttttctaaggc

SEQ ID NO: 9467 - DNA, 4658 bp, Homo sapiens
aaacagcagaaaagggtaggtatctttaaatttttattatgatgataaaagaatatgtggaactgttcactgagtgtaataatttttttatcctgtattattcaacaggctacagttcttagcaggagagagagcgaggagttgtcaggaaagctgcaggttactttgagacagtcgtcccaaatgcattagaggaactgtaaaaatctgccacagaaggaacgatgatccatagtcagaaaagttactgcagcttaaacaggaaacccttcttgttcaggactgtcatagccacagtttgcaaaaagtgcagctattgattaatgcaatgtagtgtcaattagatgtacattcctgaggtcttttatctgttgtagctttgtctttttctttttcttttcattacatcaggtatattgccctgtaaattgtggtagtggtaccaggaataaaaaattaaggaatttttaacttttcaatatttgtgtagttcagtttttctacattttagtacagaaactttaacaaaatgcagtttcgaaggtgtttccttgtgagttaacaagtaaagaagatcattgttaattactattttgtatgaattttgctaaagttaactgtaaagaaacacctgctgacttgcagtttaaggggaatctattctccccatttccaaaccatgatatgaatgggcgctgacatgtggagagaatagataatttgtgtgtttgcaatgtgtgttttagataaataggattgggtatttaaattagcatttgtgaatttaatagcattaagattaccttcaaatgaaaaaaaatctcaaaatttctatttggtttttgtgcattttcttttaaaatgtaatcatatgattttagtgtgttagacttgctgagtcctagctgtgtttagaacatctctattctacatttaccttggtcaaatttgaactgctgccataggttttgggtgtaaagaatgtttactgccctccatttaaattctgaaaagggatggtggatgttttccctctcctacgttagaaaccattcttaaaaacttttgaaaatatagaaccattaagcctgctatatctgagcaaattagtgggtaccttttttttcttatttaaagcacaagaggcccataaatcttgagttactttaaattcttttttttgatacaagttttcagagcaagagaataaaaatcatgtgttattaaacccctaactggctggcatgctttcctgtttgtattctatacattttgctggatgaaaccaaggatagttcaggtataattgtccaaaataacctaactgcagcagaaatgtagcacagttgcttagtacaggcttctcacttcctacagacctgaattcaaatttggatagtctgagttcttaaattcccaaagaacacactgttatttcttgtgtatatttcaacataaatcatgttgttaccaatttgtttggaaggccctggttgagaagagttttagttaataaggtcatatatacatatattaatataaaccaatgtctactgttttgctccagctagtgcttacagtttcattcgagccctgagtatgtgccctgctgttactctctttggtagttgaacgttgaattcaagtcttttgttttaagaagtactaagcaaacaagcaataaaaaggggaatggggtgtgctagtgtttgaatatgctctcttgttgctctaattctgtgcctctgtgcattaatatttggatgcatgcaatgccagcatggaaattggtcttcacacatactgcagttttccagaaacattcacaaaccaataaatgtaacagacattccatttgttaatgggcatatatgtgaaaagcagtgtagaaaataggctaatattagaaaatggttaagtcctaaataacttcaagtgtggttatataatggacactgtcaatgttcataacttaaacctgggtacctggtcaaaataatgcttgggaaacattaaaattgagctaaattgtctcaagttcttttattcatataaataaagtttaaaggaatgggggagattaacatttcctgttttatgtttgtgaaattgtttgacacaaccttgacagtatcctttaatggcatgaggttaattgtactgttaaccaactttctatgttctggaactagtattatagtgaaaacatttacagtaagttgatgtttacaacctataagcaggtgaaatctgtgtatgtgacctgtttataagttgtattagcttagctcttgtgaacagtgtggaaaagtaagccatgaggagagcgatttaaccacctttaaaggacctaagatgtgctttttaagcacagtgtggatcacagaaactcactaagacaggacttcagcagccttttgtgtttggacaagtcagcataaataaagaatgacaaggcagcagcaagagcttcaactacagagaagtgaaggcataagatactatgatgatagtgagcaactttccaaaagctagttaaatctgcttattacaactgaaatatcgaagaaagtctagcaggaaggagctcttcgccttttggaacatcaatgagagatagttgccacagtcactaggtctagcatttagacctgcaaggaagggcaataagcattaggtaaggcttgaatttgaattttttcactaattaaagagtaattttttgtaaagcaaggtaagagtaatctttttgatttgcaggttgaatgagaaccctacttgcctaaatgaggaatgtctttcctaccatctaaaatacgaaggtttctggctgggtaaggtttgtagttgacagtaaaacctgatgacaccatttgtttccctgcaagtctacattacatatttcacaactttgtccctctctagtaggcacattggaaaaattcttcaactgaaaactaccttggtaccatgtcctacacgttttaaaccttagttttaaaaattcccctgcgaaatagccataagtattcatatcaagtcagttgtgactccttgtgtatacaattcattttttgtgtcttcagggtaaactcaatttttggtaaagtggtttcagcttttgtgaaaaccgttttggtgtgtaagcatgacacacaacagactcagtaagctgcccatcctcatactaggaaaacaccttcaaaggaacattaaaagttaccagggccaggcacagtggctcacgcctgtaatcccagcactttgggaggctgaggcagatggatcccaagtccaggaatttgagacgagcctgggcaacatagtgagagcctgtcaacaaaaaatagaaaaattagttgggcttggtgatacacatctgtagtcccagctatttgggaggctgccttgatatcaggcagtcgaggctgcagtgagctgactgccccactgtattccagcctgggtgaccccatctcaaagaagaaaagttaccagatgtcatgggtaaaggttggtcttcaagtggcctcataagttgtcttgcatttaaattcagggaattcattggaccaataggttacattttcgttccttttttgttttggttcatctgttaagcagtgggggcctaattactgctcctttgtaaaaacacattttcccaaagaacactgaattaccgttcaaactggttgttgatgggtaataagggctgtttttgctgccccaaaagggcttaacaatttagtcggatagtttacttaaaaaaaaaaatcctttggagacatactgaaaatgcaaactagtttctaaattatcaattccctacatgaagaagcagtttgccagagtttagtctcagaaaatgactggttggctctatttaaatcagaacccaatttctacgcgtgttgaataaggtaacagcctttgatgaatttccttcacaacatggttttagtgaagcaaacattttttttttaagggcattgttctttctagtttatttctttttatgaaataaaattattttatttaaacagttccattgtcgtttctgaaaactacagtattctcagaagttgtagcagcagtaaaaaaaaaaaagttgttatataagtgattggggcagatttaactgattttgttaaaccaatttgtaagttactgcttctaatattacacttctaaaaagctgaatttatactcatgtcctaaaggagaatatgtggtaataaagtatatttgttaagtaactaattgaaataggcttggttttaagagttccagtatataataatcacaaattgaaacctgacagtatcttgggagttccagtaatgtcacaaattagtgaataagcatgccagtgtgcaagggtaatgtaaggattgttagcctatctaaatattcaaaattactttaaaacttaagtatgttttctgatttttaagaattcagaagtgttctgtaatggattcagatgtttcatttgtagtataatgaaatgtttacagaaagataactttttcattaaaatatttttagaaatgtgtgtgttgttttgtcacttcacaatgttcatgtgacttaaacactataggtgaatattttgacttattttaccagtaagtaataaaacaacaggaaacttg

SEQ ID NO: 9468 - DNA, 1240 bp, Homo sapiens
atccattagtaccattacaaaaaaatgtcaattttttttttaagttttcaactgtggttatactagtaatcaaatatatcatggactatattttggatacatttgtttctttggtttaaaataagtttgttttcattctgtagtttgttttgtttctacatctatggattgacagatagtattcctaaatctctctcattgtaggtacatcattttacattcagcggttgtcatttcaaattttagtcaggcagcacaaagctgtcaattattccagaggaagctgctgccagctgttttgtattgttgcttcctcttggggaacaaagacagatttggtatcattgattgctcagctagcctctttttaaaagaacgtttctgggaatcagatgtctagggaaggattccactgaggagtgatacacgtgtacattgtttaagagcatagtctagtgtgagtaggccattaaggggaaggatattcatgaaagaatttaggcaacctgttatttagaaagccttcacgtctgtaaggtgcttggcctacttttttttttaaattagtatacatgcataaaaccttgtatcatcaatatacaaattattctgttaggggacatgtttttgttctccatgtttctgtttctattgtggtatgagttgtatttgtatcactgagataacctattgttatattctaattcattgataatatgttttgtaagaaaagctgacatccttcattgcaagtgaagaacaggtttaccatgaaatgaatgcctttattcaacttagagtcctaatgtttctgatttcacattcttgttgctgaaatgcagaagaaacagctacagcaagagcagaaggaaaactcttagacttaatgtctccaattgcaagaattgtttcactaaagaaacagtcatcattcaactactgaatttgaaagcctcagcagtttcaatgacaaaaatcatttttgattttttaaaattaatcccaatggcatgataaattttcatataaaaagtaaagtttcaatttagtttttaataatggtttaatgccttttttgaataactggtttaacctaattttttttaaatgtaatgtattaatgcatataccataatcaaaagtttgaaatatcctgtttcttaaataatgagaacattaatcacatttagcaagcatttgtacattcaaacctggatattaaagtgaaatgattactttg

SEQ ID NO: 9469 - DNA, 257 bp, Homo sapiens
aacaaagactaaataatgacataatcctcagctgactgactgaaaatgtgactggacgcattccctgtggacagttgacagctttttttttttccatatacctgatagtctgtgtacagcattgttttgtctgggaagcagggattgctgacatgtatttttgaatccatacattaatgctaaaacgaatatagtagttgttccttagagcaatatgttgttacgtgtagcagaaataaagttttctttgcttaact

SEQ ID NO: 9470 - DNA, 587 bp, Homo sapiens
actgggaatgtagagctagccaacatatcacattctgaatgaataaataactatgcacaattatgtttcttatagctatgtgtggtttctgggtcaactgaaaacctaccatttgcttttctattcatctttataatggactttcagaagtgcattagacaaggcccctaaccactttgggatcctttctgttttgctgcaaccatattccttaaaaaaaaaaaaaaaaaaaaaaaaaaaatccacaccgtccttggaaagcagaataaaaggagcagaatataaaatccaaagtctgaccagtttgtaaagaaaaacaaatggtaactggtgcttaaagctgatcaagaaagttaacaacaacatagaaaccacacgattgttccactgtctggaagcaccatcccctatcgcaggactcctgggccacaagcagtcggtcagtgcagacttcaagtgtgtctgtttgatgtggtgtgattgtgctggccttgtcgaaaaagatgtgatgcttctcagaacctgttccatctgtatgccattgttcatgccttaagaaatgcaaagatgtacaataaatcattttt

SEQ ID NO: 9471 - DNA, 1166 bp, Homo sapiens
agaaactgaagtgtccaacttcctctaagtattgctatgcaaaagctgctgtaattaaactattgttatagggagtagttttttcccttaggactctgcactttatagaatgttgtaaaacagacaaacaagaaaacaaaccacatacttttgaagtgtattttatctttatatagtttgtttgcaagagtattttcctaataacttcacagtatgaatgtgcatcttttttttttgaacaaatgatggtgtaacattttgacatccataaggacaaatgtagatatttttcttaaaaactctgaggggactgacagcatggtcagggtgtattgtagcttataaacatgaaatcttataaggtttcagtttgacagaagtgtgatatatgtaacttgtgccatggaccaaatggtcactttaccacagctaaaaatgagttacgatagcagcttgatggtgattgtattgtattcctttaatcaaaaaggaaacacaatattctaagtatctttagcccaaataccatgacatattgagcatctttaaataaccagactgtattgtccttcatatgtgaagttgacactactgatttgtcaataccaaattttgggttaaagtgtttaatttttatgtatttattttcttgttgcctcaaaagatgattgcattctaacttttgtgacctaccaaatttaagatgtgtatacgttgttctttacgttgttctagaaaagagattttaatgctgtagtgactttgctcacttacactagagaaataaacaactttcaatggaagagaattttagtgctttttttttcctaaaatagatattaagctgctgttgtaaagtattgtttgcagctctttccaatatctagagacatttttatttatgaatatttatacaaaaaggaattctgtcaagatgactgctctatatcacttgagaatggcattatttaattaaagaacaaatagcattttttggtagtgcctgtccatacctattgtcattgtttgccttgtaatctgtttttttgaattcattttgggctgatagttttgtttaaggttttggataaggagcactttaaaacaaactggtgtgttgtttttaagttaatcatatgtttaataaatgcgtggtttttgcattc

SEQ ID NO: 9472 - DNA, 535 bp, Homo sapiens
ttcacataatttgtatgcagtgtgaaggagcagaaggcatcttctcactgtgctgcaaatctttatagcctttacaatacggacttctgtgtatatgttatactgattctactctgcttttatcctttggagcctgggagactccccaaaaaggtaaatgctatcaagagtagaactttgtagctgtagattagttatgtttaaaacgcctacttgcaagtcttgcttctttgggatatcaaaatgtattttgtgatgtactaaggatactggtcctgaagtctaccaaatattatagtgcattttagcctaattcattatctgtatgaagttataaaagtagctgtagatggctaggaattatgtcatttgtattaaacccagatctatttctgagtatgtggttcatgctgttgtgaaaaatgttttaccttttacctttgtcagtttgtaatgagaggatttccttttaccctttgtagctcagagagcacctgatgtatcatctcaaacacaataaacatgctcctgaagg

SEQ ID NO: 9473 - DNA, 2212 bp, Homo sapiens
ggacttctttcaaattgagagaatggaaaacagactcaggttgtagtaaagaaatttaaaagacactgtttacaagaaaaaatgaattttgtttggacttcttttactcatgatcttgtgacatattatgtcttcatgcaaggggaaaatctcagcaatgattactctttgagatagaagaactgcaaaggtaataatacagccaaagataatctctcagcttttaaatgggtagagaaacactaaagcattcaatttattcaagaaaagtaagcccttgaagatatcttgaaatgaaagtataactgagttaaattatactggagaagtcttagacttgaaatactacttaccatatgtgcttgcctcagtaaaatgaaccccactgggtgggcagaggttcatttcaaatacatctttgatacttgttcaaaatatgttctttaaaaatataattttttagagagctgttcccaaattttctaacgagtggaccattatcactttaaagccctttatttataatacatttcctacgggctgtgttccaacaaccattttttttcagcagactatgaatattatagtattataggccaaactggcaaacttcagactgaacatgtacactggtttgagcttagtgaaattacttctggataattatttttttataattatggatttcaccatctttctttctgtatatatacatgtgtttttatgtaggtatatatttaccattcttcctatctattcttcctataacacacctttatcaagcatacccaggagtaatcttcaaatcttttgttatattctgaaacaaaagattgtgagtgttgcactttacctgatacacgctgatttagaaaatacagaaaccatacctcactaataactttaaaatcaaagctgtgcaaagactagggggcctatacttcatatgtattatgtactatgtaaaatattgactatcacacaactatttccttggatgtaattctttgttaccctttacaagtataagtgttaccttacatggaaacgaagaaacaaaattcataaatttaaattcataaatttagctgaaagatactgattcaatttgtatacagtgaatataaatgagacgacagcaaaattttcatgaaatgtaaaatatttttatagtttgttcatactatatgaggttctattttaaatgactttctggattttaaaaaatttctttaaatacaatcatttttgtaatatttattttatgcttatgatctagataattgcagaatatcattttatctgactctgccttcataagagagctgtggccgaattttgaacatctgttatagggagtgatcaaattagaaggcaatgtggaaaaacaattctgggaaagatttctttatatgaagtccctgccactagccagccatcctaattgatgaaagttatctgttcacaggcctgcagtgatggtgaggaatgttctgagatttgcgaaggcatttgagtagtgaaatgtaagcacaaaacctcctgaacccagagtgtgtatacacaggaataaactttatgacatttatgtatttttaaaaaactttgtatcgttataaaaaggctagtcattctttcaggagaacatctaggatcatagatgaaaaatcaagccccgatttagaactgtcttctccaggatggtctctaaggaaatttacatttggttctttcctactcagaactactcagaaacaactatatatttcaggttatctgagcacagtgaaagcagagtactatggttgtccaacacaggcctctcagatacaaggggaacacaattacatattgggctagattttgcccagttcaaaatagtatttgttatcaacttactttgttacttgtatcatgaattttaaaaccctaccactttaagaagacagggatgggttattcttttttggcaggtaggctatataactatgtgattttgaaatttaactgctctggattagggagcagtgaatcaaggcagacttatgaaatctgtattatatttgtaacagaatataggaaatttaacataattgatgagctcaaatcctgaaaaatgaaagaatccaaattatttcagaattatctaggttaaatattgatgtattatgatggttgcaaagtttttttgtgtgtccaataaacacattgt

SEQ ID NO: 9474 - DNA, 1078 bp, Homo sapiens
gctgggctactgtatacagtgtacaatgtgtatttcttcaaccatatattttaaaaagacgtacatagaaacttaggcactttgctatttcttttctaaactatcaaaaactctagcagtttgaaaagcctaatatttatttgtatgtcagtatttttcatttgattccctattagaattaattttaaaacttgaagacttccagacttatccaacttataaataacatatttcttcagactaacatcttaaaacactgacctctatgaggtatttactgtgcaataactgattcatttttttcagagcttgaagcatccaatgatttttccctccactgctgttaattaatgtcacttccaagaagaaaaactgttctgttgtaaaaaatataattgctcttaattcttggggaggttactaatagcagtaggatagaattttatgaggttacctacaactacttaatgtacttacactgtaagccttgttgctttacccaagacaaatgtaattttatcattgcttatgtagtatttttcttttggaaatgtgccttatgttaaacactatgtacttttactttttgcattgtccagacttctttattagatggagatgtttctttttctgtcttctagactaaatagagtatcatccaaataatggggcctatgacttgaatgaatagaaatgaataagctggtgtttgttttttcaaaatggaagtaatttagatttgttctcctcatacataaaatgattttagttcagttttaaccagtgaaaactttgtttttatgaaaaaaaaggaaaatggtttcccatttggttttatatgtgttaaataaatgtgtaaagtaaccaccaaatgttattagaatttttcttctagcatttataattttttcaactcctattgtgtttctttgtgtgtgatattttaatcaaaagtggttgagttgttaacagtgttctttgaaagaatctctaaaaggcttataaatgtttgaaatatcacacaaaggctgatttctaaaatatatatatattaaaacaataaagtatttattttgcc

SEQ ID NO: 9475 - DNA, 1396 bp, Homo sapiens
taatgttgaagatgaagaaaaagtttaaaagaaattctgacagatgacatcagaagacacctatttagaatgttacatttatgatgggaatgaatgaacattatcttagacttgcagttgtactgccagaattatctacagcactggtgtaaaagaagggtctgcaaactttttctgtaaagggccggtttataaatattttagactttgcaggctataatatatggttcacacatgagaacaagaatagagtcatcatgtattctttgttatttgcttttaacaacctttaaaaaatattaaaacgattcttagctcagagccatacaaaagtaggctggattcagtccatggaccatagattgctgtccccctcgacggacttataatgtttcaggtggctggcttgaacatgagtctgctgtgctatctacataaatgtctaagttgtataaagtccactttcccttcacgttttttggctgacctgaaaagaggtaacttagtttttggtcacttgttctcctaaaaatgctatccctaaccatatatttatatttcgttttaaaaacacccatgatgtggcacagtaaacaaaccctgttatgctgtattattatgaggagattcttcattgttttctttccttctcaaaggttgaaaaaatgcttttaatttttcacagccgagaaacagtgcagcagtatatgtgcacacagtaagtacacaaatttgagcaacagtaagtgcacaaattctgtagtttgccgtatcatccaggaaaacctgagggaaaaaaattatagcaattaactgggcattgtagagtatcctaaatatgttatcaagtatttagagttctatattttaaagatatatgtgttcatgtattttctgaaattgctttcatagaaattttcccactgatagttgatttttgaggcatctaatatttacatatttgccttctgaactttgttttgacctgtatcctttatttacattgggtttttctttcgtagttttggtttttcactcctgtccagtctatttattattcaaataggaaaaattactttacaggttgttttactgtagcttataatgatactgtagttattccagttactagtttactgtcagagggctgcctttttcagataaatattgacataataactgaagttatttttataagaaaatcaagtatataaatctaggaaagggatcttctagtttctgtgttgtttagactcaaagaatcacaaatttgtcagtaacatgtagttgtttagttataattcagagtgtacagaatggtaaaaattccaatcagtcaaaagaggtcaatgaattaaaaggcttgcaactttttcaaaaacctgttagaatatgc

SEQ ID NO: 9476 - DNA, 4334 bp, Homo sapiens
gttgcattgtagcagacaatggacaactgtagtttctgaattgacttctatagccatcttttcccttttttggagagtagactagcaaaactcccttttttctcttgccttttttatgcataaatggaggtcaatttgattgtcctgacctactgtataagtaaatttcaaatgtcattactttctctttgttattataatgtgtgattaaatgcttttttaaattgctaagggaaaataacaaagtgttagtaatcattgctttctgtagaagaaaaaggtttaaatttaaaatgtgtatttagagcatggagagaatcatttaatgaagcctatttttctgttccagcaactgtttttatgaaagaaaaacttgaaatgctacttaacttactatttcaaagggaagtatatttctttttaaagaatctttttaagattaaaaatgaataccttaaatctcccaaaagagataaccagtatctgaaggtttatacaatatttacacagtggctacaatattcacaaaattcttatgttctcttatgaaaaatatacacttttcattttgtcttcttctttttttttctttttttagatggagtttggctcttgtcacccaggctggagtgcaatggcgcaatctcagctcactgcaacctctgcctcccgggttcaagcgattctcctgccccagcctcccatatagctgggattataggtgcctgccaccatgcccagctaatttttgtgtttttagtagagatggagtctcaccacataggccaggcagtctcgaactcctgacctcaggtgatccacccaccttggcctctctaaatactgggattacaggcgtgagccactgcatccgacctcattttgtttttttcaattctgttatcggcatttctttctttttttttttaatgtataggtgttctgtcatacgttattgtgagctttggttctttgaacaggtgatctattctcttacattttgtgctttttatcttgggtgcctagcattctgtttttttgatcctatgtcataattttttgagaaaatgtttgatactgcaagatcattgtttagtggtctgttttctacttcagtattctaccagagaacatattttttaggggagaagggttatggttttgtaagaaactttaaatatacttttaggagacccacaatcatttacagttttatctttggcctttgaataggttcttttttctttaatgtctccgtatttgaagaactgagctctgtacattataaatttgcttaaagattttgattttttcttcagaatatggtatacttaaaattaattaattaagacagtttcttttttcttttcttttttttttttttcgagacagggtcttgctctgtcacctaggctagagtggagtggcatgaacacaacgcactgcagcctctacctcctgggctcaagcagtcctcccacctcagtctcctgagtagctgagactacagctgtgcgccaccacatctggctaattttatttttatttttgtagagacaggagtcttgccatgttgcccaggctgatctcaaactcctaggcttaagtgatcctcccgccttagcctcccaagtgctaggattacaggcatcagccaccacgcctggcctgatagtttccacatagtttttcatgacttagaagatatcattgccatgtaggttttatttttaaaagtcttgagctcttcttaaatatacattataaagagcaagcatagatggaaagtgcatattgaacacatctgtgcatttgagaaggcaggctttcatatgctgtcatgagcaaaaagtagaagtgataaatgcaagttatgttttgagattgcttacaccgtgacaagatgccatcacttgtgatgttatgaactgttataaactctttgcttctgctaagaagcagtctaaatataatcaacgtacagtgagctctttgaagccaaccaaggcaggcagaaccctcttaaatatgagactgatgtataggttctctctatggtcagtatcactggataagccttctcctttcataagaaaggatgtatttaaatacattttattttgctaaatcctgtttagttttcagccattaaatgtcacatgaagccttgatagaatttgttcataatggctcatgtattattattatttttgagatggagttttgctcttaatgatattattattatttgagacagagttttgctcttattgcccaggctggagtgcagtggcgtgatcttggctcactgcaacctctgcctcccagcttcaagcgattctcctgtatcagcctcccaagtagctgggattataggcatgtgccaccatgcccagcaaattttgtatttttttttggtagagacagggttcaaccatgttggtcaggctggtctcgaactcctgaccgcaagtgatccacacgccttggtctcccaaagtgctgggattacggtgttagccactacacctggcctggattgtgtattatttatgtctgtagtttatatgcttagttgttgcctatagtgatctgggtaagattcaaacatttatcttttgtatcttctacagaagtgctttgagcatcaaatttgttttaacgttaaattgtagtttgctgtattaaaatagatcaatgaatataattcagtcttttaggggcaccaagtaaagcataaggtcatatatactatacaatatgtttattgcacttcccatggggataaatcactctgtcattcctagttattttaaaaaaagaactttatgattacggtcctctttctcacatactgcaaacttaaaagatacatacaccaaatataggtctgttttaaaggagaggaaaaatagttcaaggagtttttgcctctttgtttttcaatagattattctgccattttttaaaggaaagggaaaatgaaaacagcatgtctttttaaacattgaaaagaaatatggaggctttaaaccgcaaactgaaaaagctgagtagaacaaaggcagtggagcatacaatacaattctatttatttgaggttaattgaagttaataatttttaaatttttttctaattttatgccttaaaataggtttctgattacataaaatttgaatagaacactcaagaagtatgtagatttttgaaaaacccaaacaatattcttcttagatttttggaggcaaaatttagaccagtatactaattcaaaagacaaatatttcagaggaagtggagtacagtatttaacattttgtttgcaattttactttttcttcccttcttccctattgaaccttgattaaaatgtatgaatacaatacttggatttttttttttcagcttagactctgataatttcagtggtagtggggaaacctgaatttgtcagcatgattatttgtaactcagattgttcaaatgtatatagaaggtccccttcaagtgttgtttctccaagtagtcataaatgtagcaagtataaatcagaatatcatcttataatcttacagagttaacctaatgagtcaatacctttataagcaaaaccatgataaatttaaaaacaacagaaatgtggcatgattacttatttatttgttccaggtgactctaaatagttgatttttctgcctgaaggatcctgaacatatttagttaccctgtagttatttaggaatttaaaccagaagactttgaagttgtatattcttgcaatgcataaaatgacattataatcaacaaacttatggtttgtttcaattgatgcacacaaaaaataacttatagttagacttttctatttcaagtaaagctttgagttacttgtttttatacatattcatcatgtaccctttattgtttctaggtgttgatatactttaataaaaatgatatgtttaatattttcccattaatatatttctttgaagctatttgttttaaaagatgtaacacttatttgctgtcaaattctgaattaaaaaatctgttggtggccaggcgcagtggctcatgcctgtaatcccaacattttgggaggccaaggagatggatcacttgaggccaggagttcaagaccagcctggccaacatggcaaaaccccatcactaaaaatacaaaaattacccgggcatggtggtgggtgcctgtaatcccagcttcttaggaggctgaggtaggagaattgcttgaccctgggaggtggaggtggcagtgagccgagatagcaccactgcacttctagttgacagagtgagactctgactc

SEQ ID NO: 9477 - DNA, 548 bp, Homo sapiens
tagaacaccaagaaggaggttgctacactaaaacagagttagcagagtgctgctggttccttcggttagttatataactgttcctgcagtattggatagctatctcatacttcttttagaaagaagcctttttcattaaggatacaacctatttgtagctcgcactttaaaagatgcttgagatacattttaaagaaaactaaaaatccctgtaaataggattttgtgctttctgtaacagtgcatgcttcagcacagaaaactcagcattgattattgtaaattaaataactgaaattgtggtgagacgtcatagtcttcatgagaacgtgggggtgaatttcatgaaggggaactatagttatttctaccgacacaaatattataattagcaatttgaattatggtcttttaatttagatagtatttaatattttaattatccttgtttgtatatgtcctgtcacagagtgtcctcttggtgtattctaaaacgagcattcttttaaaaaacctaaagtttcttgataataaacattgtcaatgat

SEQ ID NO: 9478 - DNA, 459 bp, Homo sapiens
tcatcaccataatgggaaaaaaatactcttgtgaaaactattgctatatgcgttaagtgttcatctatgtgggtacatggctatttaactggtggaaataaactggccgatacatggcgtcattggtttgaaatcatttactgtaagtgcaatgatgcaaataaatccctaagtttctgatatataatattattaaagcactgaatagtttgaaaatcaatacaatatatgctatatattaaaatgatgtcttaagagtatgtataatgtacataaaatatatttatagtactctaatttatgttgtaaagtatgctcccttggtttttcttaatctttgtgtatttgcacctatttaatgtttagacaaagctgatggcactatgttttgtatcatgttccttgaaactgtaaattcagtgaaaaatatctcttgcaataaatttttgttaactattt

SEQ ID NO: 9479 - DNA, 63 bp, Homo sapiens
agcttttgtacctgatataagtatgcttacttcttttagaaaataaaatggtttttaaagcat

SEQ ID NO: 9480 - DNA, 625 bp, Homo sapiens
caccaaacacatcgctgaaaaaattaagtcagctcagcacgagttgaaattgactacattaatttctttccacctagaatcaacaggatgtttatttcctatgctgattctggaggagttaacctcctgcaaaaaaggcatcttgtccctacatcttctcttctgactttggctacatctcatagtaagttcagagtagttcatgataaattgaaaatataatggtcattgcagaaaatgattgatgttgtaactgtccacccaagtaagaagtgtatctgcctttccatcttttggttttcatttgggcatgtgctattaccagaaacaacaaacttatatttaaaatacccttcatttgacacagtttttaatgagtgatttaatttcctctgtatttgtatgtttagaagactgcctaaaacatgagcactgtacttcataaaggaaactgcgtatgcagattcagtattgtgtatctttggacaattagatggacatttaaaatggaacttcttttatctgacaggatcagctacaatgccctgtgttaaattgtttaaaagtttcccttttcttttttgccaataaagttgtaaataaagaccatcatacattaaaatcc

SEQ ID NO: 9481 - DNA, 3608 bp, Homo sapiens
ctgcagtttttaagttatgctacatcttgacccactagaattagcaactttattatagatttaaactttcttcatgaggagtaaaaatccaaggctttactgctgatagtgctaattggcattaaccacaaaatgagaattatatttgtcaaccttctccttataaataagttcagacatacatttaataacatagggtgacttgtgtttttaggtatttaaataataaaatttcaagggatagtttttattcaatgtatataagacaggtagtgcctgatttactactttatataaaatagtacctccttcagttactgtttctgatttaatgtacggaactttatttgttgttgttgttgttgttgttgttgttgttttaaagcagtccaaatttggaccttagcaatcatgtcttttgtataggtacttaatgttaatacatattacactacagtttacttttcagaatactaaagactttataactgcatgaacttggatttttttaatcactcatatggtagaattttataaacacatacatgataccatccaaattcttgcttttaataacaaaggtacaatattttgttttagtatgaaaatctggtagatcctattacacttctgtttatattaaatccacaatattttattacatttttaacttgtataaattttaggtcaaatccttcaagccaacctatactaaaaattagttccataatcacaaatggctcttttgtgtaattgtttaatttcacctgaatatcataatgcttaaagccatatggagttggaaattatttccaaagcatatttattccattgttttagtctggctatttacagtataaaaaaagcatttttattaaaatactgtgtagttctttgagatagttgcttatgcatatagtaagtattacattcttagagtagagcagagtttttagttagtattaatttattttcctccattcatgtacttttccttatatttccaaaactgttactgagaatgggtcaagatcagtgagaaatctttacagttgacaggaacctggaccccttaccccaactttatgagtaatgcttggaataaaaactcttaaggcaactcactgatttacttctagcaatagcatgatgttacaggaatattacctctgtttaagcaaggtaatgtgtaaaatcagtctcggctgtcagaataacttctaaaaggtatttttataagcagttcaagttactgaaaaccttttaaacctttctgaagttcgttagtataaattacttttctaggattattaataaaagccacataggtggcaagttgtagttttatatggctctgtagagtggtgaaccttctagaggaatatatgatttattcacagttcctcaaggcctggggatgatgatcagttatacctatttttgtgcaattacatcatgttgtacattagaaatggagagtttaatagctctttaactgctgtcctcattaggtaatgataaatatttcccttaaataattgactattttgctgtgttttaaaaatgattgaaatttatcttgccatatctcataatttcatgcacaagttgactgagctaatcttgagaatatattcgtaaaataggagcacatttagttgaggtatacaaggtaggactctagacaaaaccttctattttagctttagtgaatttcaaaagtaatgggtcttggagtatagatttttattagtagcttgaaagagcttaatcatatgcagtaagtatttttattaccaataaatttaaaattttttaagaaaaatatttttatcctagggccaagtgttgcctgccaccaatcagtaagttagtctataacaaattttaccctaacagttttaccacctagtaacagtcatttctgaaaatatgttggatagaaagtcactctttggcaaaagtgttagaatttgcttttgtgccatctattccttttatggcatctatcttgaaagtaatcttgtattggagattgaaagatgctgtaatttagaaattaacatgatatcttaaattacctttatgaaatatagttttgtataatagcatagattttccttcaaaaaatgaacatttatatatctacaaaaatatggagaagagtaatttgaaagcctactttctgaagaaaatggtgggatttttttttatcatgattaaatatcaaaaaattgccctatgaaaactttaaatctctaaaacatttgaaatactaccatatttgtgatttattgagaataaaaatccattttgaaatgtaaaatttttatgatctgattcagttttaagaaaacatgaatgaactagaagatattaaaaacatttgacattggtaagaaatattgatactgatattgatttttatataggtatttatttcagaattgatattttgagaaaaatacatgtgagtcattttttctgtttctcttttctcttaacgattatcactgtaattctgaatctgaaaggtaaaacaattagtcaaaatattattgccatcattctacctgtgttatgaaactacttattcatagttaattctcattaacacttacatttccataaagaaaactcaagtattaataaaagagactttactggcttaagagggctgtgaaagatttttgatagtgaatcatgaccctaagggagagatttgtgtgataaaagtattgtatataatagatcagcgatttttgtaaggcaaacagaatttgtaagttggcagatcttcctaagttgcaaaatgtaatgatgagcttggtggagaagaatgagtcgttcttggaatacctatgtgcagccactacccatctcaatgtcaccttgtttgcattcttggatagcttgtatatgtagtagtttgatgaataatttaaagaaaaacacctaaaatttgaaaaatgattgtaggatcaaaaaaggcagatgaaattacttaatactcagtgttttggagagtattccttttagtttgttggttggctggtttgaacgatagaaatatgcagcatgcaatatatgcttatatttcattttaatttctgatatataatgaacttcttgggagaggtactgaatctttgatgttttttgtcattgttctcaagtgcaatataacaatgtaaccaaatctagataatttcaaagttgtcattaatttagtaagcctaatataaacaaatatttgtattatttttgttagcaggaaagagtgattaagtgaggttatttacccctaaatggtccattctgcattgtatttcaggctggaaatgaattattctttaccagttttgaaacactttgaaatatcctaaggtaacttggaagctgtgtagtatatcaaattaatttgctacctaataacatagaaagtaaatatctttgtggtcacccacattgggtgagacagaaaatgaatctgttctaaaatttgtaatttgctaacttgatttgagttagtgaaaactggtacagtgttctgcttgatttacaacatgtaacttgtgactgtacaataaacataagcatatggtacc

SEQ ID NO: 9482 - DNA, 960 bp, Homo sapiens
ctccaatggggattgtgtgtctgctgtctcgtgctgtttattcttgcttcttgttgtaaattgcagtacgaacttaagaaaatgagactgagcaatctcatggttcttggacatgtctcaagcagagtaaatggtaattcagtaatcagagagaaagataccaaggaatgctttttctggcctattcatttatttttgggtgatgaatttacagtatctaagttttcaaaatgtaaaatagcttcaagatgttagttatctgaaaatgttgctcagccagccagtttggccttgactctcttaagaataacagtgaaatatatactcctcaagttgcctccaaaaatgttgcctctaccatggtgactaccccatggaacatttagaaacaaaactgacttcaggcatcatattattttaaatgttactattacgtcttcttctgcctatacttaaaaataacttgataaatgacttggactgatgttactctggagttatcacaaagaaaatgttgtttggtctttaaagagcatgtgtattgtatcatcccaaacgtaaatcctacatttatataagatgggcaagaagctacttggtcattagagagggagacaccagctctttggttgtttttggatataactttacaaaataagtaagatgttaatttagaaatttgagaaattaatgctctaatactgagtttttatttaaaaattattttttcttcccctcaacaatgaagcaagcttagctgtcaagggaaactttttacaaatctgaaaaaaacaatctatgactttggtttaaggctcactgatacttttaggctaaattggttttaatatatttcttctattctaaaaacctgaactcagtcacttaaaggctatgaaatttaaaaaaaaagtcgatgtgaaagtttcttttgaacactaaaataaaatatgtgcagat

SEQ ID NO: 9483 - DNA, 1912 bp, Homo sapiens
catcaagaacaagaaatcctgattcatgttaaatgtgtttgtatacacatgtcatttattattattactttaagataggtattattcatgtgtcaatgtttttgaatattttaatattttgaaaattttctcagttaaatttcctcaccttcactattgatctgtaatttttattttaaaaacagcttactgtaaagtagatcatacttttatgttcctttctgtttctactgtagatgaatttgtaattgaaagacatattatacaaatacctgccttgtgtctgagttctatttagttagcatcttgaaatttgtattcattttccagatggctagtttattaatgatttcccaaaagccataccttaaagataactttttaaattctgaagagacatgccaatgtcaaactaaacatgttctgtttttaaaccaacaaacatgttactattcattggacagatatcattttatgtataaatactgttcacatcactgggaaaatgtaaactttaaacataatgccacaaggtcactaatttctagcaggtaaaattataaggatataaattccaataataaaccaaatgtatttagagtatttattagtaaatgcaaggtgatgttagttatgatcagttatactctaaatatttaatttgttttataaaggtagtgaaaaaatgaaaatttgctatttattaaaaaacattaaatttcattccaaatgagataagtgatattactataacatctaagcatcatctgatttgatattccctaaaaaacatttggaatatatgctatctatagattcagtatctactacccatatttactttaccaaatatatttctcctcactgcataaggactactcttctcatattttcttctttgatgaagatatttttcaccaaagtttattttgtgatgccctcttggttttgatactttaaaatctgtggcacccgttctacatgaattatcaatatttggtaaattcaatctgtatttgttttgttaaagtcaaaaatctcattttccaaaaaaaaaaaaaaaacccagttactgctcagtttagtcttgaacatgagcaataaaattctcttgcatttcattattgatgtgctgatgaacctggacttttaaaaatatttgtttcctatacctttaccctttacctaacagactaatttgtactcagtaaaacaaaaatttatggtcaaaatttctaacttggttcatcacattataagataaataaattaaattaatgaaaatgtgacttagagtaggggtagccctcaaaaatagatttatcatttactcattggaattttcttcaagtgttaaaggtacattttcactaggaaaagaaatcaaatatgcttatgcaatatatatttgtgtgtttttccttaatgttatatggtatatatgagccttcttgtttagtttcttttatctgctaagttgtaccttaattagagggcaatatatgtttcataaagaagagtctttataattttgtttgtcagatagtattttggaatttgtataataaggatgtttagaagccatataagtggctttttttaacagatagaatttgtatttttattgtactttaaaaagatttatgtaataggtatatatttagtggccatttattatcaatggtaacacaatggagtactaagatggtatttgcacatttaagatatgttactttaccaatttttaatggtaatcaactctgctactggcatgatgaaatagtacataactggtcattaattatgaacatttatttctccagtgcgtttttatgaagatctggttgaaaattgtatttctatgtaaactcaacgatatgtttggttttcctgaaaataaatgattttaaat

SEQ ID NO: 9484 - DNA, 972 bp, Homo sapiens
accaaactctatctgaaatcccaacaaaaaaaatttaactccatatgtgttcctcttgttctaatcttgtcaaccagtgcaagtgaccgacaaaattccagttatttatttccaaaatgtttggaaacagtataatttgacaaagaaaaatgatacttctctttttttgctgttccaccaaatacaattcaaatgctttttgttttatttttttaccaattccaatttcaaaatgtctcaatggtgctataataaataaacttcaacactctttatgataacaacactgtgttatattctttgaatcctagcccatctgcagagcaatgactgtgctcaccagtaaaagataacctttctttctgaaatagtcaaatacgaaattagaaaagccctccctattttaactacctcaactggtcagaaacacagattgtattctatgagtcccagaagatgaaaaaaattttatacgttgataaaacttataaatttcattgattaatctcctggaagattggtttaaaaagaaaagtgtaatgcaagaatttaaagaaatatttttaaagccacaattattttaatattggatatcaactgcttgtaaaggtgctcctcttttttcttgtcattgctggtcaagattactaatatttgggaaggctttaaagacgcatgttatggtgctaatgtactttcacttttaaactctagatcagaattgttgacttgcattcagaacataaatgcacaaaatctgtacatgtctcccatcagaaagattcattggcatgccacaggggattctcctccttcatcctgtaaaggtcaacaataaaaaccaaattatggggctgcttttgtcacactagcatagagaatgtgttgaaatttaactttgtaagcttgtatgtggttgttgatcttttttttccttacagacacccataataaaatatcatattaaaattc

SEQ ID NO: 9485 - DNA, 121 bp, Homo sapiens
gccttggagatggggaggatccttggactttgtgtttttgattgtatgttgatattctaaaaacatctattttaatgttatttctgttctaaaaataagataataaatattaacaaacttt

SEQ ID NO: 9486 - DNA, 103 bp, Homo sapiens
tgtgattcacaatgtaacaatataaaaataagtttttatataattatataaaagtaagatactctgctgctttactattgtataacatagtagttttaaagtt

SEQ ID NO: 9487 - DNA, 192 bp, Homo sapiens
ttaaatatgtttaagaagattagttaccattgaaattggttctgtcataaaacagcatgagtctggttttaaattatctttgtattatgtgtcacatggttattttttaaatgaggattcactgacttgtttttatattgaaaaaagttccacgtattgtagaaaacgtaaataaactaatatagactattc

SEQ ID NO: 9488 - DNA, 3334 bp, Homo sapiens
ggctgtaggatgacaacactttgactgtggaggtgctagtttgaataaatgtgacaaaagcaaaaactggtgtgaaaaagtacaaataactatctggatttaaaaatgtgtctacgataatgtcactattataagaacaactaggatgaaatgcattttaagtacttctatgttaacagcaatttctgtttagtcttagattttagtcatctgaagggctgaacagaggtcctgtgacacccaataatcagctgaatgtcacagcacttcttcctaagtaatggcatcaccaaagaaaatgctaaggaataaaaactgccccaaattccaatggttgaagtttatcctttaaaataacaatttttgtttgtttatacccaaaaaaagtccagatatgaaaagggcttttctaaaatttcttggcgagggaatggcactcaaatcatagtgattaacagtaagtcttgtttgtttgtcaaggatctctacttcttgacacaaatgaaccctgtctttaataagataagatatttatttttgtagatgagaagtgtaactaccaccttggacctcagggccctaactaattacagctgttactggacgactcagactttgtgcctaaagccatcttagagataacagtttatagaagccatgacattagtgtttattgcattgaattaagcccagtgatataactatacaagaaaacaagtaggggtaccttttacaaagagcaatccaataaatcttaaaaataacagaaacttagtctgcaaggtagaaagtttcagttttaattctgtattaagctttactatctcagaggtacagagggctggaatatgggcatttatttccagttttttcttgactagtaaggcggtcaccattaaaatagaccagataatgcatgaagatttacagttgtattgcaaaacggaaaagataaaactgtcctttgaggagagtactcgttttctgggtttttgttattttttagtggtaacacaagcctatagggcatttatagccacctattatactgtttccataagcctggctaccttttagggaagctattttttctctttcatttttactgtcacagcacatacacacacacctttttgttttaaaggattaagtactgtttgaagatcagtggtaacagaaaatttgggagggagaagaagaaattaagacatgacttgttagaaaattaagacttcagtttctagaattatcttttcatcaagatttggtagacattgagtttaaatggaaaggaaattatttaagcctgtgtatgttagatccacaatacaccattggtattgaaatataaaggttaaaaaaaaggcttatgacctctttaatgagataaatatgtatttgtcttgtaagcaggcagaaaatctacctctaattttaacactaatactttgaaacccacaatcaaatagagtgaattctccaagttacataagcaaggaaaacattatttgaaatatgccatgttttcgttgcctttggacacctcatcattcaactctaattttaccgagtcccgggatttgtactgtcccattgtacttgcaatctacaatttatataatagaaaaacaaccaaacccattcatacaaggatctgaagttataaggttaagggcagaaagtttcccataagtataaaacatttccaggtcatgaagagtagtttaggttgagtgacaaaagcctaggtgtggttgtttttcattcattttgcatctcacaccaagacatttttgctgcaaggtcatctgctgcttaaaatgtacaattaggtatataaaataagtacaatggtgaaaacacaaagccaggtaaagcagcatgccccactaaacttttcagtatacatagggacagacaagtgagttttggttgtatctaaatattttaatttcaggttccttctgtgccctgggccactatttcccaggggtgtgacagagatgcctgccagatccatatcaactagaagtctgatttctgttgctgcccttcctcagcaactatggcagtatacttttatcaccaagcaccactcccttgtccctgaatcacattttaatagagtacaatatcttctgtacaatatttctgaaacacttatgtctgaaatatatgctgtattgtatgttaacccatgacatatatgaactacaaggcttgcataatcagtgagctagtggataaatcaagacaggagcaaatgggagaaagatgaataaacaaatgaaaaaagatgaataaatgaataagagagatgaataaacaaatttacattacatgtgatagttatcatggtatggccttcatgacaagatggatgagaatatcactgataggatattagccttctttcatatctttatattgaaatatgggctttacttcaatttgaaggtctttcatgaacaataaaagagagtagaaggactgtctgagaaggcaggagacatataaaacagatgactgaaagactgactagctcctggaaagggaaacatttggaacatccagagtaagggcaaatgggcttctaccagcacaacaaagagcctccaggtggcaacatggaagcaggttatcagagaaaataaatgtgcaaattccttatttacaatgactcacttaaccccacaaacatgtttcactgctgccttccccagttgtcgcttatgtactgttgttacctttcagttacatgcctttgatcctaaaattctctacttttgttgccttatcagttctttgcaatctgcctgtggttatcagcacttaaagcacaattttgaaggggaaaaaaatgataatcaccttagtcccaaagaaataatttgtcaaactgccttattagtattaaaaacagacacactgaatgaagtagcatgatacgcatatatcctactcagtatcattggccttttatcaaatggggaaactatacttttgtattacatagttttagaaatcgaaagttagagactctttataagtaatgtcaaggaacagtaatttaaaaacaaagttctaacaaatatattgtttgcttaatcacaatgccctcaacttgtatttgaataactaaataggacatgtcttccttggagctgtgggcattagttcagaagcactacctgcatcttaattttcaaaacttaagttttattagcaaatcctcttctctgtaagacttagctatgaagtggtatattttttccaaatatttttctgaaaacatttgttgttgtaactgcacaataaaagtccagttgcaatt

SEQ ID NO: 9489 - DNA, 179 bp, Homo sapiens
aggaactctaaccccggtgtacctgtataaactgaactgtgaaactgtttcggttatctctgtcttttgaggatggctttgtcctgttgctggttaacattcaccttcctcttttgaggagtatttttccattatgtattcataataatgttaatttcaataaatgacattcatgcagc

SEQ ID NO: 9490 - DNA, 2097 bp, Homo sapiens
gggcatcctgctcatctcacaccctgcatggaatcaggctcctcagccaggacacagggtgaggccccccagccaggatatgcctcccctggaggagcacagcactgcatatgcttctaaatatctaaactcattaacatggaaacacacacacaggagctacagtacatattggcaggaaaaggtaaactttcgtaatctcattggaattacaacagggaaatggagttcaatgaggactttcagttctttgcttggttaggttaaggatgatagaatttctctgccagtgcagtaagagttgaaaccggcagttacactaagtaagtggagggaatgaaagtgtttcgaggtgaatgtggatataatttccctcttctgattatttattcttatttggttcctaacacaaactgggaagagatagaattcatctatactttcttttttcttggagagaaccgtttaaaaaattacaagatatatttaaaaagtaaccagataaaagtagcacatgtgcttttgttaaaaataaagttaaaagttaaagttaaaaaatgaagttaaaagtttcatcagaaactttacatatctttagcaaatatatttttatatgtgtatggcatataatggaaataattctttgagcaacagaagctattattaactactgcaagctaagccgagcttaaaaatgccttttgttttaaatgggctttgagaaaaaaaacagaaacaagcgattatttcaaatcaaccaaccaactcagtatcctgtgttttgatagacaagagtttactaaatatattgatactgtaaatagcctctctcgctatttactatcttatagtaattcaggctctaattagctgagggaatgaaacacacaaaaatcactgaattcctaagagttccttaaataagcagtactagttacaaatcacagtataagatttaagtgcctgggggaaggatacaatttttagaaattacatattgggtcagttttgttttgtttttggtgaggaaaaggtggtaaataggaaaccatgaatgggaaggatggcaataagtagcaactatactttccaatgactaaagaaagaaaatctcagtatattcgttctcatgaagacacagtcagacactggacaatgtaatgtatgcaactgcaaacgttacaactgcagccagaacaatggctgggtggatcgcacgtaaagcttgccactaaaaatcaaagcagaggttaacaggaaacctggggggagtgtggaaaagggaaaactgttttagctgaataaaggtgaattatataatttataatagctgtggatgagcacaggagagagaggaaagaaaagaacagtcgaaatgagcaactcaccttaccctctgaccctgattagacaggatcaattgtaaagtgagggcttctccatgacaccatagttctgcccaatactgcatttgggataagaaattctacacttggatgtctcgcttcacaataaaacacagcttaaaaataaaataactgaaagaaatagaattcagcaaatagttattttttgcacttgaactgaaacgtactgtactgtaaattatgactcattttaagtgacctttaaaatcagatgtatttattatgcttgtgtaattatagaaataaagaaatgggtgacaggcttaacctcacctatgaatgtacagtatgtggatttgtgaaactgactgtaggaagtcaaaaacttgtactgtatcttgtgtttacagttctgatttattcctttgaaaagcctgctgttttggaaatgcacagttgacatgttgaaataaaaatgaataccatttttaaatgtttcttaaatgataaagatgtgaccaaacaaaagtcctatactctaatgaatgagaccaaattcaacatgcctttgttatggaacatttactgtgacagcagaatcgataatgcagtcatttccagccttgtgagctgacaccttcatgggtttgtggactttgtgactttttcttcctgtccccaaagtgccatatgctaccttaaaaaatattaaagtgaattcaaattacat

SEQ ID NO: 9491 - DNA, 2432 bp, Homo sapiens
ctgtgatttctctcaccgttctctggaaatggcatcagatttaaggataatactccatcatagaaataagccttaataaccagtgttgcctcattcagctcaaacagatttcatagccaaagcaaaaggactggtacggtagtctgtggaaaccaggaagataaaacaacagccacaaaagagaaaatcaagagtgttgcaatctataacagtaatattgattcattcacattcctgtgttaagtcattttatatggaaaggcttacaaatcaatattgtaagcattcattatttaagaatgtacaatgtatttgtgtaatttatagaagtaaaatctagatgttgagacctgtttggtctaatagatgtggatacagtttattttacttgaaattttgttgtctactttgtgtgtttaacgtaaatatatgtcagagtttagaatctgcctgcagttgtgaaaaagaaagcttaagtgatgcagttattggcaagattgcaatgattatggaaaaatagaaagcgaatactcagtttaagccaaggaaaatattgtggatttaatatttgataaaactgattttgtttaacaggaaatttttagcattcagtcatataacatctggttatcaatgcacgtttacacaataaatacttgagtggaggaaagttaaaaagatgagcaatagagtagaaaatatatcttaaactagttgacctagattgtattaatagctacttaagatgtttcaaagataggaagctattgcttggacagagaacttgaaataagtggacccatgtataaaagctttgacttaaacattgatatttcagaatgtgttaaatagattaagacacagtaagttaaccctacatgttataaagatggcgactgttaacaaaggctgtaacagattaagtactattttatatccagaaagtcttctctatgtagagaagtcagagagactagatgctttcactagggaatgtcttcccacccagccatcacaaatgtggacaatcactgcatccacatctgtaggcatatttctatggaagtttaattgacagctatattcattatttattttacaatttcatttttctacacctttgagatttatgaatgcagttttttcttaaaatttattttaacttgacagtatgtttttagttcccccaatttaattaatggaccatgtgcatatatatgggagtgtgcttacatgttaataatttacttgcatacttatgagaatttcacattggaattcataatggtaaaacaacatacatctgccaatatacgttttttctgttggtttaagagaagataactgacagctttacctacttcctacagatgcatctaaacccagatattactgagaagagtgtattgactctgagtgtaagagagtatgtgtttttttgtttttagttctgctctagatcataattgtaaaaaatattaagtcataatctgttacactaaaatttgtcagccaaatgttagatgaaatgtctgcactgtagtctcagatcactgtcacgtatataaattgcttcttcattttaatttgtagaagtactttacagtaggaaacgccagtaaacaacttttatactgttaaaaggcttttttccccttcctaaatgttttaattgtaccatagtgttttgctcactgaagaagcttcttatggaccttgcaactttgttgctagcttgaggttgattattgtggttgtattgttcactgtgtgtagaaatagtatgagtacgatttcaatagactgttcagtttttaatattagccatagcactggttagtatatctcagtagtttcatgaaacgtttcctgtattctaatctattttgaaacattttgtttttttttaattgtgtcttacagtcaagtttgtagattttcataagccacaattttaaaagatgcagtaatcttccaacttccaatatttatccattcgttgtggacccacagattgcatctttaaattcataataagtttccttaactatcttatgtttctagtctttcaagcttagtgataaggtggaagcacaagaaaaatttcagtagaatacagtttttattttgtaaacactaatgtattaaacttgctatacattaaagcaaataatatatatttttatttgaattgtatatgtgaattggaagttataattagttgattttttcattttgttagaggtattttcactgaacaaggtcaattggttacctcagtattacagccaatatagtccaagggaccatttctccccgagtctcttacactttattgtgcgatgtccacgtttttgtgactcttcaagctgttggtgaggtgggacgaatgcacttgcttcctgtggcaataaagattttctgtgcctcac

SEQ ID NO: 9492 - DNA, 2064 bp, Homo sapiens
tggtctcaaatcccaagatttaaatcacttacctatttaattgtggaaaatgattatgaagaacatgtgtatttctatctggtagtgatgtatattttacatttgtcatttcagtgttactggagttttcttcattgtgcacacaggacaaatctgatctctttgggaaaaaatagaaataaaacaatctccctccataatgtgagcaatattacctcgtgcattgtataatttgatgtaaaagaaatagttaccaatgctagcttgtgtggtcttccatgatttatttgtgttttgtgaattttcaatttatggtgatgatctgctgatatgcatttataaagtaagctctgttgtacagtctgtccaaatgggtcaaggttgcctttagaagcaaatagtgtgattttcaagacttcaaatacaaatttagtttaagtgtttgaacaactatatgcacttacggttgtgtgtttaaaatgtctctctcaccccctagcttcatgatgtgactcttaaaaaactataatagttaacaactgttagtaagatagaccaattctgattagactttatcagggaatctgtttaagatatgtttggtgaccaaaacgtatgtgtgaatgtagttataatgcttttgaaaaattttcctttttctatatccccttagtccagcctctcttctcagacatttagctatctgcctctttcctttagctgggaaagtgagagctggcatactatgcagtttttatgttttccatagtaagtcagaaaatgcctcctatttctggcatcagaactttgccatttgtctacagaagacgaaccagagacaaaattactaagtataaattagtcaagtttatcagtctaaaaaacgaagggatgtgcaactgcagctctttaagaagttttttttttttagcttctagggtaaagataaattcagaaatgctctaagctaccaaagttattctgaaagtatgggaactgctacaactaacaaacatttgtttccaagcctgtcattaagagtctgcatcaagagatttgtcctccttgggggaccactggatcattccagatttcttgtgatttttctattgtgtaattcttggtgggctctgtagtttaataataagaaaaaggccatttcattttaaattgtgacctataattctttgtcttgggttggtaattcaggattcatttggaaagtgggtaaaaggggcttcaaaaaacggatagaacaggattttctaggagttacacatacattttatcctgtcatacctcgagataaagtggcatgttagtgaggagttctgatattaagcacacacacacatgcacacaaatggacttctctgaagctgtgtttagtgaaatgagctcaagtacatgaatgttagttgttatcacatacagcaaattcctttttttttctttttctatgagcacactctgctgcttctaaactttacatgcctgatggcaccttactccagcagcctccaggtgctttcattttcacttccagtctaagccagtggctcctgccactgccctcccattacctagatggcacctcctttggtgaaaccacggccaatgttccttagctgcaccaggcccgaagctgttcccatgcttgagcttccatggggaggatgctgagtgagcagtttcctaccccgtggatctagcaagccatggagacaggtagcatttgtaagatgctgcacaggagcagcattatccccaaagatattacagggtagacacgttttaactgaaatcaatcaagataactttattcaaagagcagcccgctttgtgtgactaaaatgaaacaagacagttgaattgtgtgacttgaagattaccaatgattttgaggcttttctataataaaaagaggttctaaccattatttgggaacaaagagagttttcatcttttttcagatcaaaaccattctgtaaaatctttgttgtttaattaaatgtgccgttatttacccctgatgttatttatgactatgtgccgattcctgct

SEQ ID NO: 9493 - DNA, 1356 bp, Homo sapiens
ctggcgcctcctctctactttcatggacttgttcctttgtaatagtgcaatttggttttgttttatttggggttcattgtatgtttgggaatcaccaaaggcttttagagttctttggcaaaataaaaatatttgactaatcaatttttattattggaatagttttaacctttcaaatacatgttctgtcctggagcaggattgtagaaactaacagtgtctattttcatgtctgatgtgttcttcctttagtcatcatgttaggtctgtgtaccctaaatcagcatattactcataaatcattaattaatataagcataggaaatggtcttaaaagatactgcattcattcatcagatatttattccatgcctactctatgctaggcactgtgctagatggtatgaaaacttattaggaacctttttgtttttgagaccattgcattctggctggtttgtgctggtttaacgacatctaagaaggtttagaaatggtgagaccaaaacaataactgttaatgatggacagcattattaggaaccctgtagtatgatatttaacaatataggcttcaagaagggctggtcctaagagggggcagaaatgaatgaccaggttaaatccctctacatgtggtttctgtttgaaaaaaagaaaactgacatttgaacaggacttttaatttgtttaaaactctggtaattacttgtaacagtagaaaatagaagtcattcttattttagaaaaagtgacagaagcagtccagtaagattatatgtttctgtttctggtaaataccatatatgatcctcgaaatgataatatctccagaatattgttttcacccaaatttgagtagatattttaaacacctaacaaagtaaagggctaaaagccattcagatagcagtaaaacattctgtatgatgtgcaataaaacatccaagatcttttttgaaagttttatttataatatacatttttgtatgagaaaggtgattggtacagggtgcctattttagtcatggatcaaaatttgtgtaacttgcagggctttctttctttttcttcaaatttacaagggttcattttggaaactacattttaaactttggaatcaaattgtttcttatttgggaggataatgtatatacattggtattatgttaaataataaaattgttctaatttggtgccatttcctgaatcacaactgtatttttgtatctcaagctattttcatatgttgtgtgtcaatgtatcatctctcagaaaggttttacaatccaaacattatatgttctctgtgtaactgaatttcacttatcttttataaaccagaaacattaattg

SEQ ID NO: 9494 - DNA, 1165 bp, Homo sapiens
cctatgctaaatactcatgtgtagtttttatactacatgccctacttgaacacttattgcacttttatttattgttaactgtgaaaagtacgtcctttattgggtttccttttatattcttggtttgttaagaagaatggtttgtttttatagcaaaactgttaagctgctcgagtctcctgttgaagaatgggaacactgaaaagtaggggcatttatttttagagtaaaaagattattggatagcctttaaaaaacctgcacccatttcatgggtgagttacttaagacatcagctttatagcctctatgagtctatcttctgtataagttttgtaatatttaacataaggcttaatgggagatgttcttttgtcttgtattcagatattgccaactaaagcaataaccatcaaaaaacacaagaacttgtcaatgctagcagtaatttttgagtgtttgtggctctcggaatgattgacttcgttcagtgactactattaagattttccaaggactgactcatcccaaatttttgttgtattaccaaaaaaacagattccttatcagaatttggaatagaatgtgatctctattgcaacaagtaattttaaaagaaagctacatttattttagagtagtgctcctaacatgtattatcaactttgtggattacattggaggaaaatttaaaactggggccttgaatatttattttttgaaactaccatgttaaatactgaagtataatttgggggagttataaagttatgataaacattcatctgattattttaaacaatagttgtggtagataaacatactggaggtgagtcaaattgaattcatatagtaacatgcagtctgaagtcctagttacttaataggtactcagcctggagtgaaaatcctgggtactgactttgagaggagtgagtgtgcatgttgtcaaagtttctgaacacagttcacatagccttattagcaaaagttttaagaaatggctctatcaaagaagcaattgcagctttattcagaaatataaaagtggaatttatgtacatgtcataagtggtacccacttcccctttttactgtagggtggataactcttaggatttaactctttgaatattatctcttgaataaagcatgtgttaatgtt

SEQ ID NO: 9495 - DNA, 2653 bp, Homo sapiens
cctttcccagtaatcactgttgattacgagaatgttaccatgcagctttgcatctgttccttgtactgtatgcacattgctcaaaggaaagtcagtggcttgcactacttacaagtttcatagatttgagcctaaccacaagaggctggtgcttagtactgttttccctgcacgtaggggtcttttaaaaatataaagcttgtgataaagagaggagaatatgggactccatgaaccagtgttgatatgtttgattaagacttttcacaaaataatcatataaaacactagtctctttattagtagaaacttctgtggctatgcagaaatagagatcgaaccaaaaaaaatcatttaaactttaaaaatattttaaatggactttggggagacattttttgtgtgttttaagaatgaattgtagtgctctttaattcagctacatatattcatgtggtgatagggatcaacttgacacaactttgaaactgcataaagtagacataggaactagaggaaagctcaggctgcattagagtatgaatttagcattgggaaaagcccttattcttgaatctagagttactatttttgtatatatttgcatagtgtttaaacctgcagcctaaactactgaaatttgtgattgtatgtttgtgtgagcttcagtttaatgaaagattcataatggttctttgtattattataatacttggtgttggggtgttctttctgttttgttttttactttaattttgttttgattttttttttttttttttggcgggggtaggtgagggtttggagcatgtggtctttttaaaaaattgtaaccctctagaaaatatcaaagaaatgaaccagacgtggtttaaatagttgattttcctattttaacagtaccaactagttaattgggaaatgtaagttctgaatgttcacattgctttaccagtttggcactggaaccaagagcacatgtcgtggctggctacaaggttgtaaagcagaaaatcgaagtttaccatgtctgtaatgtgtacatgaagtgtcaatttagaacagttactaggataaactccattattgccatggctgtcatggtacccaagtgacttggaagatgcatttaaattactcagctgaaatcacttgatcatcttgtgccaagatatgctgttggtgcctgatagggattagtcttttaggtgccctgttctcctaccataattgtgaatgatttgtgagaagtgcaagccatgtttatcctgaatttttacttaataatttgtattactagtcatatgcatgtagctttctgtttacatcctatgccacatggtcttcatttatgccaggtaaactgtatttgaactatgtgcagctagctttgttttaatctgcttggcaaccagtgtagctgctgtaacaatctatcttattgttcaaatatataagagccaaactcttttccattccatctaaaatgttttcatttagtactcttctttcctcctactctatgaacttcaaaacaaaaacaaaactttgagagcagcacatgcatccaggtatttatagattattgccagtgtcttttctgtatgctataagcaagggagcttaggtgttatttctttaatttatgcttgaatctgaaaaattatttctgacttactccatggcctccttataataagtagaagttttatatataattaattttcagcattgggcactgaattaggacagtcctcatctcattgcttggcccttcaagcaacctagctaaaaggtgctgatattttatttagtactgccaacttcaagtgatttagatatctatctatctagatttctgaaccaagatatatttatagttcacttttgggtttttatacccacggtaggattctgcattccagcattaaatctgcttcattttagaacctttataaaagcaatagctggaatatactcccagttttaaaataaatgcctgattgatttaaagcaagtaggttatgctgaagtatataaagaagttttatattctctcaaaaatggtattatctttctttatttgctagattcttacaaatcttttaagagggctgtaacagttgctgctagtattagggttccacatcattctaatgtatagtttcaagtcttaatagacaatctgaattccactacatttcttttggctccaacattccttttagcttgaccagtctaatttaaaatgtgtttgttggaggtcattaacgttacttgtacaatgctgtcactgtgtgacatccatatgaattttggtatatatcaatcaatcaatcaatcacattgcattcaatcaatcagctgtgattgattgattatgcttagaaatactatagtaactagatgcagtgtgaattttttccattaacaaacaaacaagtcagtggcttaaatgtgattatggtcctgcaaggtgattcttgctaaaatatctaaacttttgttttgttttaactgaatcattttttaacttaaaaagctggaaaatatcaaatgctgttttttttttttcattgtcaacagtggtgtgtcattttatgtatgttcctaatgcttatggaactcctccaaaataaagttactcaaagag

SEQ ID NO: 9496 - DNA, 1203 bp, Homo sapiens
aggcaaaaaagaactggtgccacctgcttctgactttagtttgttcacttttaggaagtattttcatgacatgttttcagaagccagaaagcatttgttaaacgcagctttggttataaacctgcaccattgaaaatttgcacatagaatatagactcacttgtacatagaattatttcttcaagtataattcaaaataatatggacattatcatgttctgcattacaataatgggatgtcatcaccattgctagaatactggcatgattcttctgagcagaagttgaaactgtaaatttaaaccttttaattatcaccttacctgaaagaggttagttaagatattcacacagtatgtattatattaaccatatcacacttaagttattaaattcagactatttgtaacttattgttatagggcctgccgtatggcttaggatatttgagtaatcatatatttaaagtaaaaactttgggctgggcacagtggctcacacctgtaatcccagcacttggggaagctgaggtgggcagatcagttgaggtcaggagttctagaccagcctggtcaacatggcgaaaccccatctctactaaaaatacaaaaattagctgggcgtggtggcacacacctgtaatcccagttacttgggaggctgaggcacaagaatcgcttgaacccgggaggcggaggttgcagttagccaagatcgccctgctgcactccagcctgggcaacagagggagactctgtctccaaaaacaaaaacaaaaactgttagtgaaggttccctgggacttttgatattttaaaaattgttcttatgactagtagataaattcattgccataatgaggctagctcccagataaacagtgtattttcttctttttttttttttttttggtgagtggtccagagctttaagctacttttccagtagtttgccactttctccgaggtagtttggctgctctttcagtaatgctaattgtgtgtcaaattttgtctacaacagtaggcaacagatgaagataagttggttgaatgtctccagcactatgcatccctattttctatttattgtgtacactcactttcagtaatgtgtttcaaactggtattttttaaaaaacaaatcaatgtaaggactgaagttgaagtagcaatgtaataaagttaatttgtttattttttg

SEQ ID NO: 9497 - DNA, 188 bp, Homo sapiens
aataagtcactattgaaatggcatcaacatgatgctgcccattccactgaagttctgaaatctttcgtcatgtaaataatttccatatttctcttttataataaactaatgataactaatgacatccagtgtctccaaaattgtttccttgtactgatataaacacttccaaataaaaatatgtaaat

SEQ ID NO: 9498 - DNA, 1362 bp, Homo sapiens
ctctgggcattatcgacacgttcacccatcttatcaaggactctggtttctcattcttgttttctttctttaaatgttttataagttcacaaaatggtgccctatatggggtattggacatagatattttcacaatgtcagtatttcagtgtagttaatttatctaaattaaagcctttagtatcagtgttttaaattctgagacatgtgtcaacacccctgtgtggatgcctgtggaagagtgtgtgtgtgtgtgtgtgtgtgtgtgtgtggcagagagagagaaagagagagagagagagaaattctgttaaaatctattctgtgttgcattattcatttagtgagttattccttgatcattttgggacaattgttttaatctgaaattctaaagagcacttactgtaacctgttgctgtgtttaatttgacttctctgcctttgacatttaatttagtgatcttagcatagcttattattgaaggaagccaaatttatcaaagcatagatgttttggtagattaaatatagattagaaaaattcctaagaatcagagtagaaataaaagtgaatgaaagattaaacagatgatgagaatttctaaaaagattagcaaggtcatttcttcagtcagaaaactttaaaaaatatttattaaataaaatcaatttttaggaagttttctgtagtcatttactaaacatatgatttcactagaaaagctgatcataagtgaatttatacctacctgtgtggtactctgaaacacactgaaagctctgttgcaattaggattttgatgtgacaataatattgttgtataatttcgagatttgtaggaaggtctcattcttccaagctgagagtctagcactcattttctataacagatatggcagcttagaggtgttggctttgtttggatgtaatttagggtactaaatttaaatttaaagatattgttcaaacaatatcatatcatcacattgagctgatataaattctgtgggtccgataatatctttgtgataatttaagagctaaccagttaccacacatctatgatataaccctaacacacacagaaaagcatacatgcaaaaagaaatgactaattagggtacatttataattgcatctaggtaatttttaccctaatgtcttcataaagtacttgagtgtaatgtttgttacctccaacagaactaaatgttctatggttatgaaagaatatatttatttaaagcattgcttttattttgaaaagcttcttaattaatttgattaacaaatatgctaatttggggaaacctagagaagataattgttgaaattttgcaaatataaacatctcctat

SEQ ID NO: 9499 - DNA, 2145 bp, Homo sapiens
agggaatcataggaaaaatgtactgatcatataattaacattatgtactgtatatatcattttagacacatcaatcatgtatccatattatagcttctttgtttagtataggtttttgtatgctgggtttgccttttaaaatgggaaatactttttaagttattcataagctgtatattcaccagtgtggcactcatggtttttaaataagattagtattatctgtttataatgcctgttaataaaagaatttacagtttggtaaaattgctgctaaacaatcattggatcacaatcctcatcagacaaacccatctgtaaaaaaaatgagggagagcttgaggtttcacacaagccatttactaaagaggtagaaatgttttctattggttttaccttgagtttagatatcctaaaaaattctgtagtacgtagttttgtcttacctgttaactttccccaattgagataaaagtgttttaaaattctgtttatagtttttgatatgcatatataattatgtgtatatctaaatacaaatgcaaatgaagcattagtaatacttaaataattttactgtgctacataaagtataacatacttggaaaggatttaccgttctgcaacaacggactggtacatacaggatgatcacaatggtaaggcacataaattattttcccactggaaacctgccctgtccaccccttctcatttcccttaaccttatcttcaaactactttagctgagaagcttttcaccagactgagttagtggtggcttatacctatttatatttgtattaattgcttacagattatacctcatattagcaattacattacactacaagaaaatgtatttgcataggctcttgcttatctttgttttgcaaaattgttctacttagaaaacagtccttaaaatagtttgactcttcctgttagtaatatattaatctttcatttaaccagctaggcagcattaaatagaattgaagaaataccatagtatttattttacaccccctctcccacgaagtttatgtttggattacatgcacgtgtgagattatttgcaataattcataggttccaagggtgttgatgaatagtcatacatttttttggactttgttataattcattgtggtaagaatgattgaaatgcagatttaacaatcttataatctattgaatgccatttttgataaagcactggaggtcttattgccaaactgattgtaatgaggcagtaagggtgaaaacattgtacatgttgtgaagaaagtatttaaatccaacttttgaacagatttaacaaacatgaggaacttttttatttagaaggataattttgaagatgaaaatgtattcatcttaattgttttttcaaatttaagggaataatttataccatcttttcagacaagaatgtacagcaaaaataaggggaacagtagtatactgagagtgtgtgtatgtatagtgtatgcctttccaagcttgccagtctttttggctttgaacactgcccatcagctacagtcattactgttccccaacccacaactatcttttaagaagtcttagttcacagtgaaaggaatgatgactttgaaattatggatttatattaatggcactataaaccaatggtaatggtaatttttaaacttgctaaatattgagaaactaaactactaagttaataaattatatatagcagtgtagctgttctctctagatggtgtctcacaatggatttctgttgcttgactattttcttagtgaatatttatactaaggtagtgactgagatttggtgatctggctgagtattttgaaacacattttgaataatatggcttagtgttaacggggacttaaatatgatttttttttcttactcatttcaccttccctgtactgtatgtttggaattgatcataaaacatctccaaaagaaaataatcagtttgtagtcttgcttttgtattcatgttgataatcttactaattgtgaagttgattcactactatactaggtaagacctaagtgaaacagttcctgtttttccttaatactgttttcagaattttgaaaatgtacttatatatacataaatactactaaaaaattaa

SEQ ID NO: 9500 - DNA, 1202 bp, Homo sapiens
aaactcagttcttaccggcttgtggtaaaaaagcaaatgtgttatctttttattttttattttcaggaaagttatactagtattttcttaagtgtggaatcaaatgagcacataagctgtgtccctgtgaaaagaggtttgtagcctttcaggtgcctgctcctattcatttctctgtgaccattgatcactgtcctttgtgcattgtgtgtctaagatgtcttcaggggaaagatgggtaagagacagtgttgctaatgctgttccttctttgtgcctccttccaaaccacagttatttgcccaaactacctctcgtggctggtttttcattggcctggcctctgcttctcaggctaattagtgactcctttctttgagggtcagggttggaggccccttactggtggttttacagggggatcctactttgttacacatgttgggtttcctgataaaaagagagtattttattaaacccttgaaccagtgtcctagaccagatgatttttgcccatgtgtatccccatttaaattcctacaactaagtctccctgctttgttaatagtccaacagttgggttgtgtaacatcacacttcaaccggtagatggctctaatctcacacatttacttactaaagattgaggattcggaatatttagaataaattagttttctgctttctaattttgcagatctttacatttttattgcttttcttaaaataagggatagctttgcaaccactattgttttaatggaaagcaaaaaacccccccaaacttatcagaatcctcgttctttttcagactactgaaaaatgacatttactctgttaaatgtttaataagtgaataagtaaatgtatcaagttgtttatataataaattataaaactcttgaggcacttggtatgttaaaaattttaaactttagtaacattaggttacaggtatgatttaaaaatttgtaaatagttcaaaagggcaatgttttctttatatttcttatagtcttaattttgttatccatgtgcataatttacctcatgatttcttttggtcaatcaggatctttaatacaatatagaaattgtgtaatagttattataaatgttaatacacaactttcaggtaattttaactgattatttcttttgctcttttaacttaagttattaaagtttaaaagttcgtaagt

SEQ ID NO: 9501 - DNA, 2387 bp, Homo sapiens
gattacaggtatattaatgaacttgttcagtggaagaacataagcacttttgagtgttataaattcagataatgggatgtaattcatagctgcattgtcagttttggggtatggggggaagcacacattcctaaaatgtgagtgtaatgtgcaatagtattttttgcttgtgaatgtgagcagttattaatttggattgagttagaattagttaatttgaaatctaacaaggtggtttgtaataatgctgaggagatataagacccttaaaatgaaagttacaacattgttcttataaaaggtaactaaaattgttactgttggaaataactgattttctgagtaatgttttaaactaatttggtgacattttaacagtaattagctattttgagtggaaatattttcatttctcttcaaacaaaagcaaaggtacgatgctgttttctatcattttggaataactgcaccctgccttttgtgtttttgtaaactccttgactcattctttcatgtgtcaccaagtacttttctcatgagagtcaacatatatttgtttccaaatgtccacaagtgtacaatagtgtaaaggtggtttttaaaaacatagccaggtgtggtggcacgtgcctttagttccagctactcaggaggctaaggcaggaggattgcttgagcccaggctgtgtggttcaccataattgtgtttgtgactagctactgcactccaacctgggcaacatagtgggacttcatctctaaaacaaaacaaaacaaaattacacttaagcactattgtttaatttttaattgtcagtttatcattattttgggtaagacattctggggtttcttgaatcttgtccaaaaaccagttgttttggaaaattgctttaaattgagcatatttatgtatattggataaaaatgtactacagagcaaatttcaaatttttcattatatcagtctttttgaaaggatcaacttggataaaataaatatataatgctctatttgttagagctctattaaaaaggaaacagattccatagatctaagtcaatgtttctccagaagcatgattttgtctgccaaaagaaaatagctctctttggccaaaatgcaaaattacattgctataagaaaagttacaagggaaagtttgaagacacaaatgatttaattttggctcaaaaactgaatttgcttaacactgctacataatttgggtgaagtttccttctgcccgtttttcttgacctagataaatacactttgagaaatccagatctaataaatgtcaaccaacattgacattgtaattgggtgattacaataaaaggtgagcagtttgttgtttattaataattagcttttgcaggtaatgaaatagcagggaagtaacatgctgctttaggactaaaaaaaaaaaaaaaaaaaagacactgaagcttaataccttaatgacccagaagacctagatttataaagccatatagaataaaaatgttaatttcttggtttcttcccagaattatattttaatgactccataaatacattccaaatattcagagattcatgagaaaggattcttaacaaatgtttaaaaataacatttctttttggtgttttaacacttaattttataaactgcagaacagcatctctaaatggctttttttttttttttaaagacaaagtagtattatgttgcttcagtttctttaaatacctcgtttcttttgagaccaaaaattcccatcaaggaaataaatcagcctgattttaacattttacatattacattgcctttaagcactatgattggatggctttttttctatttgtttaataatccttggctaaattcacatgtatctaaaggaaaatagctgagttactgaattctataaggggaagaaaaagcatttattttcacatgattaactgaaatggaaaagtaagacatttagcagaataattcatttaaaaataattttaaaaaatcagacatatttaaaaatctaggttgtctatccagtatgtgaatgcttaattataattgttacatgttgaatgggtattaagagtaagtcaccaggtacacaaaactgccatcatagcaaaatgagacagtgttgaaaagacaaaatattttctggaatgaaaatatattcaagttgatccatattcagatgttttctgtttaatacttcagattggtcctttgtccacatttgtttaaaacttattgtaatgttaatttacacttttggattgtgcctttgtcatgagttgagaaaagtagtcctacaaataatgtgaaagttgttaccaccacagcatgaatgtataattgtattaaaattgatcatccacagaa

SEQ ID NO: 9502 - DNA, 297 bp, Homo sapiens
ttttcttggaaaaatcagcttatggactttagcagttgctgtgaaaaactaaggaagaaaaattttggggtcatttgatcttcacttaatctaagtctgtgaattacttttatattattttgaaatactccttgcagtatattggcatgatacagtaaaagcattttccacagattgttatcaccttctttaaaagaagtcaaaatttaaaaaatacaatagcacgttgttggtgtcatattcaataacatttccaatgctacatataattttatagacataataaagaaggtattg

SEQ ID NO: 9503 - DNA, 4232 bp, Homo sapiens
gctaggaggaaaaagagcagttttcactcagttttggttccctgcccgaggtgctgacccaattcgctgccaaaagagtgtcaatcagaatatacaaatcccgtatggttgtgtcatcctctcttaatcatttttactaattctaataatcagctctagcttgcttcataattttcatggctttgcttgatctgttgatgctttctctcatcaagactttgcagcattttagccaggcagtatttactcattattaggaaaatcaagatgtggctgaagatcagaggctcagttagcaacctgtgttgtagcagtgatgtcagtccattgattgtctttagagagttaatgttacaaaaaagaattcttaataatcagacaaacatgatctgctgaggacacatgcgcttttgtagaatttaacatctggtgtttttctgaaaaaatatatatacatatattgctttatttgaaacaaattaaaatatgctgcatttgacacctggctagtttcttttattgatacccacctagttattgaatgtactgtttagtgctttcaaaaaaaactttagagactagaggttgtggtgcaaagctgtgtacaataaatactgtttctgttgagacaagtactctttcaggaaaatatatatatgccctttcaattagattacacaaatagatggatatgcaccctgatcatcttagacacaccatgtggcagttgggcagttggaaacattggttgcaagtactacaaacctcagctgagcctagcttcaacaataagaatttattggttcagtgagtgaaaagtccagttggtccaatttgatcaggatttcagctcccatctcttttttttttttcttttttctttttctttttttgagacagtcttgctttgtcacccaggtggagtgcaatggcatgatctcggctcactgcaacctccgcctcctgggttcaagccattctcctgcccggccttccgagtagctgggattacaggcatgtgccaccacgccctgctaatttttatattattagtacagacaggatttcaccatgttgtccaggctggtctcaaacccctgacctcaggtgatccacctgctttggcctccgaaactgccggaattacaggcatgagccaccgtacccggccagctcccatctcttaattatcttagctctcctttcctccttgggttgacattgcattcagaattgtggcaaagggccaccatgctcttaagactcaagtctattttccacactgtccagaggagagaagttatcctagtagcttctacacagagcaagtgtctttctcagaaatcccagcaaaggtcttgcataccattgctggtaggcctgtctcttaaaccaatcatgaaaggggggagagaagtgaatgggatgaactaatttgcatagactaattagagcccacccctggagcctgggtgtggccatcttcccagagttcctgagctagatggagaaggggtacttctcagaaagggaaaatggatacccaatggcccaaacccaaaatagccccagttcccctaactttgactacagggcagtccagtttgggtgccgcttccgttgcactcacatgtcctacatatctgttgactactcacaagtgcaaatgcttattctcaactcaacattaacattttttctggcaacccaggttcactggttctcttccacagagcggccctgagcagctgagcctgcaagccacgcaagcatctgtttcttcttttgccaagtacaggaggatgtttgctctctctgtagagagctttctgaggtctctgggtgtacccagagatttaatagaaattcttaacgttaagtcacattccaggaaggaaggaagagttgttcgttcaaataagaaagataaatgttcggcactgtaggccctgtttaccccatctgaggccctgaattcatatattacaagacggaaggattttgcacagttttttatgtagcaagattttgctcaccactgaaaaatgtcagtgtaaatgtgaccgctttaaagatgagtcaagtaattcttggaacagggaaaaaaatgaatttgccaggtcaggagttcacctgcctttgtcagagttgaacccaaccactcttgacctcgactcactcccttagggttaagaaagcccaaacacattcctgagcacagagcaaacactcccatgtcactgaaaagaaacaaaagaatgctaaaaagtgctcagacctgatcacattttttccaatattttttcctttttttttttttttttgagacagggtcttgctctatcacctaggctggagtgcatgtttttgagacagggtcttgctctatcacctaggctggagtgcatgatcatggctcactatagccttgaactcctgggctcaagccatcctcagcctcccaagttgcgaggactacaggtgtgcaccacaacgtcccagctactttttaaatttttagtagaaacgaggtctcactatggtgcccagactggtctcgaactccggagctcaagtgatcttcctgctttggcctcccaaagtgttagaattacaggcatgagccacctcgcctggctggtttttgcctttcttatagaccctgggcatgtaagcatttattagtttgcatttttgaaacagtaatttcaatattttagtgccaatgtcaggccgcttaaacactgtattacatatcttcatctgtctggtggaactattggtgtgatcctagagaactgagtcctattctgccattcatttaaagtgttttaaactctaatctctctacttaatgcacagtagtcagattattctcttaaacatttgcctagtagaggttaaaatagtttaatccttatgaagatggaataacttcaaactcacattgtggcacttagatcttccaccaagacttcatccgtgaaatccacacctccctgttgggttcccaattacattccaaatttacatttcttttgagaatctctgcatactccagctctgtcctgttgatcctattctagaagtgcttaatgcagcaagacacagaaagttaaacgcaaattgctgcaaaattcaccctcagtggaggactagaaacacaacatgtccaatttaaagctcagttcacaagcagttcaattctgctggcatcagaaaaggagattctaattaaacattcttagggaaggacatcaaatgaggttaatgggaaacgttaccagattaaaagcagttttttgacaaagtaacagatttggaaattctgactctctgaaagccttgatttgaacctcaaacttgatttcaccatgagaagtggggatcaagggcctgcgcagttcttttcctaaatcgattcggtgctccccaccccgacgcaggcacaggtccgcaaccagatagggagatgcctgaatttcaggctacctttgacaaagctttcttcctccctccctccctttgcacgctgcatcccacgctgcctgcttaaagcgccctcatgtgtctacagatggtaaaacgtttatttctcaacagacattccagtgatagcatccaatgacctatgtaacggcacccttttttgctgtacgcgttttttgagatggagtctcgctctgtcgcccaggctggagtgcagtggcgcggtctcggctcactgcaagctccgcctcccgggttcacgccattctcctgcctcagcctcccgagtagctgggactacaggcacccgccaccacacctggctaattttttgtatttttagtagatacagggtttcaccgtgttagccaggatggttttgatctcctgacctcgtgatccacccccctcggcctcccaaagtgctgggattacaggggtgagccactgcgcccggccccagtcacttgttcttaagtttcttaagcaaactataaaatagcaaaagaccaaaaaaaaaggaaaaaaagcagttcgcctaatacattgttccagcatttccttgaaagtactgagccatctcaattgctctgattttgtgagaaaattatgaagagttgcaaagtcccagtgattctcttgttacttagctaagaatttgaaatgtaatttaaatactattctttacaatccattataaggattttaaaatctttttgcttctttaataaattctaacaaag

SEQ ID NO: 9504 - DNA, 313 bp, Homo sapiens
agtgaatttatggattctggtttttctgaattttcaaagcataaggaatcaaaacagaaatatagtatcaagaagatgaaatgcttaatgaaaaggttttttttttgtttctttggcctttcatggagtgttgatttgtccattcttaatgtttattaataggtatatgtgcataaaatagctattttgtaacattaaactttttgagtcattttggtcatcatataacttaccttcctgtttatttaagcttctttttacctagtagcctttaaccaaacaataaccttttaaccaaataaaatgtgttaat

SEQ ID NO: 9505 - DNA, 813 bp, Homo sapiens
atcaaatgcaaacttctggagaaaacagagtgcctcttcccagatggcaatctgtcctatctctgtgctggaagatgctagatctgaaagacagagtttccacagttcagaaatcatcccacagtgttgcttttctatggagctgatttaaagtattccatttagatttgatagatatgcttaagcaatctataaatcattttcaatgttataaacactaattggtttcctctagggtgatatccgtcattactctgtctcttcaatccatccagctaaatggaataggtgatgacttgcatgtgactcctacttggcttctatccaccaacagaaattataccatatagtgaaaggcaattttctaaataatttcattactaatatgaactgtgaagttgtcattttttcatttgtccttttctgctatcaccttcctcttgtcagaatgaatatagacactgtatctaagtgggaccaaagaaaaaatagcgaactttcaccaaagttttcatgaaaacccaaaagctttaaaagttactatcaagaaattgaaaggaaacccacagaataggataaaatatttgtaaatcatatatttgataaaagtcttgtaaccagatacataaagagctcttacaactcaataaaaggcaagtaatttaaaaataggcaaaagaattgctggatggtatggtagttctatttttagtttttaccctaactactctgacttgatcatttaacattctgtgtatgtaacaaaatatcacatgcataaatattatgtatcaataaaattttttaatgggc

SEQ ID NO: 9506 - DNA, 1658 bp, Homo sapiens
attttgaaactacaccctcagtaaagcaaacaggagttgtagataaaatgtcatgtctcatgtgtcctggttcttacatcttcctacctccctgtatcaagcatgatataagggctttcatggcaaattttattttaactgtttctatggttgctggaaatgttgggtttagtttctaaaaccatgttttaagtagctacaggagctatagatttgaatctaatgttgcattagtcttttcagttatcttctacctcctgtattttctactgtaataatgtaatttaaggccttccacaatgaacagttcactttattccctgggttttctataaacagttttaaggatatgatttggttaaaaaataatttgttataaaaattctgtttgcaaattaaactggaaaagtatccagagtctcaaaaggcaatgatttgtgagataatatggcatgcccggagccctgctcatcaatgaaaaacccatatgtaataatcgaattcatttaacatgaatcttgagtacgtggaccattgcttgcatgttaactttttgttttgttttgttttgttttgttttgcatttttaactccagatatcctaaagctcaattgtttggtctctggttttcatccttagagaagccatggagaacagacttgaaaagtttaggaaatcataatgtggcagaggtggtgggaagaagaaagttgagctttttccccttgagaaacttctgcatttagtttctatctttccaggcaaaacaaatgggtattcttttcatacaaccattttcaaatgaaccttagaaaagtcttaacatttaaggtattttatgcacagaatacacttagattgataggaaagaactcgtaatggagtttgagtaaagaaaatgactgatgtactaaacccagtaaaaattgttgaaaatgttaaaggtcagcatgttctaattgggaatctagatatagcttagatttcctattggcttagagtatttgctataacaaatgaagtgcaatgacaattatatattcctactcggtcatactggactggcttcgttctcttaatatactcagtaatgactcaagcctctggctattaacataccctagttgccgttttttaattgccatgagccaaatacttcttggtatacaattgatccatttattttaatggctgccttttcattttcatcttttcttgctgctacccatctatgtatgtagtcattggggggaaaatgtagccacattttttatgggaagactttgtgttaaaagtgaacattttgaaggtttttaactggtgaaactagcctggaataatgccaccagagactgagtggaaatcgccccttttgaaggtgccattcttatgagccaaaagtttgtcatttaaaagttcattttgagggaataacatgtaatataatttgaaataaaggtatagtaaccttaaaaagaacattataactgattgttgtgaatggggtgaatttgttaaaatgagtaactttgataaagtttttcatgcacaggcaaaatgtattcactagatttctacgtagtgatctgcttttactttgtaatttgtagttctcaaaagacttttttttaaaaaaataaagtccatacttacactt

SEQ ID NO: 9507 - DNA, 252 bp, Homo sapiens
ttgcagaaacatcaggataacacattctacaaatcagctggatgccaacttaaatttgtaacatgagtcagtgggactggtgtgcttccagagagtgtcttcgagggtatcatcatttccggtttgttaatcttattcaccaaatgttctatcgctcgtaaggtaaaactgtaatataactaccatattaaataacaaatgttcattataaactctaggaaagattgaataaaatctgtttacttaacattc

SEQ ID NO: 9508 - DNA, 126 bp, Homo sapiens
agataatacctggaagcatcatagtggtttcttaactctccaaaataagatttcttctctgtagcctacttgtctggtttatcccttacagaatattagtaagatttaatcaattaaaatatatat

SEQ ID NO: 9509 - DNA, 305 bp, Homo sapiens
gaaaccaaaaggctgggcgtagtggctcacacctgtaatcccagcactttgggaggccaaggagggcagatcacttcaggtcaggagttcgagaccagcctggccaacatggtaaacgctgtccctagtaaaaatacaaaaattagctgggtgtgggtgtgggtacctgtattcccagttacttgggaggctgaggtgggaggatcttttgaacccaggagttcagggtcatagcatgctgtgattgtgcctacgaatagccactgcataccaacctgggcaatatagcaagatcccatctcttt

SEQ ID NO: 9510 - DNA, 3919 bp, Homo sapiens
cagagagtttttgttggttcttagacctcaaacgaatcattggctataacctccagcctcctgcccagcacaggaatcggtggtctccacctgtcattctagaaacaggaaacaccgtgttttctgacacagtcaattctgattttctttttcttttgcaagtctaaatgttagaaaactttcttttttttggagatagtctcattctgtcacccagactggagtgcaggggggcaatcacggctcactgtagtctcgacctcccaggctcaagctgtcctcccgcctcagcttcccaagtagctgggaccacaggtgtgtaccaccgtgcccggattttttttattctttattttttgtagagatggagggatctcactttgttgcacaggctggtttcaaactcctaggcccaagtgatcctcccacctctgtccccaaaatactgggattataggcacgagccaccacacctggccagaaaactttcattattgaagacttggattgtagccttggttttggatgtctattctgaagacagagtaattggctttggtttgtgcaggtactttttctttgagacagagtcactccgtcacctgggctggagtgcagtggtgggatcactgttcactgcagccttgacctcccaggttcaagcgatcctcccacctcagcctcccaagtagctgagactacaggtgtgtgtccatgcacagctaactttttattttttttgtggagatggggtttcactatgttgcctaagctggtctcaaactcctgggctcaagcgatcctcccacctcagcttctcaaagttctgggactacaggcatgaaatactgtgcctggcctggggaccaggtgcattttaaggttccttggtgttcaaaaaccacgttcttagcctagattgagcttagattgcctctctagacaactaccccttagttataattctgtgtcccctctgcatgcccttaaacattggacagtgaggtcacagtccacccaccctctctctgatctcccccttcctaagacttctcttttgcacatctagtgaggtgaaaatttggtctatgccaggcccatttcctgcttttgtgtaaggaaggtgctcacataggaagtttttatttggttagagacaggtttccctgtaggaagatgatggctcatttacactcagctgctctgcaagcagaaactttacaacctgatgtcatattccattttggactgggtgcggtgactcatgcctgtaatcccagtactctgggaagccaaggcaggcagatcacttgaggtcaggagttcgagaccagcctggccaatacggcaaaacctcatcattactaaaaacacaaaaattagccaggtgtggcggcgagcacctgtaatcccagctactcgggaggctgagacaggagaatctcttgaatccaggaggcagaggctgtggtgagccaagatgacacaactgcactccagcttgggcaacagggcgagaccttgtttaaaaaaaaaattcaatattggggttggaacatttcagttgccattgacagaacacccaattcaaattgactgaagcaaagaagggaatttattgcctctttcacattgaaacccaggagtggataacactggcttcaggcaaagcttgaatcaggactcaatctacaggccagcacctttctcttggccggatgtcctcagggctggcagatgcagtagactgcagtggacagtccccaccttgttactgctactacactttgctcctctggcccaaggcatgaggagagaggctgtgtcagaaactgaagctgttctcaggatcactgggctcttcttggcagaggggatgtctggcttgcctgaagggagtggctctgtaaggacgccttgatgctttcttcattaagattttgagcatttttacgtacttgagcttttttttttttttttttcaatttctagaggaactttttctctgttaattcctggaactgtattttgaatccttaaaggtgagccctcatagggagatccaaagtcctgtggttaacgccttcatttatagatgaggcagctgaggcctggggatgtgaacaacctgctcacagtcctcatttactggatttgacttcagccaggtgaactggaatgccttggggcgtggaagggcattaggagtgtttcatttgatatgtgaatgctcataaaaaaatgtcaaggaatgaagaacaacaactctcagtggtgcctgcatttataattatttatgtgaaagtcaaattcatgtacagtaaatttgttataagaatattcacaagaacactgttctgatatctctgattgtcatgtggatttgaatgtagcttgacagagggaatgtctaatctatattgacagggcaggaacaccgtcatcttagacaaacaccgccactttaagttccagttccctttctagcctcatgcatttcaaggaaatcacttcttttctaacagcgagcagccagaaagagaagagagtaaaatacagataagacagctctggcatagagggaggtgggggggtgggggaagtctcttgggtaactgccaaactttgccttcatacaatgggttccaggaaaacaatgagccttaataagcacattcctttcccttcaggtgcactaagtggggaagctaaaagcagactggaggggggtggggtgtacctacagctgcagaaatattgtatgggaacggacacacaactctccctcccagataagcacagcaaagagacatagaagcaatccaagcctctgataaactctcccaccctaaatccttaaaaactcttagtctgtaagtgagtgggctctgacctaactcggccagaagcccctttcaaatttgttttctctaaaataaacctgtccttggctgtcaagccacctttcatgtttctttcctctttctttaattcttacacatgtgtcaggatgatctcccaaaaccgtgttcataacagtcagggccaaaagctagtggtcacagtccttgtccagttggcagaactgacatgtgaaggcaagtgaaggatggtgagatactgaggaaagagcaaaggatctggagatcaaagccctgcatttccattttgtcctgattcctttgctcagagacactaactaaatcaagctagcttttttcagccttgtctgtaaagtagagaaaacattagctgttgggaagacgaaaaagaatgtgtcctatgtgtgcatctatttaaatctaactgtgctgaggtgcatataaatgcctttaggtggtagggtcttccggttgtaactgcaacagaaatagcaggacttaagttcctttgtgcgtaattccagctgactttattagcggcaactcagcactagcattacccctgacatactctgagtaagatctaattcttccctcactggttcgtgatgtctaccgcagcagaaggccagctcttgactctgagttcagttggacaaaatgctgttgataaaacctcctgtcaggcctctgagcccaagctaagccatcatatcccttgtgacctgcacatatatatccagatggcctgaagtaactgaagaatcacaaaagaagtgaaaatggcctgttcctgccttaactgatgacattaccttgtgaaattccttctcctggctcatcctggctcaaaagctcccccagtgagcaccttgtgacccccatccctgccagccagagaacaaccccctttgactgtaattttccactacttacccaaatcctataaaacggccccacccctatctcccttcactgactttcttttcggactcagcccacctgcacccaggtgattaaaaagctttattgctcac

SEQ ID NO: 9511 - DNA, 304 bp, Homo sapiens
ttctttccagaggcttccttctgcctgccttccagccacatcgcctgagattgacaacgccctacagcaagacggaaacctccctttacagcaccaccttgcgattctgcagccacaaagttgagacttctgaacgtggcactcttctgttcccttactgtttcacgtgtacctgtgtcatctttcttgtttcatcgtaaacatacttctaaaattcccattttctttatttagaaatagaactacaagcggatggttaaacaatttaaacaaatggtccatggggaaaagtgaatttcacact

SEQ ID NO: 9512 - DNA, 1117 bp, Homo sapiens
tggtgctattttgtttgttttgttttgttttgtttttttgagacagaatctcgctctgtcgcccaggctggagtgcagtggcgtgatctcggctcaccgcaagctccgcctcccgggttcaggccattctcctgcctcagcctcccgagtagctgggactacaggggcccgccaccacacctggctaattttttaaaaatatttttagtagagacagggtttcactgtgttagccagggtggtcttgatctcctgacctcgtgatccacccacctcggcctcccaaagtgctgggattacaggcgtgagccaccgcgcctggccgatggtactatttagatataacactatgtttatttactaattttctagattttctactttattaattgttttgcacttttttataagagctaaagttaaataggatattaacaacaataacactgtctcctttctcttatgcttaaggctttgggaatgtttttagctggtggcaataaataccagacacgtacaaaatccagctatgaatatagagggcttatgattcagattgttatctatcaactataagcccactgttaatattctattaactttaattctctttcaaagctaaattccacactaccacattaaaaaaattagaaagtagccacgtatggtggctcatgtctataatcccagcactttgggaggttgaggtgggaggattgcttgaacccaagaggtcaaggctgcagtgagccatgttcacaccgctgcactcaagcttgggtgacagaacaagaccccgtctcaaaaaaaattttttttttaataaaacaaaatttgtttgaaatcttttaaaaattcaaatgatttttacaagttttaaataagctctccccaaacttgctttatgccttcttattgcttttatgatatatatatgcttggctaactatatttgctttttgctaacaatgctctggggtctttttatgcatttgcatttgctctttcatctctgcttggattattttaaatcattaggaattaagttatctttaaaatttaagtatcttttttcaaaaacattttttaatagaataaaatataatttgatcttatt

SEQ ID NO: 9513 - DNA, 83 bp, Homo sapiens
ggtttgagaatgtttttagctggtggcaataaatattagaagcctgcagaatccagctacgaatatagagggttttgctcttg

SEQ ID NO: 9514 - DNA, 676 bp, Homo sapiens
ggctgccaaatcattttatgtcctatatacttgacactttctccttgctgctttttcttctgtatttctaggtacaaataccagaattatacttgaaaatacagttggtgcactggagaatctattatttaaaaccactctgttcaaaggggcaccagtttgtagtccctctgtttcgcacagagtactatgacaaggaaacatcagaattactaatctagctagtgtcatttattctggaatttttttctaagctgtgactaactctttttatctctcaatataatttttgagccagttaatttttttcagtattttgctgtcccttgggaatgggccctcagaggacagtgcttccaagtacatcttctcccagattctctggcctttttaatgagctattgttaaaccaacaggctagtttatcttacatcagacccttttctggtagagggaaaatgtttgtgctttccctttttcttctgttaatacttatggtaacacctaactgagcctcactcacattaaatgattcacttgaaatatatacagaaattgtaatttgcttttttttaaacaagggggctaaagtaacactttcctacttatgtaaattatagatcctaaattcacgcaccccgtgggagctcaataaagatttactgaattgagttta

SEQ ID NO: 9515 - DNA, 240 bp, Homo sapiens
ggctgtatttctgcagtttcggttttcatttgcttcagcttactaagaagcttcaaatctaactccatactgaacaaggggctttatgtcctcacctatgacctggaatagtttaaatatggtgttcaaggcaatagtacataatagtggaagaaaattcagtggaaggttattgctattgtcatttgcatagaatttaagtgattgatttaaaaaaactggacataaactaagtctaag

SEQ ID NO: 9516 - DNA, 2065 bp, Homo sapiens
gccccggcccctccccacctttcccaccccagccctcttgcaagaggagaggcacggtagggaaaagaactgctgggtgggggcctgtttctgtaactttctccccctctactgagaagtgacctggaagtgagaagttctttgcagatttggggcgaggggtgatttggaaaagaagacctgggtggaaagcggtttggatgaaaagatttcaggcaaagacttgcaggaagatgatgataacggcgatgtgaatcgtcaaaggtacgggccagcttgtgcctaatagaaggttgagaccagcagagactgctgtgagtttctcccggctccgaggctgaacggggactgtgagcgatccccctgctgcagggcgagtggcctgtccagacccctgtgaggccccgggaaaggtacagccctgtctgcggtggctgctttgttggaaagagggagggcctcctgcggtgtgcttgtcaagcagtggtcaaaccataatctcttttcactggggccaaactggagcccagatgggttaatttccagggtcagacattacggtctctcctcccctgccccctcccgcctgtttttcctcccgtactgctttcaggtcttgtaaaataagcatttggaagtcttgggaggcctgcctgctagaatcctaatgtgaggatgcaaaagaaatgatgataacattttgagataaggccaaggagacgtggagtaggtatttttgctactttttcattttctggggaaggcaggaggcagaaagacgggtgttttatttggtctaataccctgaaaagaagtgatgacttgttgcttttcaaaacaggaatgcatttttccccttgtctttgttgtaagagacaaaagaggaaacaaaagtgtctccctgtggaaaggcataactgtgacgaaagcaacttttataggcaaagcagcgcaaatctgaggtttcccgttggttgttaatttggttgagataaacattcctttttaaggaaaagtgaagagcagtgtgctgtcacacaccgttaagccagaggttctgacttcgctaaaggaaatgtaagaggttttgttgtctgttttaaataaatttaattcggaacacatgatccaacagactatgttaaaatattcagggaaatctctcccttcatttactttttcttgctataagcctatatttaggtttcttttctatttttttctcccatttggatcctttgaggtaaaaaaacataatgtcttcagcctcataataaaggaaagttaattaaaaaaaaaaagcaaagagccattttgtcctgttttcttggttccatcaatctgtttattaaacatcatccatatgctgaccctgtctctgtgtggttgggttgggaggcgatcagcagataccatagtgaacgaagaggaaggtttgaaccatgggccccatctttaaagaaagtcattaaaagaaggtaaacttcaaagtgattctggagttctttgaaatgtgctggaagacttaaatttattaatcttaaatcatgtactttttttctgtaatagaactcggattcttttgcatgatggggtaaagcttagcagagaatcatgggagctaacctttatcccacctttgacactaccctccaatcttgcaacactatcctgtttctcagaacagtttttaaatgccaatcatagagggtactgtaaagtgtacaagttactttatatatgtaatgttcacttgagtggaactgctttttacattaaagttaaaatcgatcttgtgtttcttcaaccttcaaaactatctcatctgtcagatttttaaaactccaacacaggttttggcatcttttgtgctgtatcttttaagtgcatgtgaaatttgtaaaatagagataagtacagtatgtatattttgtaaatctcccatttttgtaagaaaatatatattgtatttatacatttttactttggatttttgttttgttggctttaaaggtctaccccactttatcacatgtacagatcacaaataaatttttttaaatac

SEQ ID NO: 9517 - DNA, 223 bp, Homo sapiens
cagaaaggaattacgattatatcacccggacacacatcatgcttaagattcaactgggagcataccagggatgctctctaacgtaatcaagggaaggttcagtaagacaaagtgatttatcatctataacttcaaacctatttgtcttgacatcaactctgttaaccttatgtcatcatttcttagagtctttgatatacaaataaaattttctttgtatttt

SEQ ID NO: 9518 - DNA, 7804 bp, Homo sapiens
aatgttttcaagcctatggagtgaaattattttttgcatcatttaaacatgcagaagatgtttaaaaataaaaaaaaaactgctttatcctcctgtcagcaccccctcccacccctgcaacaaagacttgctttaaatagatttcagctatgcagaaaaatttagcttatgcttccatatttttaaattttgttttttaagttttgcacttttgtttagtctcgctaaagttatatttgtctgttatgaccacagagttatatgtgtgtgtatcaaaagtggtctcaaaatatttttttaagaaaaaaagcaaaaacaatgtattgctgataatcagtttggaccagtttcttaaggtcattaaaacagaagcaaattaagacaggtttgactgcagtggtgtctggtatccatgttttatttctgggcacaagctagtttttatgttgatacgttcctgaacatattatcttgttggacatcttttctcttgtgttttgtttgaatgtgcaatagtttataggccacaaataagctttcttgtaagctctcttcctaacagggcacatattcttccataatataaacacttttctgccccatctcccatacttttgaaggtcagttctatgacagtgaattttgcacaggagaagcagctacctgatttcttactttctctctccttatcatggagaatacagaaacattgtctgaaagggctctaaagaaggaactaccaaaacctgacttgaaatgccatttcttttaaccttccaaatcctaaatgtttccttcaaggcatcttaataaacttatttgcttctggttttgggagttcataagagagaatagaacaaaatacaggacatcaaatattagccatttcccattttattttatttttctatgtaggttcatgttccatgttcatttatttaagaaatacatttttattggtaagcttatagagctacacttatggaatttttaagtaggtaaataaatggttaagacaaaatagtgttatagccttcattctctgaataggccatctttgactcataaaattacccttactgtttattataacttcagaagtaatttatagttctgaacctatagtatcttttaccctgttcccaagcaaagactggtgactttatctgaaaatgattcctcttcccatgacctaaaacactgtgaggaaaaatcattcaagtggcatgccaagtccctatgaaggaagggctgctatcaaacctaccttttttgagcaaactgagactaaacttctctcttttcaaaattgtgttatcttccttaatcctattttcataatttttccttttgccagtttttcacattatctttgatatgtgagcaacatttattatttacattagagtataccttttagtaataaaatgacttgaaatcatattatttttaaaagccctttgcttctttcattacttataatctcctctaaaacaacctctgcatgttttttttaaataaagcactttctgtcaaataatggacttttttctaaacagaaattattttctattaatttgcaaactgatgatttcacttttttttacttttttttcgattatcagagtacttagtaaatgttatatagtttagttctaagatagttccagggattaaaaggttaagaggaaaacacaaatcaccaaatttctgatttatgtttttatctcctgaacaatattttctcactcatattcctctatcttatcacttagctaaagacagcctaaatttcccaattttctgtccaaaatatttgtgatttacttgtatataagccttctcatttgccatgtgctgtgatcttacaagttagatgttactatacctaccatttattcagctggattgctgaacacagttctggattcatagaattaagaatatcttgttagtgcccaggatttccacgttttgtgttttattggcccttttctttattcagccccttaatctattttcagtcttctggcacgtaatttttttcacagttattattcttctattaacaaattatttttatctttcctagtacattttcacttagttctcttgcccttaaatatctttcacatgcattttaggatattcttttcaaatatttgtaggacaactttgaatcaaaataaattatgttccttctccaatttgaagcattgaggataaatgaccatttgaggtctaactgatcttttcctgccagaagagttatcttacgttctgctatatttgtatttgggccagttgattgtaggttgtccaacattttttaatattgggaaaattatgataaaatgctttaaaaattaatatgccagattaaaataactgaatagtttactatttcattcaagcatgtttaaaacaaataatttcctttcaccagtttttcttagtaaactcctgaaaaagtaggaaaggtggaaagtatatatcatttttataaattttaaattgtacatcagacttttaaaatctgtaatatacaagcaagcaaaattattttaaatgacttaattgtatgctaatactcatctgataataaatgcttcttaaagttgacatttaactgctatcacaaagttttatatgtagaaaagtggggtccttttgaataaaagatcattcaactaaaaatattaaaatttatttcactggatggtaatgtaaccttaaaagcatcataataggtaaagtctaatattagttcccttaacaaaatcctaactgtataccagaattaggtcactgaaagaacttgatttgaattacgtttagacaaaaatgatttaattgtaaattcttaaaactttctaaatgcataattggcaaaaaaaaaaacccactgttaccagtgtaggaagttacaagaaggcacatactgaatgctgaagtatacatatgctatttctcttaaacctcagagcaaccatatgagcattgtaattaatattcccattttacagatgaggaaactgaagctaagagaagctaagtaatatgcccaaggtccacatctagtaacagacaaagctgggatttcagtctatgtctgcctctctccacatctctttcatccataccacactgcctacatgccatatgacaggatgtgtaatgggctaacgtttatttaaaaagttcaggccaggtgcagtggcttatgcctataatccccgcactttgggaggccgagccgggtggatcatgaggtcagacgttcaacaccagcctggccaagatggtgaaaccccgtctctattaaaaatattttttaaaaattaactgagcgtggtggtgggcgcctgtagtcccagctactcaggaggctaaggcaggagaatctcttgaacccgagaggtggaggttgcagtgagctgagatcgcgccactgcactgcagcctaggcgacagagcaagactgcctcaaaaaaaaaacataaaaattcagtcactatactctggcacaattttcatttgtatatgagccaaaccacataccttaatgatttgggaagttaggcaaatatgagatatgtagacatatctatgctgattgttgcttgagaaataattactaattctagacaaaactcaatcctgtatcttccatcatgaatcttaaaatcatttcacttcactcctaacatttcttacattgcagaactaatggtaaagtaaattttacggaaaaagttaagatagctttgggaacagagacctttccctaaattgattccatagcagatttgggggaattaacaaagaatttcagtctcatcaatcctttgaatccatcttcaaaacttctgcttttaataactttagaaaatttactaatctatagaactaattgagtaggatataggaaggatacaaggatataatgtcctttttataaaagtttagtatagcttctttacatgtatccacttgttccagaaaatgtgcattggttctgaatgtgaaaatatttaaagagagaaaggaacactcaagtaagtgtgggcttcagtgggaattatcacaaaacattggcaagtatttttatttaaattattttcaaatttgacttctacagccaagtggaattggtaggctgtagctgttacactgaaatttctagtctttgtaagtgcctcctgaaagtcatttaaaatggaaaaatatttcaatgagcttttccttttttcatatttatggacatgaatattttattggagatcattaactcctagaatttgagattatatttccatacaacattttataaagttatgttgaacttactacctgttatgtgcaggttattatgtaactattcacagattgcttcatatattgctttatcttcccatctaacttcttaaagttaaaatccggacacacatgttgattatctagaccagtcattctggaaattgtaacactcccacataaaccccaggagactttttcagaatgcaatgtttctaaatgtactgttactggcagtttactctccagcatataaggttgcattttaacttttagattatgaactgtgcaaactttacccaaaactatcttgcatgattccctcctaaatatattccttgattaagtaaatctggcaaatcactgtttgagctagttacataaaatttgttatcaagagaaggcttttctacaagtttccagattaacataaagaaaagagggaatcacagggcatttaagtgcaccttcccattactttccttaaatcacctcatagttaggctgggcgcggtggctcacgcctgtaatcccagcactttgggaggccgagacggtggatcacgaggtcaggggactgagatcatcctggctaacacgatgaaacctcatctctactaaaaatacaaataattagccaggcatggtggcacgcgcctgtagtcccagctactcgggaggcagagacaggagaatcgtttgcacccgggaggcggaggttgttgcagtgagccgagatcgcgccaatgcactccagcctgggctacagagtgagactccatctcaaaaaaaaacaaaaaaaatcacctcatagtttatgtctgacttactccaaacctcagttatctgatttgtagtctgtgtcaggaaagttttcttcatatctattctgtctccctcctctttgattttaaatttttttcttttacccagtaggacaaaaaagagcagttggtcatcatccccaatattcttagtcttcagtatgcttcaggcctctcaatgaacacttaagtctcaattcttcagacaaaattgcttaagctcttctcctcagtcctattttaatgactttatatttaagaatatagaattatattttcttttatattcaaattcattactccagttaagtaatagtttgatagtttgatagaatcgagagttaagatgtttctatttgaaagtggattcaaccatcagaccaccagcaaatcggcacttaatttttgtgttatctaacattttctattgtggaattttatgattttatattctcattagttataactaaaaagccatgcacacagaattgtatatcattttgccattaaaattttttaacatattgcagcaagcttagttttatgattgagccacaaccttttacatattttttgtatgaaatattaaacactaaatgcaagattaactttcaaaagcaaaccctacattaatcaggtattatctatggacatttttgtagaccacttttgaaatacttattattttgcaacatagactggactatacaactttcatttaacttttaggtgactgatttaagttgagtgtgcatatagagaaaaacctagaaatttatctcatggcagatacatttgaaagtacttcagaagaatttatgctgtatattaaaactaggctcaaaataaatctatcgtatctttaaaagtccaattctgttattactgtgatgtttgtagtgttactattaaacattgtgaacatacacatttttaaaacaacttgaaacccattttaaaatctgggtaagagagaaggaatcttcagaacaaaatcacatcattagggtgtccagtttatgattgaatttttaagcaaattactgtatttgaaactacaacttgatttggttttcagttttaaaaggcaacatgtgggttttatccattttatttatacctttagatttcagaaacatcttcatgttttagatgcattctacagacatcatgttacttaaaaactcagggcccctttcatccctttgtacactgaaaaagttcaattgttagcaagtaagcaattagatccagttgaatatttaaagtgtttgttgcacagttcatttaatgtttcatcttatttgactttttcacatagatataatatcagatttcattaattataaaaagttgcccagttctgtaattactgaacagagggaatgactcaactaattggctacatgttgcaacaaatttaggcctttagagttgaagcactgacttaaaacgacttacatttctgttctttggtcaaatgaccatacatgatatgggacaaattgtttcattttgtttgttttttaataagggaacttggtaaagtagttcctgtcagataggattttctcaagagacaatttaacgttataaagccttctaaaagtgaactaaatattttataactttagtaatagcttggatggttttgagaaaataacctgtatttatcacattgtcaaacagaatttttctttgaatcagacaagttcaagctctaaattgatgtgctatatacttaaaatcctaggaagttatctgtaaccagtctcttgtctcaggctcttcaccttgttaccaatcctcgtaagtatgtaaaggaaacatatttttaaagaagcttaacagtaagaaaaaattactaaaagatgcaattcaaagataggtcccagtttaacactgaattgcttgacttctgtggcttttctttttctggccacatttatttatttaagcaatttttgtatgccttgttatttcatttccatagagattatattgtatcagtgtttatgtaagctggaatcatcctcagttttttgctgataatttttcaaataaagatacatggataattgtaaaatacactaactcttagggtgttgtagtagctgaaacatggagatgcgtagctgtcatgctttttctgaatggacaggagaaacataagctacggagtattcacttctgaggatgcttttccggaaaaagaaaggctagaaaatactcgcacttcctcagaaccctctttcttgttaacgggtatcttttgttggtgtgttttgctcttacattacagatagactatcatatatgactttatgaataatttcagttattttgcttttgtataagctgtctgaagccttgctatgctgtataagttgtgtttgatggatcagtgtgagtataaaataaagcaaatcacttttcttttgtattatctatggatgccactatgaaagctgacattaagccactaaagagttttctatgaataagtgtaagtaaatgctttgatatatataaacctaaataaaaagattgtattgatacagagacattggagaaggagattttaaggcagttctttaggtttaaaaaggcttgctgtaaaatggtgcgttattccgtttattaaagatcatattaatgacaat

SEQ ID NO: 9519 - DNA, 3992 bp, Homo sapiens
gtcacagtgcaacgtggctgttgttctgggaaattgggaacctcctcagatcactggattctgatggcatcgtgcgcttctggtcggctgtgatgtgctccagctttccagtgacatgtgacggcgaggcttctggaagaaaggatcccccgtgacggctctgccccacttgtgaacgccaaccctcagtgcttagcctgctttttatcaaagcactgattgaaacaagaaaggtctcattctttacctttggagagacaatatcacgtttttgttttcgaattagacttctttaaaacacacacacacacacacacacacacacacacacacacacacacacccctgatccttgccaacatgattcctaaagggagatgtgactgatgctgcaagaaccatcttttctatgaaaatgactattttataatataccaatgttacattttctgaaacgtagcaaacaggatattcaaaagattctttggtggcctctgtttcttgttccctttctagatgtgtgcttttctcagctgttttcagctttgggaccaaagggattgttgacgttttcccagcaatcttaatctcatgactatgttcttctcccaaacaaggattgataggtaaatgcattgaacaagtatatataaaaagagattaaaaagcaatattcgtacattatgtgatttatgtttttgatgtcaaaagtttgtgctttgggtgaaatatttgtataactgctgttttcttcactactcctgtacacatttcaccatgtggtcagaaaagttgtagtctgaagacaagtgctttaatatgttctcacccatattggaacttgatttaaaagtcagtgagccaaaaggaagctatccagcgttgattgctagctaagagtaaggagcccctttggttttctgtgatatatatatatatcacacgctctccctcctttaccacaggtgtcattctacctttaatcatcactgtatcatagccccaaagagatcctgaaatggctgtgcatggatttcctcctttgcccttgtgatgttgttgtcttgtggatttggttgggctagtagtttgccaggagtgtaatccagtggatagtgatccaaactgtagccgcagaatcctgtgactgacatttttctttgtggtggtggttggccctgagatttgttgcctacagattttgctaatttacccccctaacgcttcacatagtggggaaaatacacaagaagaacttgagtatgaacgataagcacctttgaaaactccatacagttttggattagggctcatcctaatataaatcactgccagtatcacatgacatcagtatgtgatttctgggtatgtggtagtgagattaaggagcagcttttttttttttttttttttgagacggagtttcactcttgttgcccaggctggagtgcaatggcgcaatctcggctcactgcgacctctgtctcccaggttcaagcagttctcctgcctcagcctcccaagtagctgggattacaggcatgcaccaccacacccagctaattttgtatttttagtatatatggggtttcaccatgttggtcaggctgttcttgaactcctggcctcaggtgatctgctcgtcttggcctcccaaagtgctgggattacaggtgtgagccaccacgcccatccaggagcagctctttttttaaaagtgagtttcagcaaacagtattgaataaaagcatccttttcatatcttcatatactactttatgatgcaataatttactgttcctatacatattataaggtagaaaaaagtttttaaatccttataaagaggatgcagtttagaaggttaatatgtcagcttacccagacatattctatcaaggaaaacctagtggtagcaataaatctttggaaaggacttcttatactcatgtacctttaaaacatctaagcaatttaaaataatccctgttgagtttaaattcgagatgcatttaggtaaattggataaattcaacatttgaataaatccgtcaggttttagatggtgggattgatgaactttggtactttctcaatccaaaactaatttatttggaactagtacgttatggcttctcagtcatgaaaagctcagttatttggggtctacattttctcactgagagccttgatattttgccttctttgttatgcattataacttgactgtatcaccactgagtatctgctgtatcagaagttcagaagaaaaggtaaaactgaaatcagaatgggggtagaggaagttaaaaacaagttatttaaaaagaactcttggtttttggatgacttgaattctgttaaatctgtgttcttggccttgcacttccgttcctcttccatctctatccctgctagtcacaatggcattttagaactagaatgccactctgtagaggttttcccttttgctctgttgtgcctatttgtctaattcatatctttctgtggagtttcatatgtccttaatctaaagtaacttaaaattggaatggaagaacaagtttcagaattatttacagtcttatacatagaacttctagtgtaatgtttggttgtaaggagaatgtgaatttgcaggtaaatgaattgtatggcaaccagacagatccctggggtttgggagaaatagagcttgagatttgaaaaaaaggtacaaggtacaaaacaactctaactgccagtgccaaagggctaatttttaagcatgtaagctttaccacagtcttgaaaaaaatattaaccataggttcattcagctgttttatttaacccttagttccctggtggttgattttttttttaaatgggtctccagctttccagtgaaatgtgacactctcaatagaatgcataatgttggtttctaaagttacactccataattattgttattctgtagaaaactgtacagaaggtaaatagaatagcttcaatgggaatataatttaaatttttttaattttataaaaatttatttccattgcattaaaagaaatgggtagcatgtgtctttcagagaaaggagctatttggttattcactttgtcaatcttaggtttttttaaatctttaaacaatttcttctttgtgatgataaaaataatataaatttactgtttctgatcatgactgagtctattacttgtcatggcttttgtacgcaactgtgttttaaaaataccggttttgcctctttggttacatgtggtgagcatggatgtcaagattatttttcaactagattattcaatttgttttatatttcttatacttaatacttatgactacagtccaaatcagtcttttagaaggtgctcttgctaactgtggaatatttgacgacatgaaagtcctttttctttgctttcagtggttggctttcactgaaagaaagtgtaaaaaaagtcagaatttatagctttcactatgtccaagactaggactgggttataaagattttcttttgtgaaggaaaataaaagaaaatttgccactactgcatttactttactattgtaaacttaagattcattccttagtctttggaattttgatgtctcaaaaccagatgagtggaagtgctgaatttgcaaaataaagctaagaatgcttaactctgcactttaagttctactctgaccaaattgaagatgagcagagcagccctgaacagcattttgtttatacagtcttgtttaagaatagaatttttttaactcttcattttttgtctctgtggaagctgtgtaactctttttaaaatgcaatttaaaacattttgttattctaacaattctctcaaaaaacagcatttccaatggtaatcggtattgttacgctgtacttatgtattccctgtacctgaacacttgttgctgcctcacaagaaaatagaacttttatgttaaaaataaagtctgttcttcttg

SEQ ID NO: 9520 - DNA, 1404 bp, Homo sapiens
attattgaagcttttcagaatttacaactctggtgacttctgatgtcttagaaaggaaggtgaatatagtcaaagcgtggcattgagataattggactgaagaccagtttgatgagaagcttttatttaaaactgatatatttgttgccagttccatatttttaccttccttaagagatgttttactcttcttattttgtataatttttatgctctttgattatctaataaggccagtatttcaaaagctgttctgaatttatccacagtaatatagtctgaacacaaatagtttacttaacttatccttggaaatattcaattttggttattacaaaacagaaaagaacaacagcaacaaaaacattgtgtgaatgtatgtttgtatgtgtgtatgtatatcatgaattttttttttaagttctgaaaaagaacttgttctctccttaaagttgtgaagaaattgttaattgccagacaggtaagaaaatgtttataatctatctcattaagaaagatgaagtattagattttacatcataacacaaagtccagcagctacatctgtggaaactgtgcagttgcattttagcctcttcccttccaatttttgtacttttaactacaaaccagtagtatactaatggttatctaatagaaatttaaagtgtcttggtaagtactgagaatttttacttgaattaatcagataagcaacagaaatcaacatatgtagcatggatttgtgctatattggaagtaaaacactataggcagaaagatgtagaaattaagagaattgaaaaagaataatagaattccttggtgtttacagataatttggaaaactttttgatgacagcagaggattttttcccccttattttgtaatgaagatccagcactggttaaaaaataatttgatttgtagttacatttttctatgccagagctcttactgaattgatgatattaggatttctagtattttaaggtaagtatttatagtttaaaatttagtttatatttaaaactttaaaacatctgatctgggatttttttgttaagtaagtatattaacttcaaataccaaattactactaagcagtatattgattataagcatctgttgtctaaagattggtactaggctggacatggtggctcacacctgtaatcacaatactttgggaggctgaggtgggtagataacctgaggtcaggagttcgagaccagcctggccaacgtggtgaaaccctgtttctactaaaaatacaaaaattagctgggtgtggtggtgggcacctgtaatcccagctacttgggaggctaaggcaggagaatcgcttgaacaccggaggcggaggttgcaatgagccgagatcgcgccattgcactccagc

SEQ ID NO: 9521 - DNA, 640 bp, Homo sapiens
ttgttatttccattttctgttatgattactgaaacctgatttattgctttgtcactttaaccacatctctcaactctctgcaatgttgcaaggcttttatccctgaaaatcatttacagataaccacaatttgctgtggtatataaactaattcttggtctatactaagatgtatttgagaaaatacatttgatttgattttgtggcccattcctaaaggtcattgtatccatttttaaaacaaactaaaatgagaacattaggttcaattttcttattattccaaatgataaaatttaagatttttctaataaaagagtacagataatgggacagttgagagagatggctttaaatacattcttaagtaatcattttcctatttactgaccactgtaatgaaaatatatcaatttatttatggaactcctgattggggataatattttaaaggtatctgttgcacacttggattttcaaaactcggtgaaagttacaagtttgcatggtaagaataaaataagaatattgaaactggtacattagctaattctattactacttagcgtgtttctaatgagaagttactgaaatctattactgtccttaataaaaattgagtagaaaaaagtggaactag

SEQ ID NO: 9522 - DNA, 8932 bp, Homo sapiens
aattttatacatttaaaatcattgttaaattgattgaggaaaacaaccatttaaaaaaaatctatgttgaatccttttataaaccagtatcactttgtaatataaacacctatttgtacttaattttgtaaatttggatttttatatatcatattttcttaattcattgtacacatttgacttactgcacagtatattgatcattttaatgggaaactttagctttctactttttatttttgttttttcactttctatgccattatttttgtattctttttcttagtgtgagctctaaaatcaatgttcttgaaaaagaaattattttgcagaagttggggaatcatgtttgttgaatatgtataaaatagaaacataggctgggcgcggtggctcacacctgtaatccctacactttgggaggctgaggcaggtggatcacctgaggtccagagtttgagaccagtctggccaacatgatgaaaccccatctctactaaaaatacaaaacattggccgggagtggtggctcatgcctgtaatcccagcactttgggatgctgaggcgggtggatcacctgaggtcaggagtttgcgaccagcctggccaacatgatgaaaccctgtctctactaaaaatacaaaaaaattggctgggtgtggtggcccacacctgtaatcccagcactttgggaggtcgaggcgggtggatcacctgaggtccgaagttcgaggccagcctggccaacaggatgaaaccctgtctctattaaaaatacagaaaattggccgggtgcggtggctcacccctgtaatcccagtactttgggaggctgaggcgggtggagcacctgaggtcaggaattcgagatcagcctggccaacatggtgaaaccccatctctactgaaaaacacacacaaaaaaattagctgggcatggtggcacatgcctgtaatcccagctactcaggaggctgaggcaggagaatcatttgaacctgggaggcggagcttgcagtgagccgagattgcacccctgcactccagcctgggccacagagcaagactctgtctcaagaaaaacaaaaaaaaagataaatggacaaaagacatgaacaaacagcttttataggatagtatggctaacaaacttttagaaaagtgtttagtctcactagtaagtaacaaaatattggggcagggcacagtggctcatgcgtataatcctagaactttggaaggccaaagctggtggattgcttgagcccaggagtttgagaccagcccaggcaacattgggagaccctgcctctacaaatatacaaaaaaattactgggcatggtgacacacacctgtagtcccagctgttctgaaggctgaggtgggaggatcacttgagaccaggagaggtcaaggctgcagtgatctgtgatcacaccactgcactccagcctgggcaacagagcaaaaccctgcctttaaaaaaacaaaaaacaaaaaaggccgggctcggtggctcatgcctataatactttgggaggccgaggcaggtggatcaattgaggtcaggtgttcgagaccagccaggccaacttggtgaaaccccgtctctactaaaaatacaaaaaaaaaaaaaaaaaattagccagatgtggtggtgcacatttgtaatcccagctactcaggaggctgaggcaggataatcgcttgaacctgggaggcagaggttgcagtgagccaagatcgcaccactgcactccagcctgggtgtcgagtgaaactcattctcaaaaaaaaaaaaaaaaggaggtggggagagctatttcaagaatattttaagtaggctgggcacggtagctcatgcctgttatcctaacactttgggaagccgacatgggcagatcacgaggtcaagagatttgagaccatcctggccaacatggtgaaaccccatctctactaaaaatacaaaaaattatctggacatgctggcgtgcgcctgtagtctcagctacttgggaggctgaggcaggagaatcgcttgaacctgggaggcggaggttgcagtgagctgatgttgtgctagtgcactccagcctgggcgacagggctgagaccttgtctcaaaaaaaaaaggagtatcttaagtgtctttcaaaattacactttagcacttataaattttatatataatactttactgatagcattgtatattagtccaacttttttggctacactatttgtgaaggattcctttttttctttaagacagccactgtaggaaatatgccaagtacagatagtgaggaaagaaaggaagaaaaatgataattgtctgcaagtgggcttatttttaacactgctgaatttcatttgtaattttactttcaagaatatactctggtagactgaggcgggaggatcacttgagcccaggagttggaggcttcagtgagctgtgatcacaccactgccctcagccaaacctgagtgataaagtgagaccctatctcttaaaaaaaaaaatccctttgttgttgagttattttatgtcatttattggtaaatacctaacattttagacctagtcattaccagttaacatagaatttaattggatgcagtctgtatttttgaaaaaaaaaattttttttggaataacttaaattctaaaactttggccgggcgtgatggctcatgcctgtaatcccagcactttgggaggccgaggcaggcagatcacctgaggtcaggcgttcaagaccagcctgaccaacatggagaaaccccgtctctactaaaaatacaaaattagccaggcttggtggtgcatgcctgtaataccagctactcgggaggctgaagcaggagaactgcttgaacctgggaggcagaggttgcggtgagccaagatcgcgccattgcactccagcctgggcaacaagagtgaaactccgtctcaaaaaaaaaagaaaaattctaaaactttaagtgaaatttattatcccttcccacttattttctgtggttttgtgtgtatagagcatcttcctttgttacccaagtacctcgaatgggttggaaactggcggtagaaggttagagtagccaattgatatgtaaaccaagtgtcagatcagatgagatgaaagaggtggagtttaaagcaagtgagatatgataaacaatgatgaaagcaaaaatagggcagttgaaccagagtcagccagttggcataactgccaataaatgaggcagtgtagaataactaataatgattggaatcaaggaaaagagagcatagaggaatcagctaaattagtatgttttatccatagttacatgactaacaaatgattaaaaagaagttattctctagataattttttaaataaaagtactgttaatatataaactaagttattcattcactgtttttcttcacagtaagaatgacaaaaatctgtgttctttgtacttatcaagtgactcaaattttggccacttcactgtcactgatggcttatagaatgattctagcaggactcaagttattgaactatcaaatgggtttttaattgatattgaagtaagtaagttttgtagcttttggagtttttaaaaactacttcagtgattttgatttatattctttttgatagttcagaagtgtattgttaaaaaacataagcatggccgggcacagtggctcacacctgtaatcccagctctttgggaggccaaggcgggtaaatcacctgaggttgggagtttgagaccagcctgaccaacatggagaaaccctgtctctaccaaaaatacaaaattagccgggcatgatggagcatccctgtaatcctagctacttgagacgctgaggcaggaaaattgcttgaacccgtgaggcagaggttgcgatgagccgagatcgtgccattgcactccagcctgggcaataagagcaaaactccgtctcagaaaaaaaaaaaaaaaaaaaaaacggccaggcgaggtggctcacacctgtaatcccagcactttgggaggctgaggcgggcagatcacctgaagtcaggagttcaagaccagcctgaccaacatggagaaacttcatctctactaaaaatacaaaattagccgggcgtggtggcacatgcctttaatcccagctactggggaggctgaaacaggagaatcgcttgaacccagtaggggaaggttgtggtgagccaagattgcaccattgcactccagcctgggcaagaagagtgaaactctatccaaaaaaaaaaaaaaaccatacgtacataactttttttctttttcttttctttctttcttttcttttcttttttttttttgaggcacagtcttgctttgttgaccaagctggagtgcattggcatgatcacagcttactgtagcctccacctcctgggctccagcgatctcacctcagcctctagaatagctgggactacatatgcatgccaccatgcccagctgtttttttgtttgcttgtttttggttttgtttttttgagacagggtctccctgcgtcgcccagtcttgtctcaaactcctaggctcaagcgatcctcccacctgggcctcccaaagtgttgagattgcaggtgtgagccacggcacctggtccataaaacatttttttatgaactaaagagctctctcaaacttgtgctaacaaaatttaaggcaatattaattctgtgcatgtgtttgggaaaattaaaaaaacttacatagtgcttatttggcccacaaaagtacagttccattttttatataaatagattctacctaacttataacccctatgtcaaaatttgtttatcttaaaatagtttgtataaaaagtctttactgctttattatgaaataataatgtttattgtagaaaaatctaggaaaacacaaaaatgtcaaactcagttaacagtcatagtttcactatttgaagttaaccactgttaagattcttttttttttttttttttttttgttttgagactgagtcccgctgtctattgcccaggctggagtgccatggcaccatctcggctcactgcaacctctgcttcccaggttcaagtgatcctcccgcctcagcctcccaagtagctgggattgcaaacatgtgccaccacacctggctaatttttgtgtttttagtacagatggggtttcaccatgttggccaggctggcctcgaactcctcaacctcaagtagtctgcccaccttgacctcccaaagtgctgggattacaggcatggggcaccatgcccagccccactgttaagattctaatgtaggccgggcacagtgactcatgcctataactcaagcactttgggagttcaaggcggccagattgcttgagcttttagaagtttgagaccagcctgggcaacgtggcaaaagcttgtttctataaaaaaatataaaaacttagccagccttggtggcaccacctgcagtcccaactattcaggaggctgaggcgagaggatggcttgagctcaggaagtcaaggctacagtgagctgtggtagtgccactgcactccctcatggttgacagagcaagaccctgtctcaaaagattctaatatagatactctttttatgcatatgtaatttatatatattatacaaaatattatttgcatttaacatattctgaaccaatagtcttttctacaagcagaacattagtattcttgtcactctgaatgtaggcacagatttttgtcattctttatcttttttgtgtgtgtgtgacagagtctcactgtcaccaggctggaatgcagtggcgtgatctcggctcactgcaacctctgcctcccaggttcaagcgattctcttgcctcagccttttgagtaactggggttacaggcgcgtgccatcacacccagctcatttttgtatttttagtagagatggggttttaccgtgttggtcaggctggtcctgaactcttgaccttgtgatctgcccaactcagcctcccagagtgctgggattacaagcatgagccaccgcgctcggtccctttctttttatttatttatttattttgagatggagtctcgctgtgtcacccaggctggagtgtggtggcacgatcttggctcactgcaacccctgcctcccaggttcaagcaattctcctgcctcagcctcctgagtagctgagactacgggtatgtgccactacactcagctaatttttgtatttttttttagtagagacagggtttcaccatgttggccaggctggtcttgaactcctaacctcaggtgattcacaccccttggcctcctgaagtgctgggattacaggcatgagccactgtgcccggccatttttttgtgtttttagtggagacaggttttcaccatgttggccagtagtgtatttagttatttaaggagggctcaatcaacaggtttaaatggtgtgctattcataattattgcaaaaataggccgggcctgtaattccagcactttgggaggccaaggcaggtgaatcacttgaggccaggagtttgagatcagcctggccaacgtggtgaaactccatctctactaaaaataccaaaagtagcgggcgtggtgacaggtgcctctaatcccagctactcgggaggctgaggcaggagaatcgcttgaacccaagagtcggaggttgcagtgagccgagatcgcgccattgcactccagtgtgggtgacgagcgaaaatccgtctcaaccaagaaaaaagaaaaaaagaaaaagaaaacttaactggcctttggggcacatgcctgtaatcccagcttcttgggaggctgaggcatgagaaaaaaaataaacctgggaggtggaggttgcagtgagttgagattgtgccactgcactccagcttaggcaataaaacaagactgtctcaaaaaaaaaaaaaaaaaaaacttattgagagaataatataccactaatatttaaagaaatttttggctggtgccgtggctcacacctgtaatcccagcactttgggagtccaaagtgggcgtataacttgaggtcaggagttcaagaacagcctggccaacatggggaaaccgcatctctactaaaaatacaaaaattagtgggtgtggaggcgggcgaatgtaatcccagctagttgagaggctgaggcaggagaatgtctgggaggtggaggttgcagtgtgccgagatcgcaccactgtactccagcctaggtgacagagtgagactccataggtctcagccagactctggaggtctcagcccaggcttgagtgcagtggcatgatctgggctcactacaacctccatctccccagttcaagcgattctcctgcctcagcctcccgagtagctgcgactacaggcgagtgcctccatgcccagctaattttttgtatttttagtagagacggggtttcaccatgttagccaggatggtcttgatctcctgaccttgtgatctgtccaccgcggcttcccaaagtgctgggattacaggtgtgagccacagcgcccggccaaaaaaaggaatttttaagaggaaaaagaatgctaccaacctaaacacatttctgtgactgtttatatttttccctgttccacatacatacatttttacatagtacgttcattgcagcatgagttacttttcacttaataaattttaaacattttccagctgggtgtggtggctcatgcctgtaatcccaacacttggagaggccaagtcaggcttattgggtgagtccaggtgtttgagactagcctaggcaacatggcgaaactgcatctctacaaaaaatacaaaaattagccaggtgtgctggcgcacacctgtagtcccaactactcaggaggctgaggtgggaggattgcttgagcccaggaggtagaggttgcagtgagccatgatcatgccactgcactccagcctaggtgacaaagcacaaccctcaaataaataaataaatacatgttaaacatatacctttattacttcatttttgtaagagcttcagggaataggcttttttaaagggaatagacttatagatcaattttaatatttgacttatagaattttatgacactaaatggataattgtaaagtttgagttgggacccattttttaagacattcaggctataaacaaggtaataaatcacactcttccagttctactcccaatttaattggtttacagttcggtggctgtctttttttttttttttttttttttttgagaccgagtctccctctgtcaccaggctggagtgcagtggtgcaatctcagctcactgcaacctccccctctcaggttcaagtaattctcctgcctcagcctgccgagtagctgggactacagtcgcacgccaaccacccccagctaatttttttatttttagtagagacaggatttcaccatgtttgccaggatggtctcgatctcttgtgctcataatctacctacctcggcctcccaaagtgctcggattacagacgtgagccactgcgcccggcccgttggcttgctttctagatactgggaatagatcttgttatagtatgtgataaatagatcttgttatagtatgtgataaaatgccatgatcaaataaattacttatatcctgtttggtgatttttagaaaaacatatttatctacatctaaaatacttattttaattttaaacacttgatggtatgaaatgaaattttgttactttaccattgtaactatgtcataaagtcataaagtacctgtccccaaaaaggcaaccagtaaatatttttgagtaaatgaatgaaatctttattgccggtgttctgtgcacatagaataaaggaaattattaatgtta

SEQ ID NO: 9523 - DNA, 4816 bp, Homo sapiens
agctcagcagggctgtgcttgcctcacaggaatagtcaggtcttcccagattatctgaaggccctggggattccactccagtaaagtagaatgaaggatacaaatgataaaaattacacttttttttttggtttattccccagtattaaaaacaaagcaagctgagtctgaacaaatggatctttctgccatcatttgtacaatgctgagctgtctggattgaaataaaatgaccatttttatgtatgtcaaaggtataacagcataactgtgtagccaaaacaaaatcagattaagactgattcagaaaaatctgggatctttctcaggaatactgtatacccttgggatttctcctcctgcagaatctgtggcattggatgttcttcattgcctgtgctaaggggttaacctcatggcccagtgggtaccctagccccttcttttcttccacttgtatgaagaggagggaaccaacatttaaataccacacttaaccatttttacaattatttcagatggcttttttcctctgtgacactgtaaattctgcattctctcagcacttgagtgcaccaaacgagtgaatgctgaactcacttgcatcccttcatgtttctgtttgtggattataaggatgatgaaatgtgaaagtctcccaacactctgagggtggtgaacgattgccacccgtttgattttaatgtgctgctgcatgagactgcattgttgctaatggccagtgtacccagatgtgaagtgtggtaggctggttcatatgtggaggtgggtgtgtgaagctagacacgaaggtccctaaggttctgaagagacttgaactgtggaaatgctcttagcaggcatcccgaacccctgcttcggtgctgttttgaggagtaggatcttggagttcagaccaactatgactatcatttccttcactatctagaaaaacgctattctactttggaagagaatagtagttattttcaagtctcctgacagtcactgggagtacaaggtttgctaatgtgctctctggacgttattaatggccagtattagttgctgctgtattactgactcgcttagctgtagaaagggtaatactctcctgattttgtatgattggactcttaagtagctgctgttagtcagaattaaaacccatctcagactaagaatataatgaataagattaataggccaaaatatgtatctaatcacattgataaaaattaatataactgacacaataaaacacatttcccccatctgtacaataaatacagcttcaaattcagtggagtctgtagggcagataactttaatcatcactactgtagtcagtataagaaatgctgaaaaaaatccaggagggcttgtctctttgtgggtggtcactgtgatgttgggccagctcctgttcaggtccagagctgctaacgtgggttctactcagtcccagtgacttggccagaatagagctttgccaggtaactgccctgtgctaggtgaaaggggaaaagcagtagctggatatatttcaaatgaggttttgaacaagttcagaaagtggaacttgattgaaaagtgaacaagtgtagtagtgtgtgagaaaattcagatggtgtcggatgcagaagttaatattccacttaatgttatctgagcattaaaaatcatcagcatttaactgagaccccactatagagtttccttatcaagactttttggttttaaagttgtttttaatgcattgcaagttacaatagctattttgcttttagatttttcccagcactttgtatttattagctttcattaacttgcctccagtatacattccacttcgtgcttttcttaggtcatttctacatcccttattccttgttttcctgcagtgtaatggccctgaatgtcctctgagccttcagctccattatggacccaaactagactatacttggataagttaagctcttcttcgtgtactggtctataattagaaaaactgttttaaattagatgttcccattatttatttaaacagctttttgctgagaaagcttagtggattaatgaggcagagggtgttttgaaatccaataaatagttcccacaggctgggtgtggtggcttatgcctgtaatcccagcactttcggaggccgaggtgggtggatcatgaggtcaataaattgagaccatcctggccaacatggtgaaaccccatctctactaaaaacacaaaaattagctgggcgtggtggcgcacacctgtagtcccagctacttgggaggctgaggcaggagaatcactggaacctgggaggcagaggttgcagtgagccgagattgtgccactgcactccagcctggtgacagagcgagactccatcaaaaaaaaaaaaaaaaagttcccacagctcaccactacagaagcagggaagacaactatgcagaaaacagagttagtggcggtcagcaggaatgcagctggtcttttggacccctacgggatgggggcagtgcagaagacactggtgaagtcctttatactgaagacctgtggttgggagcaggggtagtccatgggtctgctgattttttttccctatttagtactaatgtgtgtgtgatctttgttttacaaacagtaccttttgggttttctgcatattttataatttttgtacagttttgaattctatagattgtcttggaaggatactgtgtgatgggtcaggcacacagtaattggagacttttaatgtatgtaatatttcatagattgcatgctattaatcatctgtgagggtagtattttttgttttattgtaagtttccctctttttttataaattaaaagatggttggtattaggaatttcaaatgaatgcagaaaatcttacatgctgtgtactattaatattataacagacgatccaagtccaaaatctgaccaataaagcaaccattttatcaagatagagggattctaatgggagaggggattcttccctcctgaagtttgtgtgtccagtccccttaaaaaaaatgaatagttgtcttttcttgtcatattaatactcgaaagtccatggtggtattaatgaaagtacactttattgttgcctttgaacttacggccaaggcaataaatcagaaacaaaaatagtgccaatgtgtcaaaatcgacatctgagagattcagcctcccatttggaataaatatgaatcttctaagctatcttgtttaatattttccatcatttagctacttcctatctccctcagaggcgcctgctgttcccattttagagttgacagtggcctgctaattttgctatgttcctaaaagttactgggtgtgagacattttcatcccctcctttttcctactgctggtgtttattatccagctagacaatattttatgcatatttaccgtgatgtctggaccgtacctgtgctccttggcagtttatgttgaagataactaaagatttttctctttgggaggcatcaaaatgatggtagtttgcttttatctttttatgttcattttcttttagtaggtgacctttctgcattaagaactgtttttatcttttactaccttttcttttctcctttgtggagacagcatgacatgtcctgaaggtcacctttgcctttgaaaaaggtttgatggaggaattcacaggtgactgacaagtctttgaaaagaatgggatctgctcacttctggtctttttggccgggaactcctgattggtgttaaggtggtaatttcccccatataagatttagaatcactgagtttgagctagatgaaatttttaaaatttctggttgtctcattagactgatgaggtgagttttcttcttcatatgaacagctagttaataacagcagagttctcactcagtgctcagtacttaattttccactgcaccacaactgtcttaactaaatgtgctgtatttttctttaaaagttaagagttctatttggtgttttcaggaatatacgtgaaaagacatgccatgttttggtaaataccatcagagttgtgtaaaggcgtgtactaagtgcaatcttaatttgtggaaataatcttcatttacccctcctaaaactacactcagtataaacactttcccataaggtgtgtgcagtaaaaatgttatattactccaacactggcaggagcacagcacagcagccttattggagagagccttataaaagtgattaaatggaggcattgagctcattacctttaagtttactttgtgctgacctttgttcctgttttgagaatctcatataattattaaaaaaaaaaaacaattaaaacgaaacggcggggcctagctgtgtataaatgatccttgctgaatatcttaaggttttttgtaagaaaaaagaaaaaccaacaaaaaaagcttattttcacattaaaatgaaacctcttttgcaacttaagaattctatggaaaagcagtttttatcatattttgtgtccatgcaccatttttcttaaaatggcttacaaaaaagaatgtaaacaatttgtgatctggccagttgtacttttagctcccagagggagagttggtggtattatgagttgagtaaaaaccatccaggggaacttgagggagcagtctgttgccagtaatgttccttgtgtgccattaaaccacctccagatgagtggaggaacatcactttttaattttttaattgtatttggaattgttgccgtgtactaagaacttgacctaaataaaatcccacaaagtat

SEQ ID NO: 9524 - DNA, 2921 bp, Homo sapiens
cacggacgcctatccagaagccagccggctggcagcccccatctgctcaatatcactgctctggataggaaatgaccgccatctccagccggccacctcaggcccctgttgggccaccaatgccaatttttctcgagtgactagaccaaatatcaagatcattttgagactctgaaatgaagtaaaagagatttcctgtgacaggccaagtcttacagtgccatggcccacattccaacttaccatgtacttagtgacttgactgagaagttagggtagaaaacaaaaagggagtggattctgggagcctcttccctttctcactcacctgcacatctcagtcaagcaaagtgtggtatccacagacattttagttgcagaagaaaggctaggaaatcattccttttggttaaatgggtgtttaatcttttggttagtgggttaaacggggtaagttagagtagggggagggataggaagacatatttaaaaaccattaaaacactgtctcccactcatgaaatgagccacgtagttcctatttaatgctgttttcctttagtttagaaatacatagacattgtcttttatgaattctgatcatatttagtcattttgaccaaatgagggatttggtcaaatgagggattccctcaaagcaatatcaggtaaaccaagttgctttcctcactccctgtcatgagacttcagtgttaatgttcacaatatactttcgaaagaataaaatagttctcctacatgaagaaagaatatgtcaggaaataaggtcactttatgtcaaaattatttgagtactatgggacctggcgcagtggctcatgcttgtaatcccagcactttgggaggccgaggtgggcagatcacttgagatcaggaccagcctggtcaagatggtgaaactccgtctgtactaaaaatacaaaatttagcttggcctggtggcaggcacctgtaatcccagctgcccaagaggctgaggcatgagaatcgcttgaacctggcaggcggaggttgcagtgagccgagatagtgccacagctctccagcctgggcgacagagtgagactccatctcaaacaacaacaacaacaacaacaacaacaacaaaccacaaaattatttgagtactgtgaaggattatttgtctaacagttcattccaatcagaccaggtaggagctttcctgtttcatatgtttcagggttgcacagttggtctctttaatgtcggtgtggagatccaaagtgggttgtggaaagagcgtccataggagaagtgagaatactgtgaaaaagggatgttagcattcattagagtatgaggatgagtcccaagaaggttctttggaaggaggacgaatagaatggagtaatgaaattcttgccatgtgctgaggagatagccagcattaggtgacaatcttccagaagtggtcaggcagaaggtgccctggtgagagctcctttacagggactttatgtggtttagggctcagagctccaaaactctgggctcagctgctcctgtaccttggaggtccattcacatgggaaagtattttggaatgtgtcttttgaagagagcatcagagttcttaagggactgggtaaggcctgaccctgaaatgaccatggatatttttctacctacagtttgagtcaactagaatatgcctggggaccttgaagaatggcccttcagtggccctcaccatttgttcatgcttcagttaattcaggtgttgaaggagcttaggttttagaggcacgtagacttggttcaagtctcgttagtagttgaatagcctcaggcaagtcactgcccacctaagatgatggttcttcaactataaaatggagataatggttacaaatgtctcttcctatagtataatctccataagggcatggcccaagtctgtctttgactctgcctatccctgacatttagtagcatgcccgacatacaatgttagctattggtattattgccatatagataaattatgtataaaaattaaactgggcaatagcctaagaaggggggaatattgtaacacaaatttaaacccactacgcagggatgaggtgctataatatgaggaccttttaacttccatcattttcctgtttcttgaaatagtttatcttgtaatgaaatataaggcacctcccacttttatgtatagaaagaggtcttttaatttttttttaatgtgagaaggaagggaggagtaggaatcttgagattccagatcgaaaatactgtactttggttgatttttaagtgggcttccattccatggatttaatcagtcccaagaagatcaaactcagcagtacttgggtgctgaagaactgttggatttaccctggcacgtgtgccacttgccagcttcttgggcacacagagttcttcaatccaagttatcagattgtatttgaaaatgacagagctggagagttttttgaaatggcagtggcaaataaataaatacttttttttaaatggaaagacttgatctatggtaataaatgattttgttttctgactggaaaaataggcctactaaagatgaatcacacttgagatgtttcttactcactctgcacagaaacaaagaagaaatgttatacagggaagtccgttttcactattagtatgaaccaagaaatggttcaaaaacagtggtaggagcaatgctttcatagtttcagatatggtagttatgaagaaaacaatgtcatttgctgctattattgtaagagtcttataattaatggtactcctataatttttgattgtgagctcacctatttgggttaagcatgccaatttaaagagaccaagtgtatgtacattatgttctacatattcagtgataaaattactaaactact

SEQ ID NO: 9525 - DNA, 1185 bp, Homo sapiens
aaagcaatttcagccttattttattcccatcaattgagaaaccattatgaagaagagagtccatatttcaatttccaagagctgaggcaattctaacttttttgctatccagctatttttatttgtttgtgcatttggggggaattcatctctctttaatataaagttggatgcggaacccaaattacgtgtactacaatttaaagcaaaggagtagaaagacagagctgggatgtttctgtcacatcagctccactttcagtgaaagcatcacttgggattaatatggggatgcagcattatgatgtgggtcaaggaattaagttagggaatggcacagcccaaagaaggaaaaggcagggagcgagggagaagactatattgtacacaccttatatttacgtatgagacgtttatagccgaaatgatcttttcaagttaaattttatgccttttatttcttaaacaaatgtatgattacatcaaggcttcaaaaatactcacatggctatgttttagccagtgatgctaaaggttgtattgcatatatacatatatatatatatatatatatatatatatatatatatatatatatatatatatattttaatttgatagtattgtgcatagagccacgtatgtttttgtgtatttgttaatggtttgaatataaacactatatggcagtgtctttccaccttgggtcccagggaagttttgtggaggagctcaggacactaatacaccaggtagaacacaaggtcatttgctaactagcttggaaactggatgaggtcatagcagtgcttgattgcgtggaattgtgctgagttggtgttgacatgtgctttggggcttttacaccagttcctttcaatggtttgcaaggaagccacagctggtggtatctgagttgacttgacagaacactgtcttgaagacaatggcttactccaggagacccacaggtatgaccttctaggaagctccagttcgatgggcccaattcttacaaacatgtggttaatgccatggacagaagaaggcagcaggtggcagaatggggtgcatgaaggtttctgaaaattaacactgcttgtgtttttaactcaatattttccatgaaaatgcaacaacatgtataatatttttaattaaataaaaatctgtggtggtcgtttt

SEQ ID NO: 9526 - DNA, 1974 bp, Homo sapiens
tatggaactctggcacccaggcatgaagcacgttggccagttttcctcaacttgaagtgcaagattctcttatttccgggaccacggagagtctgacttaactacatacatcttctgctggtgttttgttcaatctggaagaatgactgtatcagtcaatggggattttaacagactgccttggtactgccgagtcctctcaaaacaaacaccctcttgcaaccagctttggagaaagcccagctcctgtgtgctcactgggagtggaatccctgtctccacatctgctcctagcagtgcatcagccagtaaaacaaacacatttacaagaaaaatgttttaaagatgccaggggtactgaatctgcaaagcaaatgagcagccaaggaccagcatctgtccgcatttcactatcatactacctcttctttctgtagggatgagaattcctcttttaatcagtcaagggagatgcttcaaagctggagctattttatttctgagatgttgatgtgaactgtacattagtacatactcagtactctccttcaattgctgaaccccagttgaccattttaccaagactttagatgctttcttgtgccctcaattttctttttaaaaatacttctacatgactgcttgacagcccaacagccactctcaatagagagctatgtcttacattctttcctctgctgctcaatagttttatatatctatgcatacatatatacacacatatgtatataaaattcataatgaatatatttgcctatattctccctacaagaatatttttgctccagaaagacatgttcttttctcaaattcagttaaaatggtttactttgttcaagttagtggtaggaaacattgcccggaattgaaagcaaatttattttattatcctattttctaccattatctatgttttcatggtgctattaattacaagtttagttctttttgtagatcatattaaaattgcaaacaaaatcatctttaatgggccagcattctcatggggtagagcagaatattcatttagcctgaaagctgcagttactataggttgctgtcagactatacccatggtgcctctgggcttgacaggtcaaaatggtccccatcagcctggagcagccctccagacctgggtggaattccagggttgagagactcccctgagccagaggccactaggtattcttgctcccagaggctgaagtcaccctgggaatcacagtggtctacctgcattcataattccaggatctgtgaagagcacatatgtgtcagggcacaattccctctcataaaaaccacacagcctggaaattggccctggcccttcaagatagccttctttagaatatgatttggctagaaagattcttaaatatgtggaatatgattattcttagctggaatattttctctacttcctgtctgcatgcccaaggcttctgaagcagccaatgtcgatgcaacaacatttgtaactttaggtaaactgggattatgttgtagtttaacattttgtaactgtgtgcttatagtttacaagtgagacccgatatgtcattatgcatacttatattatcttaagcatgtgtaatgctggatgtgtacagtacagtactgaacttgtaatttgaatctagtatggtgttctgttttcagctgacttggacaacctgactggctttgcacaggtgttccctgagttgtttgcaggtttctgtgtgtggggtggggtatggggaggagaaccttcatggtggcccacctggcctggttgtccaagctgtgcctcgacacatcctcatccccagcatgggacacctcaagatgaataataattcacaaaatttctgtgaaatcaaatccagttttaagaggagccacttatcaaagagattttaacagtagtaagaaggcaaagaataaacatttgatattcagcaactg

SEQ ID NO: 9527 - DNA, 3074 bp, Homo sapiens
cggattgcacctgaatcctatctgacgtttcattccagcaagaggggctggggaagattacatttttttttcctttggaaactgaatgccataatctcgatcaaaccgatccagaataccgaaggtatggacaggacagaaaagcgagtcgcaggaggaagggagatgcagccgcacaggggatgattaccctcctaggaccgcggtggctaagtcattgcaggaacggggctgtgttctctgctgggacaaaacaggagctcatctctttggggtcacagttctattttgtttgtgagtttgtattattattattattattattattattatattttatttctttggtctgtgagcaactcaaagaggcagaagaggagaatgacttttccagaatagaagtggagcagtgatcattattctccgctttctctttctaatcaacacttgaaaagcaaagtgtcttttcagcctttccatctttacaaataaaactcaaaaaagccgtccagcttatcccatcctctgattgtcttctgacttaagggatttactgtggtgtaggttctgccagccaaccctacaagctgccatttccagtcctagcatttaagtaggatgttgttgcctttaacttttcttatccaggggaaaattgccattttagggtcagcatgaacagctctttcttgtatgcgatttaaaacaaactggaaaggaaacttcacacgtcaaaatccatagaagcgcctggacgaggcttaaagtgctttgtgagtgaataggagccattcgctaattctagacccacagtgtctggtggtggggcttcccttgtggggcttctggtggtggttttgccttttcttttccctcctccatgttcttctaaaacatatacatatatacatacacacatacacatattcttcaggtctctaagcccctggaagcagcattgtgtgatattctcagaggcaggggaaaatagagggaaaaatagagactattggtatgttctccccatcagcgagttattgtaactggtcaccactggacgggaaggagaacagaggagagggaaagagaagcccaacctctgtgatcatatgagggccaaggctgagcagtgtagacagagaccctttgaaatgcatttgtctctcaaatagactagtaaacaccgacttctcctttgggttacaaacaccatttcaacctttcgggagagtcagagctaggatgtacaagaactgattctaaccagaagtccgcaagtactgtggacaagaatgcttaaccatgctgcttcagccttgagagacctaggttcttacacatatgcacacacgcatacacacatgcacgcacacacacatacacacatgcacgcacgcacgcatgcacaccaatttatgtttttattaagtgccttgaaaaaatgaagaaaaatgtattttccctttatgtaaaaattagtgaatatcttatgaattaaggcattcctctttccctaaccccgatggctccattcccaagtaccccaactcactgctgatcctattaaaggaatgagtcctgctacccgagtggtagtcatagccctagatgactctcaactactcttcaaagggaggcatcaggaatagaatgaaactgtgtgaaggataagattgttcgcatcaagatccaaatcttgatttcatattaacgcctaaggattgcctgtgtgctggaaatatatttgaaactcaaccagtatgcccagcctattgcatatcattgtcagaccatttttgctgctgtggtcacccacgatttcatttgtcttatacccaggtgaaaggggaagggtgaatgggactggctggttcctttaaatgttaacttatggaaatgctagttcaaatggtaatgtcacagtgttttgtatgcagagagcaagagttcaaccaacagctgtttattcatgtgtgtgtgtctttgctgctttgagttctctgtatctactgtgtatgtgaatggtcatgtgggactcagtggtggtgttgtgactttgacctagggtccgagtgtcacagctgatcttggcactcggcactcattggcacagtggtagttagaggtgaaaagtagagctgtcaagcccaagggcttagctttagggctcctcctgagttcggcccacagtagaagcaagattttaactagccccttttcctcttcaccctcccatgatgcgcagtgttcagaaagctggtaagtcctagggatttccagaagtagcctgcagaagaaggtaagtttgaaagccactccaggggtcctgatgctgtcatgctcagtgagccattttacagttctccaaagtctagccctgtttcggacctgcacttcacctctaagttatgtacaactcaacctgcatccctctaaaagtcctatatccatattcaccattggctaatttgaggccctgagtgggccttgaatgctaaaaagaagcagggtacgcagggctacatgtagataccacaccaaggctggaggctggtctgtcataagacagaaagaaagacgctgggcccaattttgacttggccaggggacaccttggtgtgtttgttatctttatctgtgggtaggctagctgacccatctccttgagtcattccctttgggaaaccccactgccagtattgatctcctttttgccttgtactgaatgacacattacctccacactctcccggactaggtggtcaacagggccacagggttgctttctgtctttggtggggcaggggagttgacagggatgagggtccaaggaataagcatgaatgacaagaaaacaagggaaagagttaacctgtcacatagcaggttaactttttcagggtttgcagttagaggtattcgaccattcactggctgagccagatcacgggaacttgagagcttttactgtgattcttcaatgtaaaaaataaacaacaatgtcaaactgtgtttatatgatttgtataaagcctttttaagattactatttaaataaacattataccagagat

SEQ ID NO: 9528 - DNA, 629 bp, Homo sapiens
gggccgaagcaagaacagcacccaaaacaaacgagaaagactgcaaacatgttgcctcgattttgcacttttttctcctcgcctagtttctgtgtgaactctcagacatctctttcccggatccccaaccctgagcactcttatcaatcccaaccatcctccttgggttcattttggtttctggtttttctttttcctttttgttgattccaaaccaacaaacccaactctaatgctgcatcttggactatccgaagagatccacccccaagcactccacaactcaaggctcagctggttttgttccagagactggttcgcttgttttttccccttgccttatcccatacctcctctcagtgggcagtctgccaggagacgtgaggggaagcctggatctgtgtgtatgtacatagtagacatgtgtgtgtgtgaatagctctctgtgtgtgggtgtgtgagagagcggctggttcattgtgtgtgtgtttgggcgaggggtgagtgttcagagagggcccctttaactcttatgttacttctcctggggtacattttacaagaaaataatatactgtacaagttttgtttacttggagaagagattgaagctttttgttgccttatct

SEQ ID NO: 9529 - DNA, 118 bp, Homo sapiens
cgttaccctcaacagggaggctaagtgtggtacagggagttgagactgatgatgtcccatctaaacagtcgtcatccaactcctgaaatccaataaaacaaatatcgtttgagagatt

SEQ ID NO: 9530 - DNA, 46 bp, Homo sapiens
aatccatcctggatcatggcatttaaataaaagattgaaagattac

SEQ ID NO: 9531 - DNA, 326 bp, Homo sapiens
atcagctgcgctggatggacaccgccttgcactgttggattctgggtatgacatactcgcagcagtgttactggaactattaagtttgtaaacaaaacctttgggtggtaatgactacggagctaaagttggggtgacaaggatggggtaaaagaaaactgtctcttttggaaataatgtcaaagaacacctttcaccacctgtcagtaaacgggggagggggcaaaagaccatgctataaaaagaactgttccagaatcttttttttccctaatggacgaaggaacaacacacacacaaaaattaaatgcaataaaggaatcatt

SEQ ID NO: 9532 - DNA, 702 bp, Homo sapiens
agtgaaaatcaaccttttcatattaggagacatgcatttgtaaaaattaataaagatgacaagtcagttgtcaatggaattgagctatctgctaagacaaaaaatgttacctcagttcactattaaaattaattttaggagtggaagaaatgttgttactgccatttaaaaatatgctgagaaaattccagaagggttatttttccaaccacacctattccctctagtgcccagatatttgatttgtgagctgtacgtttcaccttttcatctttgatctactaaaaactggtttcttagttgtgaggtgtcacaggcaggttgatgtgggtagtagtccttgtctttggaatctgaatatttatactcctgctctaagctgttctaagacttggggttatgcctttaaatcattttcaagcattggccaaataataattggacaaagttctaaagttgtcaagtgtgtaagaattagtgaggtagctgttgaaaatgagtgaggatggtatttgtatttgtaataagcactgcaggtagagatatttcatgggttataataagagaaacacagatgagatgtagatggtaaggagtcttactgttgttggggtccttcctttctctttcttttttcccccttacccctcccacaatttcatgaagtcttttaaattaaatatatagctgaattgtgttgtg

SEQ ID NO: 9533 - DNA, 1779 bp, Homo sapiens
tttgggatttaaattttcacctgttaaggtggaaaatggactggcttggccacaacctgaaagacaaaataaacattttattttctaaacatttctttttttctatgcgcaaaactgcctgaaagcaactacagaatttcattcatttgtgcttttgcattaaactgtgaatgttccaacacctgcctccacttctcccctcaagaaattttcaacgccaggaatcatgaagagacttctgcttttcaacccccaccctcctcaagaagtaataatttgtttacttgtaaattgatgggagaaatgaggaaaagaaaatctttttaaaaatgatttcaaggtttgtgctgagctccttgattgccttagggacagaattaccccagcctcttgagctgaagtaatgtgtgggccgcatgcataaagtaagtaaggtgcaatgaagaagtgttgattgccaaattgacatgttgtcacattctcattgtgaattatgtaaagttgttaagagacataccctctaaaaaagaactttagcatggtattgaaggaattagaaatgaatttggagtgctttttatgtatgttgtcttcttcaatactgaaaatttgtccttggttcttaaaagcattctgtactaatacagctcttccatagggcagttgttgcttcttaattcagttctgtatgtgttcaacatttttgaatacattaaaagaagtaaccaactgaacgacaaagcatggtatttgaattttaaattaaagcaaagtaaataaaagtacaaagcatattttagttagtactaaattcttagtaaaatgctgatcagtaaaccaatcccttgagttatataacaagatttttaaataaatgttattgtcctcaccttcaaaaatatttatattgtcactcatttacgtaaaaagatatttctaatttactgttgcccattgcacttacataccaccaccaagaaagccttcaagatgtcaaataaagcaaagtgatatatatttgtttatgaaatgttacatgtagaaaaatactgattttaaatattttccatattaacaatttaacagagaatctctagtgaattttttaaatgaaagaagttgtaaggatataaaaagtacagtgttagatgtgcacaaggaaagttattttcagacatatttgaatgactgctgtactgcaatatttggattgtcattcttacaaaacatttttttgttctcttgtaaaaagagtagttattagttctgctttagctttccaatatgctgtatagcctttgtcattttataattttaattcctgattaaaacagtctgtatttgtgtatatcatacattgttttcaataccacttttaattgttactcattttattcactaagctcgataaatctaacagttactcttaaaaaaaaaaaaaaaagactaaggtggattttaaaaattggaaactgacataatgttaggttataatttctcatttggagccgggcgcagtggctcacgcctgtaatcccagcactttgggaggccaaggtgggtggatcacctgtggtcaagagttcaagaccagcctggccatcatggtgaaaccccatctctactaaaaatacaaaaattagccaggcgtggtggctggcgcctgtaatcccagctactcaggaggttgaggcagcagaattgcttgaacccaggaggcagagggttgcagtgagccgagatagcaccattgcactccagcctgggcgactccatctc

SEQ ID NO: 9534 - DNA, 767 bp, Homo sapiens
aaggagaaatgaggggttataacgtcatgggaccttcatctacaaagactggagaaataccacctttcctgctcaaaaaccagcaaaattagtgttttcatcaaaaggaaagatctcaaattcaagagactcatggacaacaaggattatactccacaggaaagaatgggaccttgtcaatgcaacaaaacactcttctgtcctttttaatgtaaacagagttacaaaaaccactccaaagtgaaggctcccatcctacacacagatatttgcttactgtgtgggccgatagctgtgaactatgtaaggttttttaaacaatagtttaaatttttagactttaaagacactaaccatataacttttatgtttcttccagtttctctccctccccccgcattttgctgcatatgcctttaaaatcaatgcagtattaccattaaaacatgggactctaactaaagccacttaggagcagacagcagcgttgttaggtactgaagggttcttcctccctactgttaccattgaagctgctagtcattggcaatcattttaaaccaaaaagctgctggataacatttgtcattcatattctttgcaagcattactttagcattttagcatgtttggggtcataaacagaggaagtatcagttattgatatctacttctattggagtccatgttgcatttcttgtgaactataaatggtgcttctcattttctgataatttttctcttgctaaataaatgtattaaaagat

SEQ ID NO: 9535 - DNA, 3446 bp, Homo sapiens
aatcaagcacatattttgaaatggactgtgaaggaaaaggggacaggaacaaaggaccaaaaataagctacatgttttatttcttcatcgtgttcaccactgtatgccaaggcttttcagttctgtggctgtttagactgtccgtaatggaatggtaaaactccatgaatttgcactttggtttttgatacctgtggagctgtctgtaggttgggaagtggcatgaaaattttcttaagctaaaatacagacatgtttcaaagggctaaagttggagatgagtagatagggtgaaaaatgggttaaatttgctagcttaattgttttaagaagaaaacagtgtctcataaattgactatcctggcatcacatttaacatgttatctacttagaaagcatttgtagagctgctgaatttgttttgtgtttttctgtaataatttaatgttacttattatcagaatttctgaaacctttacaaaaattctgatttattccattaatggccggttaaacacgtgggcatttattgttttattgaggaatttgacttaaactgggaatcctgtcatgttgtttatctttccagcttgcctgtttttgagtatgtttgatgtttttaaaattttgtcttctctgtggaagacaggaggctacagcaattaactttaagcctccttttagagatatttttaaaacttgtttaaaatttttgtgcaattcatatattaaattgcacttacttgcatacgctcatattctagggttttttctctatttttagggtatcatagtaaatcattagtaaatgagtctgtagttactaaaccctaatggaataattattaatgaaagatttttgaaatataaaaaataaattaggcccaatccaagaaattgagtgagaaggaaacacttgttttattcacagaggtaaagtgtcttttcaatataaccagcaatttaggtggcatctataaaataaaaaatttctactgtggacatccccttttccaactttctacataatggctagttctgactactaagaaatgttaagaaataggccaagtgcggtggctcacgcctataatcctatcactttgggaggcctaggcaggcagatcacctgaggtcaggagttcaagaccagcctggccaacatgacgaaaccccatctctactaaaaagacaaaaaattagctgggcatggtggcatatacctgtaaccccaactacttgggtggctgaggcaggagaattgtttgaacctgggaggcggaggctgcagtgagctgggattacaccattgcattccagcctgggcaacagagcaagactgtctcaaaaaacaaaacgaaacaaaaaaagaaagttattcttagtaaggaacttcttgtttaatagcatttttgtttattttaaaaagtgatcagaagtagtaaactatctttgaggaaatactgtaaccccagaatatttcctcttgacttctttttgtaacaaggataatttagggatttataaagttgtaaggatttcactgtttttggactgcctataataatagcacattaaccttcacataataagaaatctggacaagttcagttacacagtatgatgaatacttgaattaggaacattgtggaaaatttgctttagagaatcaaggcagtagtttggtatttggtgcttattaaaaatgtggtttgttttgaactggaagcaagttgaccaaggacttatgactaatgtgatgctaagttccacttggccccttttaaaaacgtgtatgtgccttttgaagatacacaaaacactgaggattttagttttgaaatcaaagactattaaaggagctgtacagaggtaaaaaaataaatgtggaacattattaacttactttgtgtctaggaacaatggattttgtatctgatttaaaatgccaacactgttttgtctctgttcattttttctgtgaggatacttaaggttattattcctgtctgtttcctgtactcccctagtcatgagcacttgaagtacaaggtgtctccccctaggtgcaattaggttgtttctttgtttttagtttcaattctatgtgcatagcaggaatgctccacaggaatggcttctgacaataatctgtcctgttgattttgttttccttgcccatgacttgaacaactgtgttttaaagtactgtagtctagtaggtaactttgtggcaaaaattttcaatataatacattctgaaacaatagttgctgccttgcaaaggtaatctctcattttaaaattggacagtattaatgaaggggaaatatacaatttatttctattgagtggtagaactatatgtctggtcccttgctgctcttgtttaggccactatcatagatatatttcaaatattgtactactcagtgttaagtattgaatgactgtttccctttccttcaaggcctagagtatattctgaaaatttaggaatgaggaagaaatcttaatacttccttccttaacatacaacatgagtcccgagaataattgatagtagcaagagaaaactatgtcagtaacatgttgctttgtataaaaatcttatttataaatgtgaagctttttgatgccatcaaaacttattaaaaaataggatttacttttttctaattctgacctaagaaaaataatgagaacaagctgttgcaagctcttttgtagtctattgaatattttatagatattcaaaatttcctacaaactataattttttccatgatttagcagtgagtgattttctagctttggctcttattaggtattgtaaatagtagggttatatcgatatcagcttttgtgatggcattgtggtcatcagcttcatgacattttacccatttgcagtgatcctgtgtaaaactgccaaggaaagtaattacctgtaggagtttgctgagcttgaagagtgaaaactgttgtgaatgagcctgatcataaaacggaccaggccattcattattcctcaagtgttaatatactgacttatgcagtattcaaaccatctagtgcaatgtttttgtttttgttttttttttggtaacacaggtgcagtgtattatagaaaaaataaaaactacaatcattagcagttttaatactgctgtgtcagttttgtaaaaaatgtacattatgtcttttgacatgttgaattttaaactagggaaatgacattgtaaatcatagtagcctcttttaatttaatatgaaaaatgccactatattgaaagtacttaatgtattgtatatatttctctactttggttctagctattttatatgattgacatgttatttaaaagataactgccttgaacttttggagacttgtactgtaaataaagaaatcttaacaataaactcagaatctacttactcca

SEQ ID NO: 9536 - DNA, 523 bp, Homo sapiens
tcaccatctggaatccaaacacaggctggacagctgggccataggatctcatgccagcctgtccttctggcttcctctgtcccacgtggctgagggtatttggtgtgggttttgttctaccctttctcatttctcccacacctcctccccataccttttttggttgattccttttatttcttgttttctccctcagcaccaccatgcccagtgtaaagcttgtagtctttaaaaggaactacatctgactgctcttcccataatgtgcaacttccaaggtggcatttctttgcatttataacatggatgttctgctctattcttttctctttcttcatttaacattttaaagcctatttgcctttgccgttacccagtaacataatatttcactaaacccattaagatgcttgaactagattgggggaaaatcattcacacattccaaaatatctccataataattcataatgcttattatgtatattctatatttattaaaacaatttcttctctaatgtaa

SEQ ID NO: 9537 - DNA, 840 bp, Homo sapiens
atggacatttgtggctgactttcatgggctggtccaatggctggttgtgtgagagggcttggctgatactcctatgcttgagttcaaaggctgaaaattcagttaaggtgttacttaataatagtttttaggctccatgaattggctcctgtaaatactaacgacatgaaaatgcaagtgtcaatggagtagtttattaccttctattggcatcaagttttcctctaaattaatgtatggtatttgctctgtgattgttcatttttttctgctacttttgggtagaaaaaagattcaattgcttggctgtagctttctctcatatatatcaccctaaatataatgaagatcttttagtgtgtatcattttccttttagaaactagtattctcttatttcttactttaatgtacttctatcactgcatttattttgcctgtgcataggagcaattaggatctaaaaaaatatatgggaagataaaagatctaagaacaagtacttgctggaaaattagttggctggacattgataaaataatgcatttataacaattacatgtgtttctgggaacaaggaaaatttctcaaaaaagaatatttcacacatcccttcttttgaatggcctctttgtgaccagccagacctcaggtcttcactctttcttctttgtaaactatgtcatgtggaaagatttcctcagttagtgagcttgtgtctgcaaattgattttgtttgtaatgtattttgatagcaaatcatgctgcatctatatctttttcttgtttgagctgttactacattgtacatggcatgtgggatcaattaaaaatttgtttt

SEQ ID NO: 9538 - DNA, 3713 bp, Homo sapiens
atatttctcatttagcattgaaataataatatttaggcatgagctcttggcaggagtgggctctgagcagttgttatattcattctttataaaccataaaataaataatctcatccccaaactgtagtaattgttacaattttctatttaaaaaatgaatagtacatgcagaaattgacctgatttccatttgcaacaggaagacactggctttacatgggttcaattggacaattatttttgctctgctctgttttgcatggagtattattattttaaaaattgcatttttacctttcatgtgcctgaaggctatccactacattctgaaggccttgttaaaatccaagctgctcatttcactattctgtttctgagtgagaagataaaaactgcccattgtaacttatttcaggttaaattaaaccaaggagtctgattgcaggaagggaagagcatgtaagaaataagtttttttaaagtgttattttgtataaatgggaagaaagattcaattaagttattaacatttgggacctggataattatatcagagtatgtcagtccaataaattatttaactaattaaaaaatagttgcaaagcatttgagctgtggttgaggaagtggtgtaaaagtgcatccattaggaatgatgcactttcattaggatggactcgtgtctgattagaatgtcagttgatcagctagatttgtgtccacactaccagtttcacaccccctttccatctgtttgatacagtattatagatataaatatatatatatttctctgtggccatttgtgatacttcctcatatacttgaatattatacttctttattcacagtatctgtgtctcctgcaccctttggtgttgcaattttagatatgtgaaagtagatgttagcagggttctctccctatttaaaaaaaatacattaaaaaagacaaaaaattttagcatgaagttgctttctgtaacaactcaaagccgtaaccctgttttagtgccagatacaagtctctcccgtgatgctagacaaaaaattatttttctttgctttcaccaacatggagtttgtgggggtgggtccagttatacatgaaagggtttacagattgttggtttaagattatggatttatctcatttttaatcacaggatagtttggggtttattcctattattattcatgaaaccgacttaagattttttctttatttttctttttttttccatttgctaaagttgaaagttgaaactaactataatagtttgaaacatgttttctcatttttccaaatagtatctgtttattaaattctctaatagaagatgtttgtctttcttacccaaagtaaagatcccctgatcagaaagaaaaaatacaatactttgggaagctatagctataaaacacttgagacacagatatctaaatcagtttttttccaagactccaacattgcactctgtaaagtaacacactgtgatctagtattatttatcagtagataatactgttctgactgtatatacagtctagaactcacaaatcaattagttcctctcacaaatcattcatcttagacttacaaataaggaatgaaatagtcaatggcctgattaaggcaaagagctaccaggctagatggacactttttaaaaattttatctgttctttttcttgctcagggctggtaggttggatctgaaccattaaaatcaaatggtccactaggcgtatgatctctttgagccaaatcagttcctgaatataaaggaggaaatgatgaggatgtactgaggcaacggggaagtatagaaacatccaagacaaaagccaagggatgcaaaggcagagacacaggtgctttttggtgacccagtggatatggcaaccagtgtaactgccatacaagaaaccctaggagcaaacccacaccactcattctcagctaagagattttacacaggcaaacgtgtcttaaaccatctataaatcagttattttatatgacagtcaaaaccttagaaaccttaggatcattatatctattttctgcctattaattgctgtgaggtttgatttgaccaatctgggcaatttattcatcagcttcccttgaagtgcaccagaaaatagaagaaaggtgtgtggagacttagggtattttattacatgttttcatagtcttaaatagtgattaaatttctctagaaagaagttaacagctcattagaaaagttttaacctgtgaaataagtatttttctcaacattctttaaagtttttatataagttaacactaggtaaacattctgcatactagaagtcagtttattacaaatacatgtcaaaaataaagattatacaaggcaccaaactactagatttggcattaaaacaaatgtttatttctaatcacaacaaaattataatgaataaatgttcttgctttgtatggaaatacaattctttattaaagttaacagaaaggaactgatcgtttgtaccagtaaaagagagaaacacacaggttaaatatcttcttgtggggttaaggggtagaacctatcttgccttcactctcaagataacgactcaaattaagctttttgagcaccactcttgtggggacacacatacgctgatctaggaatgaaatcttcgtggtctcaattctagatctactatgccagtttctctctggctttagcctttgagaacctgtataagaatacgtaagtaatccagagctgtgaagagtttaaaggccaacttctccagtgaactcaacctctgggtcacttgcaaccagaaattggatacctcataatgatgcaggaaagacccgagttcatgatgagtttcaaaggccacgttcatttaggaaccaactctctctggatttacctgctgagttccagcagcgtgatgggctgacatcccacctacaagtatgacacctgtgtaacaccagctaggtacggctggagaaggctgaagagagaatgccattaaatggaagaatgtactgattgtagtgaccttctccacacacacacacacacacacacacacacacacctacagtaatacagcaagcgtggaataatcagccaatatataacattccatcagtattttattaaggaaataacctgaatgtggttgattttgacatagctgcaattacagttttcttctatttttcaagccacaataaggaaaataaactactcatggtctaaatactagagataaagtagattcatggcttggtaaggaaattttaagcattccttcaaagattgacgtgctaaaataagcattgatgttttgagtttttttacacctaggatttttagcttgggtgtgtaggtgaaggccaagactctctgcaggaaaaagcttattttcaaactcagaaaataaaatgtcaatcataaaaatctacttcaactttagcaaaaagaaaaaaaaatcaacaaaaagtatactctgtatgctgggattccgaggttccaacacactgttacaaatctgtggggggtttctttcttctgataattctagagcctgttaccatagaaaggcatttcttcaatggctggttgtagttagttcatgtttttcaatcaaatttgcaaatgtatttgttgctgtatagtgattgttttgcaaaataaaattgcttgtcacct

SEQ ID NO: 9539 - DNA, 1728 bp, Homo sapiens
ttctgaggccttctcagccatgtggaactgtaactccaattaaacttacttatgttcccagtttggggtatttatcagcagcaagaaaatgaactaatatagtaaattggtaccagtagagtggggcattgctgaaaagatacccaaaagtgtggaagcaactttggaactgggtaacaggcagagattggaacagtttgaagagctcagaagaagacagggaagtgtggaaaagtttggaactttacctagagacttgttgaatggctttgcccaaaatgctgatagcgacatagacaataaaaccaggctgaggtggtctcagatggagatgaggaacttgtagggaactggagcaaaggtgactcttgttatgttttagcaaagagactggtggcattttgcccctgtcctagagatttgtggaactttgaacttgagagagatgatttaggttacctggcggaagaaatttctaaacagcaaagcattcaagaggtgacttgggtactgttaaaggcattcagttttaaaagggaaacagagcataaaagttcagaaaatttgcagcctgactatgcaacagaaaagaaaaaccaattttctggggagaaattcaagccaactgcagaaatttgcataagtaaggagcaaggagcctaatgttaatccccaagaccatggggaaaatgtctccaagccatgtcagagaccttcacagcagcccctcccatcacaggcccagaggcccaggaggaaaaagcagtttcgtgggctgggcccagggtcctcatgctgtgtgcagccgagggacttggtgccgtgggtcccaactgctccagctgtggctgaaaggggccaatgtacagctcaggatgtgacttcagagggtggaagccccaagtctcagtagcttccatgtggtgttgagcctgcaggtgcacagaagtcaagaattgaggtttgggaacctccgcctatatttcagaagatatatggaaactcctggatgcccaggcaaaagtttgctgcaggtgcagggccctcatggagaacctctgctagggcagtgcagaagggaaatgtggggttagaggccccacacagagtccctaatggagtgctgccaggtggagctgtgagaagagggccactgtcctccagaccccagaatggtagttccactgacagcttggatcatgcacctggaaaagccgcagacactcaacaccagcctgtgaaagcagccgagagggaggctgtaccctccaaagccacagggtggagctgcccaagaccatgggaacccacctcttgcatcagtgtaacctggatgtgaggcctggagttaaagaagatcattttggagctttaaagtttgactgtcctgctggactttggacttgcatgccccctgtagcccctttgttttggccaatttctcccatttgaaacggctgtgtttacccaatacctgtacccccattgtatctaggaagtaactaacttgcttttgattttacaggctcataagcgcagggacttgccttgtctcagatgagactttggactgtggacttttgggttaatgctgaaatgagttaagactctgggagactattgggaaggcatggttggttttgaaatgtgaggatatgagacttggaggcgcaaggggtggaatgatatggtttggctgtgtccccactaaatctcagcttgaatgtt

SEQ ID NO: 9540 - DNA, 1774 bp, Homo sapiens
aaccataaggagcccagtgttcctgttcatgaaatctcccttttactggaaaacaggaatattgactaccaaatcacaatgcaattgaagccgtactgcttttttgagcagttattcattccagtgattaaaactgattgtgcagaatattctaagaggtcagaaattggtgtgtataactacatttttagtgatgcaatttattgattagtgagtaagatactgtttttattgagagatttgatttttataaagtaaaaatacggctgcattagggttacaaacagaaaagtgtcttaatgtctaaggagggcatattagctacactacaaaaacaaattttgtctgtacttctgaaaagaattttgttgtttctcagctgttttccaaaagcaaaggaagtctttatggtttttttctatttcatgttattgtgatttgtttataagtttgggtggggtgcataccatattcttggttcttaaaatctatcacttttcaccttacacttgatgtgtgaaaactataaaaacaatgtgtgaaacccaggggttctaaaatacaagcatagattttatcagggtgttttgtcaaagcaggttattcagtgattcctccccaccattcttaagaacgttaaataatgctgttgtgttagctctgagtagaaaggaaaaagtaaaacctctgtttggaggtaatattgggttgaattctgactgcccctttctagctggacctttaacaaatcacccaatcttttttgtgtttctctaaagtcatttatacattaaatgtaattatagcaactgtggggttctgttgagaattaagagctaacactatatatgtaaagtttccagtactagtcccagaatttagaatatgctcaacacaaagtaaacagcattatataagtttatatttttgtgagttataaagtactttgatatattctcattaaatctgtaaatcacctctataagtaagtggtaataataaagcagatatttttgtccccatttaaaaaatgaagaaattaatgcttaatagggtggtaccctggaaaggatctgggaagtggtagaatttctggtctgtacttttacaaatggagcccttgggaggtgggttaggtaaaagaagctttttacttaacgttgtcttatttccagtctaattttacgctgtagcagaaccagatggctgagaaaattctggaactatggatcttgaccccaaggatatattattttattccaagaaagatcaggtaggcgaaaagatgacaggatacagagtcaatccataaactaaatatttataactgttctgaattatacagagtctaaaaatatgtgtcagctacttcattcctgtaaatactcttgctgtgttataaatatggcaagaaataaacatgaccaatatcaatagacttcttgaggctactataagttttgagaaataaggttcaaaaaataagaatgctaacacttaagcacagactagagcttgcttgggtttcttcctgcattacaaggtaaaaatttgttaatgtttgtttttattcagcttgggaaagctttgtgccatgaatacgtcgcatttaataacaagcaacacacggcatatagaaataactttaattaaaaaacttacatagaagattataatatcagacgtgacaaagatttgagtttatttgcctggacaacttgggtttgtctggcttttgttttctttttctttaaaaataaatgtacagtaaaac

SEQ ID NO: 9541 - DNA, 1120 bp, Homo sapiens
agatgcagacaccccagccccattattaaatcaacctgagccacatgttatctaaaggaactgattcacaactttctcagagatgaatattgataactaaacttcatttcagtttactttgttatgccttaatattctgtgtcttttgcaattaaattgtcagtcacttcttcaaaaccttacagtccttcctaagttactcttcatgagatttcatccatttactaatactgtatttttggtggactaggcttgcctatgtgcttatgtgtagctttttactttttatggtgctgattaatggtgatcaaggtaggaaaagttgctgttctattttctgaactctttctatactttaagatactctatttttaaaacactatctgcaaactcaggacactttaacagggcagaatactctaaaaacttgataaaattaaatatagatttaatttatgaaccttccatcatgatgtttgtgtattgcttctttttggatcctcattctcacccatttggctaatccaggaatattgttatcccttcccattatattgaagttgagaaatgtgacagaggcatttagagtatggacttttcttttctttttctttttctttttttctttttgagatggagtcacactctccaggctggagtgcagtggcacaatctcggctcactgcaatttccgtctcccaagttcaagcgattctcctgctttagactatggatttctttaaggaatactggtttgcagttttgttttctggactatatcagcagatggtagacagtgtttatgtagatgtgttgttgtttttatcattggattttaacttggcccgagtgaaataatcagatttttgtcattcacactctcccccagttttggaataacttggaagtaaggttcattcccttaagacgatggattctgttgaactatggggtcccacactgcactattaattccacccactgtaagggcaaggacaccattccttctacatataagaaaaaagtctctccccaagggcagcctttgttacttttaaatattttctgttattacaagtgctctaattgtgaacttttaaataaaatactattaagaggt

SEQ ID NO: 9542 - DNA, 604 bp, Homo sapiens
atgacattttcttctttttcttttggactaaataaaagagttgagtgaagctgatatatgtaatataccagagccttaatttttgaaaactgaatttttctagttgtaaagaatgtgagaggcttcattagcaaattaattaaacagatgatcagaactatcacaattataacttaccaacaagaagggaatgcaggtagttgtttaggagatggtacattttttatataacattcacttccttgtgtatttgatagtcttttcatggtttataacattttctcctgtaaagataggctaatttctgaaataataattaaatttatagaaagccgagaggaaattgctagtttattcctggtagaggaatttctgtatttgaaaattctccagaaggaataatataaactgtggactttgggtgataatgatatgtaggttcgtcagttgttaacaaatgtatccctctgttgggggctattgataatggggaaggctgtgcatgtgtgggagtaggaggtgtatgggacatctctgtaccttctaatcaattttgctatgaacttaaaactgctctaaaaataaagtttattaaaaaaaagtt

SEQ ID NO: 9543 - DNA, 185 bp, Homo sapiens
ccgtcagcacatcccgctgcagagggcattccctttaaggcttgaaaatgcctcctgtagtcccaaaccagcaaagaactggttaaatgtgccagcaggtaacatttacagtctgctttaaaacatgctttggacatatattttagtgctcatactgttactaataaaaaaataactttatgctc

SEQ ID NO: 9544 - DNA, 99 bp, Homo sapiens
ttttaccacacactgttttttggcttgcttatgtgtaggtgaacagtcacgcctgaaactttgaggataactttttaaaaaaataaaacagtatctctt

SEQ ID NO: 9545 - DNA, 2229 bp, Homo sapiens
actcccaacaacttactccctcctctggccccagtagcctatatatcatcttaaaattccagcagattatttctttaaattaccccctactctccgcagttcttctgggaaatcagagtccatactgatcagttttaccatcttgagggttccaggagggcatggagcagacaagcaattgtgccaaagcagttcacccaatggacaaactctttttgattccctgccctaaaatcaccatttatttaggacaatggaactctgctgtgtgtcgttttgggagcctggaagtgttactggtgcctggaactgaggggagtatgtgactaaatgtgtcagggagaataaagaacctcggggtaaccaaatccaccaagataatagacagggatggagtgagacatttaggaagctggactaccacagtgtagcagaaggtaaagatttgtgtgtatcatttagatttagatttagctgcatagaattaaaaccctaaaatatcagtggcttaaacaagatagaagtgtatttctttcttgtgcagaagaagtctggaggcagaccatcctgggaccctgtgaagtaatccaggtcccaggcttcttctatttctctaccattagtaggatgtgacccttctcacccttatccccaacatcccagtgctgattacatcttcagccatcacatccatgtttctgataaaatagaggaaagggcagagaagcacacacccttcctgttcaaggagacttcccagaagtcccactcgattcttcttatatctcattggcaagacctcagtcacatgatgtcatgagcaaaagaggctggaaatgtagttgtttggctgggtagctatattctcagctaaatactgggttcacgctaattggcaagaaaaaggaagaatggttatttgggttttgttttgttttgttttgtttcgctttagagacggagtctcactctgttgccgaggctggagtgcagtggcactatctcggctcactgcaaccttcgcctcctgggttcaagcaattcttgtgccttggcctccccagtagctgggattacaggtgcgtgccaccatacccggctaatttttgtattttttttttagtagagatggggtttcaccatgtgcccaggctggtcttgaactcctgacctcaggtgatccgcctgcctcggcctcccaaaatgctgggattgtaggcaagaatggttatcttggtaggcaagtcagaatctttgcctcacaatgatcatttaaatacattcagaacccccaaactgctaatatggttttatttatttatttattcattcatttgtttattcatttatttatttaggcctgaatcttacacagagaatttatatatagatattagctacatatactttgaatatgctatacatcgatattagcacctcacgtactttgcaattaagcttctgtaatgtcatgtgatttgtttttggaaaggaatagtggacaggagagtacaatttataatagtagcataactctttgtcctggtggtggaggtgggacgaggtggtgatatttaacctagattaaagaccaggaagggaggaattgcatctgccaaagtttcctccaacagcgatcagtagccctaagtacaaagaagccagatttagccttctgttgtttggcaaaacctcactcagagctttactccctcagacctttctgagtttaaccacagacatgatctttgctgtgctgagaaacttgtgtctacctggcctgtagggagtgtaaactagattaatacagattaacagactctgaacttaaaaaaaaaaatcactcctaagggtgtccttctaatttcaaaatatcaactcctaagaggtcagcagaatttggagatttgggtccttataagaatagctggtgctcttttcttgttcatgtctcaaaacaaagctgttgagagaactgctgcgatgaatcaaaccagaggagtttgtcatgctccccacagagagcccaggacatttgcctgatgtatggtgctgagctccaccttcagaggaactctctcttttttttttttttaaataactattattagcttgacaagaaaaaaaaagtgcccaacagttttagtgttaatcttggtgctctatggtgcattagcagagatatgaacaattaaatgaagacaaagaaaataaaaataaagtctgatt

SEQ ID NO: 9546 - DNA, 1078 bp, Homo sapiens
gtcgtggatgtatggggaatctaagagagctgccatcgctgtgatgctgggagttctaacaaaacaagttggatgcggccattcaaggggagccaaaatctcaagaaattcccagcaggttacctggaggcggatcatctaattctctgtggaatgaatacacacatatatattacaagggataatttagaccccatacaagtttataaagagtcattgttattttctggttggtgtattattttttctgtggtcttactgatctttgtatattacatacatgctttgaagtttctggaaagtagatcttttcttgacctagtatatcagtgacagttgcagcccttgtgatgtgattagtgtctcatgtggaaccatggcatggttattgatgagtttcttaaccctttccagagtcctcctttgcctgatcctccaacagctgtcacaacttgtgttgagcaagcagtagcatttgcttcctcccaacaagcagctgggttaggaaaaccatgggtaaggacggactcacttctctttttagttgaggccttctagttaccacattactctgcctctgtatataggtggttttctttaagtggggtgggaaggggagcacaatttcccttcatactccttttaagcagtgagttatggtggtggtctcatgaagaaaagaccttttggcccaatctctgccatatcagtgaacctttagaaactcaaaaactgagaaatttactacagtagttagaattatatcacttcactgttctctacttgcaagcctcaaagagagaaagtttcgttatattaaaacacttaggtaacttttcggtctttcccatttctacctaagtcagctttcatctttgtggatggtgtctcctttactaaataagaaaataacaaagcccttattctctttttttcttgtcctcattcttgccttgagttccagttcctctttggtgtacagacttcttggtacccagtcacctctgtcttcagcaccctcataagtcgtcactaatacacagttttgtacatgtaacattaaaggcataaatgactc

SEQ ID NO: 9547 - DNA, 72 bp, Homo sapiens
aaggggcaaaaagaaaaaaataaaaagcattttaaaatcatggaattgaaataaaataatgtattttgtttt

SEQ ID NO: 9548 - DNA, 59 bp, Homo sapiens
acgctcctctactctttgagacatcactggcctataataaatgggttaatttatgtaac

SEQ ID NO: 9549 - DNA, 329 bp, Homo sapiens
accgcagccagccggtgcctggcgcccctgccccccgcccctctccaaacaccggcagaaaacggagagtgcttgggtggtgggtgctggaggattttccagttctgacacacgtatttatatttggaaagagaccagcaccgagctcggcacctccccggcctctctcttcccagctgcagatgccacacctgctccttcttgctttccccgggggaggaagggggttgtggtcggggagctggggtacaggtttggggagggggaagagaaatttttatttttgaacccctgtgtcccttttgcataagattaaaggaaggaaaagt

SEQ ID NO: 9550 - DNA, 86 bp, Homo sapiens
ccaagaccaagaccagcccatgactggcctcccacctgcctgcccatcccactcaatccactccctgcccgtagctcttcccagcc

SEQ ID NO: 9551 - DNA, 1368 bp, Homo sapiens
gacctcctgcctaagtgcagccccgtggggttcctcccttctcttcacagtcacattccaagcctcatgtccactggttcttcttggtctcagtgtcaatgcagcccccattgtggtcacaggaagtagaggaggccacgttcttactagtttcccttgcatggtttagaaagcttgccctggtgcctcaccccttgccataattactatgtcatttgctggagctctgcccatcctgcccctgagcccatggcactctatgttctaagaagtgaaaatctacactccagtgagacagctctgcatactcattaggatggctagtatcaaaagaaagaaaatcaggctggccaacggggtgaaaccctgtctctactaaaaatacaaaaaaaaaaaaaaattagccgggcgtggtggtgagtgcctgtaatcacagctacttgggaggctgagatgggagaatcacttgaacccgggaggcagaggttgcagtgagccgagattgtgcccctgcactccagcctgagcgacagtgagactctgtctcagtccatgaagatgtagaggagaaactggaactctcgagcgttgctgggggggattgtaaaatggtgtgaccactgcagaagacagtatggcagctttcctcaaaacttcagacatagaattaacacatgatcctgcaattccacttataggaattgacccacaagaaatgaaagcagggacttgaacccatatttgtacaccaatattcatagcagcttattcacaagacccaaaaggcagaagcaacccaaatgttcatcaatgaatgaatgaatggctaagcaaaatgtgatatgtacctaacgaagtatccttcagcctgaaagaggaatgaagtactcatacatgttacaacacggacgaaccttgaaaactttatgctaagtgaaataagccagacatcaacagataaatagtttatgattccacctacatgaggtactgagagtgaacaaatttacagagacagaaagcagaacagtgattaccagggactgaggggaggggagcatgggaagtgacggtttaatgggcacagggtttatgtttaggatgttgaaaaagttctgcagataaacagtagtgatagttgtaccgcaatgtgacttaatgccactaaattgacacttaaaaatggtttaaatggtcaattttgttatgtatattttatatcaatttaaaaaaaaacctgagccccaaaaggtattttaatcaccaaggctgattaaaccaaggctagaaccacctgcctatattttttgttaaatgatttcattcaatatcttttttttaataaaccatttttacttgggtgtttat

SEQ ID NO: 9552 - DNA, 432 bp, Homo sapiens
tcttgggaataagaggaggaagcggctggcaactgaaggctggaacacttgctactggataatcgtagcttttaatgttgcgcctcttcaggttcttaagggattctccgttttggttccattttgtacacgtttggaaaataatctgcagaaacgagctgtgcttgcaaagacttcatagttcccaagaattaaaaaaaaaaaaaaaagaattccacttgatcaacttaattccttttctttatcttccctccctcacttcccttttctcccaccctcttttccaagctgtttcgctttgcaatatattactggtaatgagttgcaggataatgcagtcataacttgttttctcctaagtatttgagttcaaaactcctgtatctaaagaaatacggttggggtcattaataaagaaaatctttctatctt

SEQ ID NO: 9553 - DNA, 142 bp, Homo sapiens
aggaagggcctctgctgactcctaccagagcatccgtccagctcagccatccagcctgtctctaccgggccccacttctctggatcagagaccctgcctctgtttgaccccgcactgactgaataaagctcctctggccgtt

SEQ ID NO: 9554 - DNA, 1811 bp, Homo sapiens
tgcccccagcgcccccagcccagcccactccccgcatggggaggccgccaccaccaacacctcatcatccttctcatcgctaacaccaccacctccatcggcacccaagcgggcatcatccccccacactgctcaggggaggggagggatcaggcgatgagactgtgaggccaaaagaagggggcctgttggaggctgggaaccccgcagcgcgaggctgcctcatcaacggcaagaggaaaggaggggtctcgggacatctccagaccctaccaactgggagggtcccctcctccttccctactcctgggacggcagcaaggacatgggggctgctgttagcttctccgtcaggaggcctcatctcactgtagccctggaacccagggtccatcttgcccttcccccatccatggttgggaaagaagctcagcccctcacagtggcctcaagtgtgatgccttacaaaagcaccactcagatgggcagctggactctggtgtcctgagactctgccctcttcccacagcctccctgccccacccatccctgcaaagccatttttcagacagagccattcctaagaacactgaagggctggaatgctggctggccactctctgcctcagtggcctccctacagcctggaagaaggagggtcctgattgccaaggaaacctcctcattgggctaaggagacactggagtctggagtgtggagccccacagtcttgcaggtcacatgctctccttgcacatctggcctggttgtacccactggcctctgcctctgccctgggccaaaagggcccctccttgccaggggagagacagccacggtcctctttggccgatgctgtattctcattttggcccttgttcttaggcccgtctgcccgccttcctccatctaacctttcctgttttatccgcagcccttttcttctttgagttagtaaagatttattctgtaacctgacactcatctggccctttgcagtttgccagccatattcccatgtgatttcccactggatccaggcccccatccggctggcaggagggggctctgacgtgcaggttggaaatcagaagtctgtgagagcgcgggagtgcatggcagctctgggtcccagacctggcccgacccctctgcttcacctccagctctgctgctcctctactcttgggtcgagatccctttggagccacagcgaggaaccctgtggtcctcaggcaggtgtaccttgagtcagccaggagccctcttttcctgtgtcaaagcctgccctcgggctctgctcacctctggtgaccctccaagatgcccctgccctcagtttcccctcatgatctggcctctgcccccttctctagccacagcctctagtacactttagcaataccaccagactagttagagttccccactcaccaagcaagacatgcagtttcatgcctctgtgccttcgctcatgctgtttcttccgactggaatgccttcccctgctcctcctgccttgtctgcctggcaagttcatctctcacgatcccctcaaaggccccctcctccaggaaggcaacccctgtgcccctcccctccaggctacctctgcactttgtcaatgcttctcttgtggcacttatcacactgtattttacttgtttacatgtttgtctccccttctagactgtgaatccttaagggcatggactgtatcttatgcatctctgtatttctgcgcctagcacggtgcctagcacacagtaggcgctcaataaatgttgaatgaatgaatgatttaatcaag

SEQ ID NO: 9555 - DNA, 129 bp, Homo sapiens
gcggggcccaggcccggacagggcaggaaaccaggggtcgggctgggacgcgggcgggacgcgccggggcgggtgcgctttccgggctgcggttttgggggaataaatggggccctcccgcttctctgc

SEQ ID NO: 9556 - DNA, 1858 bp, Homo sapiens
gcccacaccagggcctggctgggagtggcatgtatgacgtgactggcctgctggatgtggagggggcgcgtgcaggcagcaggatagagtgggacagttcctgagaccagccaacctgggggctttagggacctgctgtttcctagcgcagccatgtgattaccctctgggtctcagtgtcctcatctgtaaaatggagacaccaccacccttgccatggaggttaagcactttaacacagtgtctggcacttgggacaaaaacaaacaaacgaaaaacatttcaaaaggtatttattgagcacctgcaggcgtgacctgacagcccaagggtgggtggggtgagggcttgaggacttgggcgggacacaggctccaaactggagcttgaaatagtgtctgatgaatgttaaattatctatctatctatttatttatttatttgagacagggaaagggtctccctctgttgccaaggctggagtgcagtggcgcaatcttaactcattgcaacctccaccttctgggttcaagcgattctctttattcagccccgggagtggcgcgcgccaccacgcccagctaatttgtgtattttcagcagagacggggtttgccatgctggccaggctggtctcgaactgctggattcaagtgatccgcccatctccgtctcccaaagtgctgggaattacaggcgtgagccaccaaacccggcctgattaaagttaaataaatactagttcccttctcgtccaaaggagcagggaatgggaaccgggaaggcacgaagtctctaaagcatccagaagacccctacaccagggtctggtccgctcctattcgccgcagcctttctgttccgcctgcaacccattttccagacagtaaaacggcggcgcacttctttctccgtcaggcaccaggtcataaggaacccaagagtctgtgcctctgaggcccaaattatttgctgtttcctcaggggagccggcggccgcgactcccacgccgcgccgttaccgctccctctctgctgactgctccccctaggggcagagacggtcccgacgcccgccatcccgccccggcctcacccctccccgccaggcggaacgacgcggggaggcgggcgctcggggctcgcgccaggggccccagaatccttcggggagagtgggtgggaggaagctgtgtgggcggggagccccctctgccttagggagcggctgggcacccattcgccccattcaggggctgcactttatagacgttccctaggctgtttctaggctcccccaagtccctcctccagcctcgtcgggtccctcagaccccagcccaggacctgcggagggccgcagcgaggagaggccaacaggcctttccctagagttgaacctgggccgggtgttgcacctggaagaacccccgatttcctggggacccagcagggcaggcggcctggctccgcgctcaggtccggacgcttgtttatgagaagaatttcctctttcttaaaagggcaacgatgcgagtgggtccctcaaggagagaagagatgggaccggtctggtgcgacctgggcaagcgctgcagagggtacctgggcaagagggccgcccgcctcctctgggtttggcactggagaagatgggtccatgccagctgaaggaggagatggatgggggacgtttagcgaagaaaggcatctcccagatcctttagcctcctggaagtgcccccgttgtaccccctacacacccctcttggcattgagtgccagtcctctgccaggctctgtgttacaagttggggagggcggcaaagtcccgaattaaagatgtcagttctcaagg

SEQ ID NO: 9557 - DNA, 1515 bp, Homo sapiens
tgagggtgatggggccaggacctgcccctgaccaatgatacccacacctcctcccaggaagactgcccaggcctttgttaggaaaacccatgggccgccgccacactcagtgccatggggaagcgggcgtctcccccaccagccccaccaggcggtgtaggggcagcaggctgcactgaggaccgtgagctccaggccccgtgtcagtgccttcaaacctcctcccctattctcaggggacctggggggccctgcctgctgctccctttttctgtctctgtccatgctgccatgtttctctgctgccaaattgggccccttggccccttccggttctgcttcctgggggcagggttcctgccttggacccccagtctgggaacggtggacatcaagtgccttgcatagagccccctcttccccgcccagctttcccaggggcacagctctaggctgggaggggagaaccagcccctccccctgccccacctcctcccttgggactgagagggcccctaccaacctttgcctctgccttggagggaggggaggtctgttaccactggggaaggcagcaggagtctgtccttcaggccccacagtgcagcttctccagggccgacagctgagggctgctccctgcatcatccaagcaatgacctcagacttctgccttaaccagccccggggcttggctcccccagctctgagcgtgggggcataggcaggaccccccttgtggtgccatataaatatgtacatgtgtatatagatttttaggggaaggagagagggaagggtcagggtagagacacccctcccttgcccctttcctgggcccagaagttggggggagggagggaaaggatttttacattttttaaactgctattttctgaatggaacaagctgggccaaggggcccaggccctgtcctctgtccctcacacccctttgctccgttcattcattcaaaaaaacatttcttgagcaccttctgtgcccagcatatgctaggcccaccagctaagtgtgtgtggggggtctctacgccagctcatcagtgcctccttgcccatccttcaccggtgcctttgggggatctgtaggaggtgggaccttctgtggggtttggggatctccaggaagcccgaccaagctgtccccttcccctgtgccaacccatctcctacagccccctgcctgatcccctgctggctgggggcagctcccaggatatcctgccttccaactgtttctgaagcccctcctcctaacatggcgattccggaggtcaaggccttgggctctccccagggtctaacggttaaggggacccacataccagtgccaagggggatgtcaagtggtgatgtcgttgtgctcccctcccccagagcgggtgggcggggggtgaatatggttggcctgcatcaggtggccttcccatttaagtgccttctctgtgactgagagccctagtgtgatgagaactaaagagaaagccagacccct

SEQ ID NO: 9558 - DNA, 182 bp, Homo sapiens
gaagagtagctgtggttgtaaagcagtaccctaccctgattgtagggtctcattttctcaccgatattagtcctacaccaattgaagtgaaattttgcagatgtgcctatgagcacaaacttctgtggcaaatgccagttttgtttaataatgtacctattccttcagaaagatgatacccc

SEQ ID NO: 9559 - DNA, 604 bp, Homo sapiens
ggtgggcatttcacgggaagggttggtgtgctggctttagacggggagaaacatctggaaggatgctcgagagaacaaatggaggtggtgaaaatcaagctttggattgtgcattcctaggcacaaaattacctcattcttcctaacaagcaatctgggacctgattttccaccttttttctcttttcttcccttcctttgttttcataagcctttggtatctttcctgcccttttcctttgtgtactctatactggagttcccttcttcctcttgctgtaggctcaatcccataccgacatctacaactaatctttcccatcaactctgtgtgaaggcaggttgcaactagaaattcagaggggcttggaatagagaaacctaaagaagcatcatcccctccatccccaacttcctcaaagcccaaagccaagggaaggataaatcaaggctcaaggcttccccagcaaagattagggaaagagacttgaccccaggactgtactacgactcttaagagaacactgcacagcactcaaagtcccccactggactgcttcctccttagccccactggtataaatacatctctctccaatttggc

SEQ ID NO: 9560 - DNA, 57 bp, Homo sapiens
tcaggctgggctcagctcagctctcctcctctagctcaataaacatctgccacacta

SEQ ID NO: 9561 - DNA, 704 bp, Homo sapiens
ttccagattcctgcggtccagcctccaactttggttgccagctctttcttattctactacacaagccgccaactcaactgagagctaaagagactagaaaagagataagctgccaactcaactgagaacaagaaactagaagagatttatatataaagcttcttccttctcccagatgcaggatgttttcaaccagtaaattttattgctgttggtgccagagaagagtcctttcttctctacatccaggggccttttctccaataatgtgcctttaactctagggacctgcctcacggaccttagggaaaaacctcaacctgaaagatctcttcctttctggagctcctttaatcttcccagcaggtttttgccttagacgtgctggccccaggacagtgatgaagacagagcctgtctcagctctaggctgtggggatcaatgccatcagtccctgttattgagggattatcccttagccaacattcctatctgtgggtgggcgtggagagtgtatctttttttggggtgtgtgtgtatatgtgtgtgtgtatgtgtgtgtgtgtttaatagttctgtttgtaaactcttttaataaaagttgtgcctcaccatacttgaagctcccaggacaagggttgagaggctcaacccctctttcagcttctatgtggtgttggaggtgctggtatcgtgttcacac

SEQ ID NO: 9562 - DNA, 296 bp, Homo sapiens
ctggcctctctccaaaagcctctgcccaggagcatgggcatcagctacctcacgggaaccagcctgctgttcagaccagtctgaccccctacccctttcaccctgtccctcctcagagtattttttgaagtggttgcattatagagatgggtatttgtagggccggagggatggtagtgatggggagaaggtgaggaagggtcaccctctgtcacctgtctgcctggctggcacctcatatctcagcagagaagccagtggtggccacgcagccttataaagcaggttttggtttc

SEQ ID NO: 9563 - DNA, 262 bp, Homo sapiens
gctgagtctccgccttgctggggcttgtcctagaggctccagctctggcacagtggttcctggctgctgccatgtctcagatgaggagggagagaaggaggccgccagactcgagaggtgggaggaactccttgcacacaccctgagcttttgccacttctatcatttttgagcaactccctctcagctaaaaggccacccctttatcgcattgctgtccttgggtagaatataaaataaagggacttttatttcttattgg

SEQ ID NO: 9564 - DNA, 387 bp, Homo sapiens
cccgccgcccggccgctagactgacttcgcgcagcggtggctcgcacctgtgggacctcagggcaccggcaccgggcgcctctcgccgctcgagcccagcctctccctgccaaagcccaactcccagggctctggaaatggtgaggcgaggggcttgagaggaacgcccacccacgaaggcccagggcgccagacggccccgaaaaggcgctcggggagcgtttaaaggacactgtacaggccctccctccccttggcctctaggaggaaacagttttttagactggaaaaaagccagtctaaaggcctctggatactgggctccccagaactgctggccacaggatggtgggtgaggttagtatcaataaagatatttaaaccacc

SEQ ID NO: 9565 - DNA, 658 bp, Homo sapiens
gcggcccggggtcccctgggccctgatcgaggtcccctcctggagcctggccctctgaggcttacggtcttggcaaggcagcatcgccttggctcttgggaagaggagattggaccacatgatcttataggaacccctcagctctgaggtctgtgatcgccggacagtccaggcctgtctgaaccccaccactcacttctgtgggctctaggactgactgggttcttcctccctccccgaagcccagacagttcagttgggctgggggttgctccacaccctaaaacaagcctcagccaggcaacccgtcagtctgtctccatcctttcaccccttccctggagatgggaggtggggaatgaatggaagctgacgggcagagagaggaggattaaaaaaaagaaatagacataactgagctgaagtaattccataaagggcccagacagcctcctccaccattcccttcatcattcatttaacaaatatttattttgcactctctttgcggcactctgggggcggtggggtgcgtgggggtggcaatgcaaggcactgaggccacagatgtgagtaagcgagacacaacacttgtcctcttggaggttacattcttgctggggggaggcatgggcaataaacaagtaaatatacaaac

SEQ ID NO: 9566 - DNA, 1230 bp, Homo sapiens
ggatacccaggggccgcgcccatcccccgccccagcccctgacacacactcggaccccccgggaccacaaagccaccgccgctgttaccgccgctcagcgccccggctgggcggaggaggagacgcccatgcccctcaggggaaagtggagaccgggacaccagaggccgcggtgtttggatttgctgggcgtggagtggggacggaagatgagcgcgggaaaggcactccaacctcactcttcccgtctgtctgcgcccccatttctccatttctgccggggtctcccccttcccttcagcccattccccctcggttttatccatttccttgcctcctttttgtgtcttcatttttcctcctgtctgcattcctctctctctctctccctctctctcctgttcctctctttcttcctccctctccctgcctttccattttccgttccttgggtttgtgtgtctgcatctccatcttaccccttgcctgactgtaccccgtagacccctgtttctcctcctgcacctgtgtccccatctgcccttcttgttgctcctgtcatgtgtcaccatcttccctcctgtctgccttcttcctccacttgtgtcagcttgcatttttttattcctgactgagtcaccacacccctctcccctgatcaaagggaatattagtttttaatttggatcgactgaggtgccaggagaaactgcagtcccaggtatccagacagccaccaggatggtccctcgccccacccccaccgcctctccccaccttttccaacgtgttgcatgctgggagctggggggtgtgggggaaggggctgccggcttctttcaggaggctgaggtttggaggcaaaatcaacctgggagaccaccccggccgcggcgcctcagtggacaggtgggaggaaaagaaaacttcttaccttggaggagggacatcccgcttccttatccttagcttttttgttgctcctccccactgccccttttaatttatttggttgtttgcggagggaggggggaggggggtaggctgggccgggaactgtccgaggtgctgagctggggcgggaccggaatcctcccggtagggtaccagggactgagttgggcctggggccgtgtccaaggtgccaatgatgcgggccgacagagcgggccgcactgtctgtctgtccgtctgtcccggaaagaactataaagcgctggaagcgcctgc

SEQ ID NO: 9567 - DNA, 861 bp, Homo sapiens
gccagccgttgaggaaggagctgcaggcacagtagggcttcctggctaggagtgttgctgtttcctcctttgcctaccactctggggtggggcagtgtgtggggaagctggctgtcggatggtagctattccaccctctgcctgcctgcctgcctgctgtcctgggcatggtgcagtacctgtgcctaggattggttttaaatttgtaaataattttccatttgggttagtggatgtgaacagggctagggaagtccttcccacagcctgcgcttgcctccctgcctcatctctattctcattccactatgccccaagccctggtggtctggccctttctttttcctcctatcctcagggacctgtgctgctctgccctcatgtcccacttggttgtttagttgaggcactttataatttttctcttgtcttgtgttcctttctgctttatttccctgctgtgtcctgtccttagcagctcaaccccatcctttgccagctcctcctatcccgtgggcactggccaagctttagggaggctcctggtctgggaagtaaagagtaaacctggggcagtgggtcaggccagtagttacactcttaggtcactgtagtctgtgtaaccttcactgcatccttgccccattcagcccggcctttcatgatgcaggagagcagggatcccgcagtacatggcgccagcactggagttggtgagcatgtgctctctcttgagattaggagcttccttactgctcctctgggtgatccaagtgtagtgggaccccctactagggtcaggaagtggacactaacatctgtgcaggtgttgacttgaaaaataaagtgttgattggctag

SEQ ID NO: 9568 - DNA, 341 bp, Homo sapiens
ggccctgggcttggggagggaggttcacctgaggaggactgtggccctcacacctctagggtacacagggagaggaggcccggagcaccctggagggcagagacaagcgggagtgatgtggaggtcgccctgggagcctctggaaggccttgctagtgctccagctgcatggaagagagcggctagcaactgttccctggttgggccctcagtggatgctggccaggccctactcttagccccttcatcatgtcatctcccttatgctggagctgccccgatgtggagtgggcaggaaggggcctggaaaaaataaaggatcttggcagttgataaaacgt

SEQ ID NO: 9569 - DNA, 223 bp, Homo sapiens
tctcttacagctctacctggggccaactcagggacctgagagggcacattcacagcagccctaggttttttcttccccgtgaaaccagagatgatttggaagatgggggtgaaggacactcgggaactagggcaaagacagggctagaggtatgtggagctggtactgtctctggaattttaatcacaataaagtttggcaaggaatgtgtacttgtacttac

SEQ ID NO: 9570 - DNA, 347 bp, Homo sapiens
aaaagcagcatgttgagaagatggccccttgtgccttggaaagaggttcccatccctcattggaatcaccacccattccatccaggacttctcttacacttgggggtagcggggtcaggacaatcatctcagtcctgcatcttttcttctgctttcttccctccaagagcaaaacctgggcaaggggacttactgagtgggggtgggtgggggttgggaaaagggaaactggtgggatatggaacatggctctgagcaggactgttgagctcacatagtgttctgactccaaatctgggagcaggagaatgtgtaaacaagaataaagtggaagcaggttggtgtag

SEQ ID NO: 9571 - DNA, 1913 bp, Homo sapiens
acaccgggcccaacctgatctgatccagatcttgactggggggtctgactcactgtgggaagagaagaggggagtatcctgagttgtaggaactgctttccaactccaagctccctccacaagtttccctcccaggccccccacaccccagtgtggacttgggatttgctgtgctcagcccagggctgataggtccctggtgaagcccagggtggggggtgtcagggcagtggaggggcccgaggagccaggttgcatttattggatggggagctccaaggggcattagtggtttgggctgggccttttgtgccctggtactctgccacctgtgttgctgatggtgtcaaggaaggaggacttggcctagggttgtctgagccggagccggcagctccactggagagcagtgcaggcagagtggagcctcctgctctcctggaccagctgcagacccccaaccctggtttctgtgccatgttgcgctctgaccgtctctgttgcttctcttctggtgttgcttctcctccctcccattctctctgcaactccctgcgggccgcatcgcttgctttcactgccgtctggctaggactcccttcttccttccttccccgagaaggcctcaatgtggcgaggaagatgctggggccggtagggctgtgagatcttctggggaggctagccgggtggggcgggagcctctcagctgtccagattcagaactggagcccactcctcctccctctcgttgcctcagcctgccctcaccctcaggactaggcagaggtgaggctggctcaccctgaagaggtgggataggaccgggggaccccagagggaggcctaggaggggactgcacccatactgcttccctaccacaaatcagggctcagggagaggccatgcggccagcccaggtctgcatgctgagccccatcctccacagcttgccgctgacgctctctcctgtcaccccgcccctgctctctccccagatgtgttctgagctggatgccgggttccagaatcgctgcacagttccaacaggacagcgccttcccccatgcgctgggaggggaccctccatttctccccctcacccatgctgagtgtagagccggggcctgggtggcgggtgggggccgggtgggaggtggcagtagtcttagcctgtgcactctcttccttgggtgtttggtgctggctcctggggactacaaatcccagagtgcggtgtgcccggcctcatttctgatagatcccgcttgggggaggtggtgtatggttacggagctgtgcatcttgggacatgtagtagcccaggtcggcttgtcactcgctgtgagatggggagattttgtcttttgatttatccctgtagggctggcagggttgtagatgaagggggaatgatctgagccttggttcccctgacacgtcttgctagccccagggttagagtgggcagggcagagccgcgcagcacctgggagcggtacctttcccttgggcagcctggggtcccaggaacaagccagggcgagtggcatgtctgcctgagcagggtgtggccccagaaagctgaggagtgtgggctggcagagagcttcgagggcaaggccacccgcgggggcgtgtgtgtggtggggcttggcatgtgatggcagctccaggcatgccgctgcttgtatggctttctttggcctctgaccctgctgcccattctttccaacatcacagatgaactgcctctcctcctccctgcctggggagcccagtggccagggaggggagtggtggagccagtcgctgtaacactgagcctcagagacgaaccaaaaccagctgggctgagctcagatccagggggaaatgctggaagtcaataaaactgagttttgagagcttg

SEQ ID NO: 9572 - DNA, 747 bp, Homo sapiens
agacagagaccctctgccaccagagaccgtcctcacccctgtcctcactgctccctgaagccagccttcttccatcccaggacaccacacccagcctcagtcctcccctcacagcctctgacccctcctcactggccatccctcgtggtccccaacagcgacatagcccatccctgcctggtcacagggcatgccccggccacctctgcggaccccagctgtgagccttggctgttggcagtgagtgagcctggctcttgtgctggatggagcccaggcgggagcggtggccctgtccctcccacctctgtgacctcaggcactagcctttggctctggagacagccccagagcagggtgttgggatactgcagggccaggactgagccccgcagacctccccagcccctagcccaggagagagaaagccaggcaggtagccagggggactagcccctgtggagactggggggcttgaaattgtccccgtggtctcttactttcctttccccagcccagggtggacttagaaagcaggggctacaagagggaatccccgaaggtgctggaggtgggagcaggagattgagaaggagagaaagtgggtgagatgctggagaagagaggagaggagagaggcagagagcggtctcaggctggtgggaggggcgcccacctccccacgccctcccctcccctgctgcaggggctctggagagaaacaataaagagattcacacacaagcc

SEQ ID NO: 9573 - DNA, 190 bp, Homo sapiens
gtagggctgccagaaggcccccagctcctacccactccccttgaggctgctgcctgcttggccagcctctgtccagaaaggaccagagaaagccaggctggatcgtcacatgccggggagcaatgtggatggcctggggactcctgggttttctccctcccgactccctaataaaccccgtgaaccttgg

SEQ ID NO: 9574 - DNA, 720 bp, Homo sapiens
gacggtgctgtgactgaaaggacccaggagtctgggacccctcctgggatccccagcacattctcctgctcctgggagaggcctgggggcggtgctcactgggagggccaggactcagttcctgctctcatcctcccctgccctgatgtcagctgctttgcacaaaggtccttcttgtccacaccccttatccccaggctggtgccccgggagggctggagaccaggccatgggccctcacggagaggaagggaaggaaggagagggagggggaggatagagcccatcccagccggggagggggagccctctgtacatttgtaaatatttagggaaagccgggtggggggaggggatacagatgtagaaggtgggtagggctacaggggtgggtgatttagggacagccagggtcccagccccaatgtcagcaggatagggagagccccaggactcaggagtgctgggctggtcctacttcctgcccctctccaggcccagctcccctcttggcagggggagaggatggcccagcaggcctggcccagctcccagttccccctgcaccagccccacccctagagtcccttctatagggagggggcaggagaccttccagacttcggctgagcttggagggtgggaagggagccttctcagtcctctctccctccagtctgattttataaagtgctgacgagattgggaataaagaggcat

SEQ ID NO: 9575 - DNA, 739 bp, Homo sapiens
ccatatctgtctgtctagactctgcagtcaccagctctgccagctcgaggaggcctgctaggctgccactcagcctcctggctttggctgtccctctccccagcctggagagggctggcctggtcactagaagggaggattgtctcaggcgagtcttggcctgagaggaaagccccctcccaagctcccaagaggctcctgaggaactcggggtgtgaaccccattggggtgtgctcagggttgtgagtgtgttgcccgtgtgtctgtgtgtatgtgtgtgggggtgggcaggcttggaggggacgctgggacccttgccttagatttctgactggtagggtttctccaggctcagccccacctcttcactccctgccaaggtcccatgggccacctcctgcatgtctccgcggaggggctaccttccttcccatcgccctgcctcgcagccagactcatctaagggttcttgtccttgtctatggggcaaactgtagcatccctcaccctggtcccctggcctctgtaaagccaccagcctgagggcagtggcaggagatgggggtgggggggtgctgctctgggctgggttgggaagggagttggggaggggtttaaatgcacggtgcatgtctggtgtctgtcatgccaacctagacacctcatgcttctgtctcccccaccccactctgttttacatcttttataaatgtgccaaactgtgtggcctctgccagg

SEQ ID NO: 9576 - DNA, 179 bp, Homo sapiens
gggtggggggtcttccttcttaatcccatggctggtggccacgcccccaccatcatcagctgggaggaaaggcagagttgggaaatagatggctcccactcctccctcctttcacttctctgcctatgggctaccctccccaccccacttctatctcaataaagaacacagtgcatatg

SEQ ID NO: 9577 - DNA, 257 bp, Homo sapiens
gggtcccacgctgaccttggccctgacctcaggagccacgctgtagacattccctctcctggtctctgggtctggcttccaggctctggctgtggatgtcttcagcctctgggtgctggccagtgaggtcccaaatgacccagggcttaagggagaggcgagagaatgatctggcctcaggggacaggccacctggtcaggaggaatatttttcctgcactttttctcaggtatcaataaagttgtttccaactcat

SEQ ID NO: 9578 - DNA, 242 bp, Homo sapiens
cccttgaagacagtgcccctcagagaccccaagaccttagggattgacacctgggcctcaggcagagcccagccctgggctggggggctcctcaggacccagagatgtgcctggaaccactcctgatgccatggctagagtggcccccctgacttctgcccggggtgttgacctcgcctcacctttcacagaccagaccggcacaggctttgagctcattataaccacactccttgtctcgt

SEQ ID NO: 9579 - DNA, 823 bp, Homo sapiens
taaaaggagggaagaatggaggtaaaacgcgggggagagaagaggggagaaactctcctcaccacaaccaaagcaggaggcctaagcttcctgaatttctacacatgacttgcattaagttccttcctagaacttaaactttttcatctcccgtcacccaagaaaacacccatttcctcttttaaataaagtttctttttctggagatgaacctttaaataagtcgtacgtttgggagcgagggacaggagaataattttgatccagaaccttggagattggagaagcaggtggaaaaattctaaaaagatgaaaactgaccatctccgacacagaaacccatcgaaaggggccaccgagacccgttgattagctggagggagcatgcggcagaagtgcagacccctcgctaacccgccaacctccaagagccctcttgcagaaagctgcccggctccccacggtggccctgcgcgcgcaccatcctcgcggtctcgcttcttcgccccggaaaactctatgaggggcaccccagcctcagccgggttaagacaagtagccccaagaggaaggagcctcagagagcctttcttcctgttcttcttcgtcttcttttttttctaaacgaaatctaatactatctggctgcaaaaatatattatcaccggctctcagcctaagagactaacatttggatatgtaggaaatgtaatctgcatggctaattgattctcagcgtatcagtttaaaggataaagatcgatatctacatgatggatattgtattaataggggcataaataaaggtcgaagagtcgttacc

SEQ ID NO: 9580 - DNA, 40 bp, Homo sapiens
cttgactataaaaaaaaattaaaaaataaaaataaatgac

SEQ ID NO: 9581 - DNA, 1746 bp, Homo sapiens
ttattctcttctggcatcagtttgctacagtgagctcagatcaaataggaaaatacttgaaatgcatgtctcaagctgcaaggcaaactccattcctcatattaaactattacttctcatgacgtcaccatttttaactgacaggattagtaaaacattaagacagcaaacttgtgtctgtctcttctttcattttccccgccaccaacttactttaccacctatgactgtacttgtcagtatgagaatttttctgaatcatattggggaagcagtgattttaaaacctcaagtttttaaacatgatttatatgttctgtataatgttcagtttgtaactttttaaaagtttggatgtatagagggataaataggaaatataagaattggttatttgggggcttttttacttactgtatttaaaaatacaagggtattgatatgaaattatgtaaatttcaaatgcttatgaatcaaatcattgttgaacaaaagatttgttgctgtgtaattattgtcttgtatgcatttgagagaaataaatatacccatacttatgttttaagaagttgagatcttgtgaatatatgcctgtcagtgtcttctttatatatttattttttattagaaaaaatgaagtttggttggtgatgcatgaaacaaaatagcaagagagggttatagtttaatagtaagggagataacacagcatgtgtagcaccagttgataattggtctctagtagcttactgtcaaaatgttcaatgaagtcttctgttcatctgttgaaactaggaaaatacccaaacttaaatggaagaattctgaaagagaggatagaatttaaagaacaagagtatataaagttattctttgaatatttcgttgactatatgtacattgagttatctatatttgtaaacaaattagtcatggaaaattattctatctcaaagtctccttttagtctagataatcattatttcattttaaaattagtgtttttcctagtttgcactgatgcgtgtatggatgtgtgtgagtcagtggtagcttatttaaaaagcaccttatcctttctcccataacctttgtacactaaaaaatgaaagaatttagaatgtatttgatgatagcattctcactaagacacatgagaatttaactttataaccgcgtgagttaagatttaattcataggttttgatgtcattgttgaagttatttgtaattcagaaaccttgcttgtgtgatacatagtctcttcatttattactgcttgtctgttgttatatctggattatcaaaagcaatagtgcaccaattaagatgtgctcaaatcaggacttaaatcataggcaccacatttttcatgtcagactagttactttgttgattctcagttactgtaggcatcaaaaggcaaaaatcaaaaaaaaaaaaaacaaaaacaaaaaaaaagatgaacctaggtctgtgtaaagtaaggggagtgttaggagcagccaggactgtgtagtgtgtgtttggttgcatcacaaacatcgtatgtggagacattgcaatacagtgttttttgttttcaacttttcttgtattgtatatttgtattatgttttgaatgcttttctcttttcataattaaatattaatgtttgggataactgccaagaagaagtaaaaatattgaatggaacttctatatgaggatgctgtgatctaaaaattaaatctcagtgggcggag

SEQ ID NO: 9582 - DNA, 2294 bp, Homo sapiens
cacccccgggacccctgccggtggctccatcagccagcaaccttagagagaggaaagacagttttcaagtgtctggtttcactttcacagtgcggctgccactttgaagagacccttggtaaacccctgattcggggtggggtgggggactaggctcagccggaaccagcacctccaaggagtccgggaggtgcctgtggtttgcacccaccactgaaaaagccgcggagatgcgcagcgcgtacactgactttggggcctgggtgttggggttctgatcagaatttggcgggatgatatgtttgccattttctcactggatgccctgggtagctcctgcagggtctgcctgttcccagggctgccgaatgcttaggacacgctgagagactagttgtgatttgctattttgcctagagctttgtccttctagatctgattggctgtaagtatctctactgtgtacctgtggcattccttcacagtgggttacaagcttcttttggattagagggggatttttgatgggagaaagctggagatctgaacccagcccatttgcacactataagaaaaaaaagtaacttttaaacctgttaacattggccggggttataagagatgatcttctattttgaccttttgtctaacttatgaccttgaactctgacctgtgaccatgcagcatcacatgatggcatgacgttctttggatcagaagagcttccccagaatctaacctgcactcccgatggtggttcaggagactcttcctgatctttctagaaggggtaaagtggggttgaacaaggccaagccgttagctctgctgctgctcagtttcccagcctagttttctgagctgggagaggacataatgtggtatttcgtcacgtagctgagacctagaagggcatactcaggcggagattgcacaaagctgggctccaagttctgtgcttcctgatcccgagccctgacactcatttgctgtgtggtcccgggcatgtcatcaagaagctcgctgtctgcatgaggctcccgacgatctccatccccagggggttgggaggatgtctttagattttaggactctgtgataaatattccacagcctggtgtgaggaagcttggaccaaatgcttcccctttggccggttagtctgaacaaggatctgctgatttaaaggagcagttggagattcagaacacatataactggggaattcagggcaagctaccaacccagccctgctgtagttttcccaggactgaaggaaagaggcagacaccacattctcctctgcaaagttctctggagaatgtgtgatgttaacactcccagctaagggaaagcaaagtctaaaggaaaacacacaggaatgcttccaatgtctccaagtattcctgtggtcaacagtttcgcagatccgttaggcccttaaagacaaggaggaagtaaaaggtcaaatttaaatctatttaaaaaaacttttaaaaaaattatttatttattattattttttatttttaagacagaatctcgctctgttgcccaggctggagtgcagtggtgcaatcttggctcactgcaacctccacctcctgggtttcagcgattctcctgcctcagcctcctgagtagctgggattacaggcgcctgccaccacgcccagctaattttttgatttttagtagagatggggtttcgccattttggccaggctggtctcaaactcctggccttaaatgatcctcccacctcggcctcccaaagtgctgggattacaggcatgagccactgcacccggccactttttttttttttaaagaaaaatgctctgcatggattggagacacagcaataactactgttgccatggaagggttaacagtgtaggagctggtttatcagtccgctttgacatacagctaaaggaaatttatgtttgggggaaaaaggccctctgttcactttaaaattcagtgtggacttatgccaaagggggctgtttaagttgaaagaagccaagttaagtttggcctcttgcctggaatcacttgaattctgaaatttcactgcgacggacatgtgccttgtcacattttccattgcttaatcctgaagtttggtgcaagtctctctgcacctattaaaaagtgatgtatatacttccttcttattctgttgagttgtatagaattgtcttttgtatttaacactttgtaattttcacaatattttttaatttaaataaataaacacattttttccctcctgggaagtcatgaa

SEQ ID NO: 9583 - DNA, 673 bp, Homo sapiens
ccgccatggatgcagcagcctgaaacttgagagcgaaagtgagataaatgtcaaaggtgtttcaagccagacattttcacaattgtgaagaaatagatgttttgtttctgttttttactgtgttcccaaaattaaataagtgttaaccaagtcacagtgtttttggttttgtttttctgaaatcttggtttgatcaaatctttttttttttctcttgagatggagtcttactctgtcgcccaggctggactgcagtggtgcgatctcggctcactgcaacctccacctcacaggttcaagcgattctcgtggctcagcctccctagtagctgggattacaggcacacaccaccatacctggctaatttttgtatttttggtagacatggggtttcaccaagttggctaggctagtcttgaactcctgacctcaggtgatccacccgccttggcctcccaaagtgctgggattacaggtgtgagccactatacccgaccagatcaaatctttttttgacatttttgcaaaaaaattttcctaatgttcttgatttaattgtatagaatttgtataattaggtgtattttatttgcgtctagctttgaggtatcataatttatgtatcttatgtgaattttttgctgtaataccaataaagttttttttctccac

SEQ ID NO: 9584 - DNA, 1353 bp, Homo sapiens
ggtggcatcttgggaagacatggcctattcgtgtaattattgcccatttggctcattccccaagcccctaattcattttaattcattttaaacaaaagcagagtacaccggtattgctccagatcgctcacatcacctgggacagtcccatggcccctatgagtcaactcacagcttgcggggagtgggccttctcctggccttgttcttgctcataaacaggtcacttcctccatgaagagaccagtttccacgctcccatctctcactgctgactcagcgatgcctctgcctcggtctgcttttgaagactgtgaccttcaccaggaggttttacttacaccagtcgggaagattagtccctcattctgcctggagtgccccgtgtttgacttggcagcgggtgtggagccatccccgcgtcctcctggcgcattgccactgtggctgtccaggaacaggatgtggctgccttggccgaatgttgtcctactctccccaaccccggcgcctcagctcctcagctcctcgggcccctgcgtctggctggtgtttgcagggctttcgctctgctctggtattgctctgcctttatagaaagtcttattgaagaagtgtaagaaagacctaaggtggggaagactcctacacacaccattagtatcagtgacaccagcaatgtaggttcccagccccttcccagtggcagcttgtgtgtccaggagataggacatcatttaacgcatcagcaaagtagcagcagatgccacatacagagtagagcgaaggcatttggtggatcggtcactagagatctatcttgcagaaagtatgtttttcctcataaaagtgcctcttaattggccattgtaccagccacttgtcctagccaaatgtccaaaacacgcccttgggccccgccacgttacaatccacagattgtctgtctgagtcgtttaaggcatttcctggtgcttgtgttccatgaataaaaggacaaagtcagaagatcactgatgtcttactgtcaacagagatattttaaaagagagaagcaggaaaagatcttccttttttgatctacaacttatatagttttctgattatgcacataatagatatgccttccagatgcataaggcaaacatctggaaagaaatatacccaaatcttagcaggggttatctttgggagtggagtacatgggattttgctttcttcatttttataattttatattactgtcttggaagatgtgtttatgtgtgtgtgttacttttacaatcaggaaaacatatttaataacatatagtcaagaaaacagacttaaaaataaatactatgtgtccattg

SEQ ID NO: 9585 - DNA, 2983 bp, Homo sapiens
aagctggggaattagaaaaaataataagtcgctgtcaggtgtgcatgaagaaaagacactgaagctaaaaaagacagcagaactgctatttttcatcctaaagaacaaagtaatgacagaacatgctgttatttaggtatttttctttaaccaaacaatattgctccatgatgacttagtacaaagtttcaatttgtttccccacaaaacaaagcaattctttcaagtcagttctgtgatctgggtctctaatctgtgctgtttcaaagttctctgtggcaaagcagcaactattcacaaaatatcaccaaaaacctattccacttacatccaaggcactgtcactacggtgattgtatgaagtttgaatgctgcaagttatgaaatatttggcccgctggattcccacatttgtcttctttctgtctttaagactcagggaggctaaatcagtgtttgattgccccgccaacccttcctgaaacttcagaccctgggtaggggaagagaagggggcatgtggtatcctggagcattgtgtatagaactggattttcagacctgctgaggaccgtaaggcctgatggaacacagaactgaactgaggttcatggattttccaggactgtttcaaacatgcccattactaacggcaaaagggggattccctgatggaaccataatacccttggaaatactgtatggttttgttttgttttgttggtttttaaagatttttgtttgtttattgaattcatttcactgtagctctaaaatctgcttgtattccaagcatataaaattttcccccttagtgaattagttttaaaatgatattgttatatacatactatgaaatatgtataactttaacttctgttttaccagcatacccacacaaataacaagaatactacttatgaaatgtgcactttatcctcattccataaatgtcggtgcataccttatgtaagggagcagttcaataatccatgaaagaacttaaggcatttgttggtttatcagactcggaatctattttctcattgctctgaatatgtcatcactctaggttttacagatttattcctttgttacttctctaattcttcctttgtaaaaaaaaaaaaaagcaacactttttatgttatatgttgttcttacaaaccatactgaaagagtccattgtttaaaaatcttaatgtatcaaactgtataacttggccgctgtatgtcttaaaacctgcttttcaatgtgttgatacattcccaaggttacttaattcaacttaactatcatcttattcagcaccaagcatgtcccaggcactgtactaacctacagagatgctaagagaaaaaaaagacttgtttctgatctaatatcccagaaaaagtaactcattgctctgttaataatctcacatatacaagtagcttccctcccctctagttttttcttccttttcactgctgttatatttcatcatgataattcagcaggcccaagtaaaggttaaaaataaggtctatgcctagggaaactcagggcttctagtttctcttagaaaagctaagagaagataaggtctgaataatagcagaaaaaccaacatctacaaaacattaaactagtgttatacttgatgataacactatttgatgagtcttagagtccagacacaaagagacaaagctttgaagatgctttttgatctacctaggtggagttggtggtgctgatatttaaattcaggctactgcttcaatctcaattgctttgtaagtgaaaaacatgacccagaggacagcacagactatggccatggctcacatggtttacatccttcactgctcacgtgtttgctgtcaagccatttttacatctaaactaagatgtgcagcatttcacttatttagattcacttaacaaacaaatttttctgctttaaaaatgtcttattgtcccaagtgtactatagcggcatatagagctagctaatctctacaaaccctctgtaggccagtagttctcaaagtgtggtctctggaagagcagtatcagcatcatctgggaacttgtcacagatgcagattctagggaccactccagacctacacaatcagaaactcttgggggagggcccgaaatatctatgttttaccaagcccaccacatgattctgatgtactctaaatactgagaaaacctgttctagacaaatacccaagcaacaactccgcaggcagttaccaagtacggctggctacaactgctccatccgtgcctctttttaaagttcaaactcacaggtgactctaaggttatctacttttactcataagtaaaagccctagactggtgctaatgtcaaaccactggcctccactcaggcctccatcttctcatgccctcttaccagtatttaacttctgaggaagacaagtgatgctaaaacctgaaattccaatgaagccatatgaacagctgttcagttgcacttctaagactttacttagcagtaaattatagctcatgtgcattattttccagataacttagcttatgagtagcttatacaattatgaagatttaatattacagataaaatgtaaactgtttctttaaaattggggcttcaactttggaatttcacagcgtgctaaaataacagatttctcagaagtctttcagcaagataaacattattaagtaacttatttatgaaagtattaaaatgcttacatttgaacttgatggctaacttacaaagattctctatgtatcaaatgtaacttactgcgactaaacttaatttaatatttactctataaccaaatgaaatatatttaaaatatattgaatattttatattgttatatcctgacaagattataatattttaatgtactaatatttctgtaattatatctaaaatattattttattatattgcctaagaataaacatttgttaaattgg

SEQ ID NO: 9586 - DNA, 714 bp, Homo sapiens
aggtaacatcagccctcaaaaatactgtctcaacagctggaaatataaaagatttgcaaacttctttgtttctgtctctgcattgtatgccattttatagtccacaccctgaaaatgtatttcttccagaaagtctggaggaaggacctatatttgtagaagtaaaggtatattctgtcactcagctgtattcacgtctgagcagttctgcagtaacacctgcttaaaattctccctttgcatgttttgtaaataggctccagttttgttttttaaaaggaatttattttttgcctcatcagtccacccaactgattctgaatgggagagagtctgtagagaattgattcagaaaagtgtctgtgaaagaaaaacaattattttgtcctgtttctcaaacagtgttaagcagttttgttaatagacatttttgcatcgacacttcaacattaacactttcaaagtcatggtctggtgccagatttaagaaactcgaaccacctaatatttcataaccttcttcattaggtacttgtacagattaatttctaacattgcagcagtttcatatgtgtgcaatatgtgcattctttcattttagttttgcacttggttttctataaagtacgtttttactcagttcatgcgtgaacaatttaaaaaacgacagaataaggtacaaatgtagtgtatttaataaactgtcaaccaaag

SEQ ID NO: 9587 - DNA, 3089 bp, Homo sapiens
ccttatatagacaatttactggaacgaacttttatgtggtcacattacatctctccacctcttgcactgttgtcttgtttcactgatcttagctttaaacacaagagaagtctttaaaaagcctgcattgtgtattaaacaccaggtaatatgtgcaaaaccgagggctccagtaacaccttctaacctgtgaattggcagaaaagggtagcggtatcatgtatattaaaattggctaatattaagttattgcagataccacattcattatgctgcagtactgtacatatttttcttagaaattagctatttgtgcatatcagtatttgtaactttaacacattgttatgtgagaaatgttactggggaaatagatcagccacttttaaggtgctgtcatatatcttggaatgaatgacctaaaatcattttaaccattgctactggaaagtaacagagtcaaaattggaaggttttattcattcttgaatttttcctttctaaagagctcttctatttatacatgcctaaattcttttaaaatgtagagggatacctgtctgcataataaagctgatcatgttttgctacagtttgcaggtgaaaaaaaataaatattataaaatatgctattgtttttgtgttcttgctgcaatgcctttaccaaagtggccttaaatatgagtagtgaattgagaacatcttgaattcttaaaagacttcttagtgactttttataaaaaggccatgtagaaaatttattaaaactactatgactgctacattcaggaatatgccagtggtaaagcatttaaatgtagcttgtcagatttaccataatcctactaatttctttgcagcttattaattttgtgaaatttgtatatatgaagaatttgcatgtatgtgtatttacaaatttttctaagtatcttgaattctcagactgcaaaaggcctattttaactattgattttttttaaaaaaaattgtctttgaatgtattggaagtagacatgcattaactgtgacattattgcacctcagtttttttctttctttttttgggcaaactgatattatctataggatatttgtttatgtttgttttttgggggaaagaaactggaactcagtgttaccttaaagttacggaatactttgttttaaaggaaaagataataagtttagttatatctttttgttaatattcaaatgaacttgtttaagtatctatgtacagtaatgcctcattcatctagaggtaatctggcagtcttgtgaaaaccgaacacaactcagaaacttggaatcgttttttttaaaaatgcctctgagcaacccatataagtcacaaagtctgtgtgttagagcttatgcatttgtttttatgagagattttaataaatttaattatttgcttgtccagactatagcatattagctgtttagaagggatggcttgaaaggaaggagactgaaaaacactctgagagcatacactgtccaaggccattagtgtaaggaccgctacccagcctagaggacatcactatactacatcatctgatgattattctttattatgcctctaggtaattaagtaaaggtgaaattgcatacacagatatgtagtacatattttaaaagttttatcttaaattgattaaaactttttaaaaagctttggtattaaaagaggtaaacatcagtttcctcaaacattttattcatgttgaatgcctttttgcaatgatgactgagttgttatcatagtattttaaaacctgtatagtgttttagacttgttaaaacattgctgtctagtgtacatctagctaaaagtgtggtttatctaaaccgttttaataagcaagatgactgggaaatctctgccccttttctgagcagtatgcctcttcttttagaattaaatgaatgctgcacaggtccagatgtgtgttgatgtagacttgaaatgtctccacattttggaggacttcctcagcccttttcattgagggaaaatatatttgaatttctgttttagattgtatcgggtcccagttgattcatgtgtacaaagttatgctacctaattacagaccattacccaaatatcctaccaggctttccatctgaatagtaaattaaacagttgttatcaaaatgattttaaagactatttctttttctgggtaactattgaagtttgtaattaaatgggggctcttactgactttaaattagcgcttataaaataaaaatgtttagttcaagaagagacccaagctgggtatggtggtgtgagagcctgtgagtcctagctacctggaggtgaggtgggaacatcacttgagcccaggagttggaggctgcagtgcgctacgatcacaccactgcacaccagcctggggatagagtgagatcccatctctaaaaaatgaaaaaaagaagagaggtagctttaaagtggtttttctcatgatattcactgtttattattaaagaaaatcagctttcgttagacttttacatttagatttattctagttttatatagaccatcaaaattatgttgagtactaaaaaggagaaaaaatcctggaaggtaacaaggctgaagaccttcaaatttcctggcttactggtttagtcacatcatttttcctgttcaggtatctgcagatatccctgttcaggaaagatcttttttcaggatggcaaacttttgacatagtttaaagacattttttccccattttttgaaatagagaatattttattatttttgtgaaaatagagttttggtaatcactttcttcctcaaaataagtccttctgttaatttgtaaaagcacattagtgctttacctgtgaaattccccgcccccctgcacacacacccactttagtacagttcctgtcaattggcaacatggagagggtgacctggctgctggtttaccactgtaccaacatctctggagcattttagtttcagaaccttaacactccccaacagctttgttgatgtagcttgtatctctgagaatttattgtattaaaattaatactgagatattttt

SEQ ID NO: 9588 - DNA, 451 bp, Homo sapiens
aaactgtggcttttctggaatggaattggacatagcccaagaacagaaagaaccttgctggggttggaggtttcacttgcacatcatggagggtttagtgcttatctaatttgtgcctcactggacttgtccaattaatgaagttgattcatattgcatcatagtttgctttgtttaagcatcacattaaagttaaactgtattttatgttatttatagctgtaggttttctgtgtttagctatttaatactaattttccataagctattttggtttagtgcaaagtataaaattatatttgggggggaataagattatatggactttcttgcaagcaacaagctattttttaaaaaaaactatttaacattcttttgtttatattgttttgtctcctaaattgttgtaattgcattataaaataagaaaaatattaataagacaaatatt

SEQ ID NO: 9589 - DNA, 342 bp, Homo sapiens
ctgaaggaagctggtcagtgagcaaccttgctagcaatggtaatcaagaactggaacttcacagacagcagctctcttaatatttcttatactttctctttttctgcaagtcaactatttctacaactgtccttcatttcacagatatgaccattaaacatgacaaagttatgccactccaatattattatttgatggcgatggcaggacacagcataatgtttggctaatgccaccagttatttcagttgtgtttgttttttaaaagcattatgatactgaaaaaggagaccagaacaacttaacaacgtgtctcctggattttactttgaagcctattgt

SEQ ID NO: 9590 - DNA, 2224 bp, Homo sapiens
gcacacattttcctaccagcagggagctcaggcatggctgtgtttctcttcagtgtccaaatctcttctgtctccttttcttaagaactaagaggttttgttgatgcgtggagccatttgaaactcgtaggggatttgcacacaaatgcagcagagtctggctccccagtgccttgctagagtcaccgtcattctgaggtcaaatcatggcccgaggacaagggctgtaagacagggagccccataggccatcatcatccttatcccacacccattataaaagaggtttctattgtatataaacaaacaataaatgattattagcaggtttttattagacatctattttatctaggcattagaaagggtaatggggcttttgaattttttcctggcattgtgtcgtctgcgtccagccatgaagctggtggctgagtgtccccaccaggaactgtgaagggcacgtaccacgggaggcactcagggtgggtgcagctgccttcccaactttgttctgctaagtccatattcagggccctatccttgtgagcccaggatgccagggtccatccccgcatgtagacagcttccgacctggtgctggagcatgactggagaagtgcaggcatcctgcttgcggaccttgctcaaagtacaacttcccaggactacttcacattgttaaataaacctataaacatttcttttcttttctttttttttttttttttgtattttctttttagtagaggtggagtttcgccatgtaggccaggctggtcttgaactcctgacctcaagtgatctacctgctctggcttccaaagtgctgggattacaggcatgagccactatgtctggctaaaacctataaacatttcttagagaaatgctgttccccaaaggaatgtgaacagctaccacttttaacaaggatatttaagaaaacagactatgagttaactaagtaaaaatgtaaatatggtttgcatgctgttaacatggcagaggggtaaaaagaatacagtcctggggagaaaggtcacttcactgagaaggcttacttaaaaatgtttttctccctgcactttcatgattattaagtacccctagaaaatgaactcatagcagcaaataatctaatgactccttttaggttacagagcaaagtagctttctacttccacatcacattataatatagccttataatttcttctttcctgcaaccttcactttcctacctaggaaaactcacctccggtgccagagaaacttcccaggatgcactagggccctgtgaacaatacagaagttgtggactctggctctttgtcccacctaagtccttccagaagggctctacagcatggcttagtgacattaaaaaaaaaaactgaacccatgttaatatcaaacaagattttaatcttcattcacacacccttaaaacccagtcacggggctccccggtgccagtttgagaccgtcaacctagccctctctgcttctcattgctggaggtacacacagtcaaaagttttccgtgactgtgaaatccagtgcaatctgcttcccagcagatgaggagcctgacgtggttatgtctggatttagtccaagaacagagcaaagctttaattgtcaagagacccaggcctcattctccacttaggagagtttgctagggcaggtacaggtaaaggtaaccagcaggcagctgagagcaagaaggcacgtgctctgcagagctctagctgccttggctctccctgagctcccagacttcactcatggcctaattttcaatgacagaacgtaggttttatcgtgaggatgcagacacaaccacaattacgtatgtcaacataacttcataaatatgtaactgtaacttattggtaacatcagtgcaagatgattaaagcttcatgtgtagtattttatcaacaaacagattctgaaagcttatggacatgcgcaatagttgattcagcttcaatcaataagaacataaatatggcaatttgaaaacactatgtatatacctactcacatatatattatacttacgatatatacttatatgtagtatataataatattacatataaaaatgttataaaaataaatgctaaagtaaataaaaaaagagccattaatatgttaactattgttaaataatagctaaaataatacagattattaaattattttaatactt

SEQ ID NO: 9591 - DNA, 531 bp, Homo sapiens
ctggattagtggatgctgaaagcattcagcaaatggcaccctaaaatatgccgctggtttgccactgacttcaaaatgaggtcacttgggcacagcacatgcagggaggggcttttctctgagcctccttcatctgcccaaagacaaatcctcaaaaggaaattcaatcatcatgaatcacaaccccaagtatctcatcagccagggaagagtaagtgggatcacagggaaggatgttggcagcgacaccatcccatacaggctcttacctcttctcctgagggctgctccagacaacatttattacccagaagaccttttgtctgaaaaccagccaagctttattcaggacacacttcttgccttcactttcccacttccgtggccacctccatgcagaagccctaagcccacattctttcgatagctcacggtggtgcatgagtgtccatcatctgactcttctcggagtctcatattttgtgggactcctgtgcaaacatatgttattaaaatttttttcctcctgtt

SEQ ID NO: 9592 - DNA, 201 bp, Homo sapiens
aagctatgaagacagaaaagggggttggtgggggcctttccgaaccatgtggttgaattgcagactgtgggaggcagggtgtgagagctgactctggagaaagaagttgaagtggattctggaaggcttgacaccctgtgctaaggaatctggagtttaatttttggaaaataaagaaggaataaagggcatttaaacggg

SEQ ID NO: 9593 - DNA, 834 bp, Homo sapiens
ctggtttagtggatgctgaaggccttcaggaaatatgctactggttgccactgacttcaaactgagagcacttgggaaatagcacatgcagggagaggcttttctctgagcctccctcatctgcccaaaaacaaatcctcaaaagaaatttgatcatcatgaatcccatccccaagaatctcatcaaccagggaagaggaactgagatcacagggaaggagattggaggtgataccagcacagacagactctcacctcttctcctgaggtctgctccagacaacatttattactcacaagacctttttcctccgttttttttttgagatggagtctcacacagtcacccgggattggaatgcaatggcgcgatctcagctcactgcaacctctgcctcccggattcaagtgattctcctgtctcagcctcccaagtagctgggattacagtgcctgccaccatgcccagctaattttttgcatttttagtagagacggggtttcactatgttggccaggctggtctcgaactcctgacctcatgagccgcccgccttggcctcccaaagtgctgggacgtgacaggagtgagccaccacacctggccactcgcaagaccttttatctgaaaaccagccaagctttattcacgacacacttcttcccttcactctcccacttctgtggtcaactccctgcagaactcccaaactgccgttcttttcgatagctcacgatggtgtatgagtgtcaatcatctgacccttcttggagtctcatatttcgtggaactcctgtgcaaacatatattattaaattttttttcctcctgtc

SEQ ID NO: 9594 - DNA, 887 bp, Homo sapiens
gttgcttctagtgcagtttttttcttgtctataaagcatttaagctgcctgtacacaactcactccttttaaagaaaaaaacttcaacgtaagactgtgtaagatttgtttttaaaccgtacactgtgtttttttgtatagttaaccactaccgaatgtgtcttcagatagccctgtcctggtggtatttagccactaacctttgcctggtacagtatgggggttgtaaattggcatggaaatttaaagcaggttcttgttagtgcacagcacaaattagttgtatatgaggatggtagttttttcaccttcagttgtctctgatgtagcttatacaaaacatttgttgttctgttaactgaatgccactctgtaattgcaaaaaaaaaaaacagttgcagctgttttgttgacattctgaatgcttctaagtaaatacaatttttaaaaaaccgtatgagggaactgtgtagacaaggtaccaggtcagtcttcttccatgtctattagctccacaaagccaatctcaatccctcaaaacaatcttgtcatacttgaaaatatgacactctagtcaaagccttggtaaaataatcagtgtttccaatctgtcctgttacaaaagaaacagattattattgaacttatgcaaataaccattgtcataagaatgtttatgaatagtttccaaattatggcaaattcatgtagagagagaaaagtaactgttttggttttgctcacaaaagtctactttacctaagggctgtcagatataagtaacttaaaagaaagagaagttttcttgacttttgaaaacaaaatatgaaaagaatcggcaatgtttcaaacaaaaagtcataaaagtcactttattcctccatcaa

SEQ ID NO: 9595 - DNA, 2363 bp, Homo sapiens
tctccaataaacatctatgttaaatccaaattcagcatttgctgttagctattcagcatcaggcactcttattgattcatgaggaacattactgctaatctgctgttaagtgaacggtttttcattttacccttttgtttttcagtccaggttggagatcgtagctgctgctgcttgcacactagggcacatgtgggctttctcttgatctttgtgtcatttcagaattcaaagactgtgctacgggagttctgaacatggctgggttcatgaaggcaaatgtatggatgagagtgtggtttaggaaagagggcactgatatcagattagacctatgtgtttgcacccatctttgttggcgatctgagtgcagtgtggcaagtgcacacctggcatccctgcgtcagatcgcgcaccttcaggtcgcgcaccttcgctgaaggaagatgacgcagagctttatctgaaatcagaggggagctatccaaaatgggagtttgggggcagctaaagttgacatgcgaataaattgatactgaaacttagcaacttcttaaaagtgtaaagaagcctcataagatcataaggaaaatgtatatatgcttttcacagctttctagaattttttgacatttgattttcttgagacttgtaaacctggatatgttgaagggtatttgttaattttacttttcaaagatactttaaaacagtagagctagcaatgacaccttgcatttcatttcaacactgcttcaaggtttcttttgtatataattcttagaatgctcatttcttttaaatggtttaatttgtacagcagaggaatgttattgtagtagtatgtaactattacctaatactgagtttttgcaaaaaacaatgaatgctcatatgtaattgaaatacttcagatcacatgaaaatgctgatttaacatttaagtatcacagcattaaaagaaaaagaaagtaaaccagtcctttgtattcagttacctaatggggtgccatcaataagctgcgatacagccctggagctcagtcagccacaccttcctgcatcctattggccttattcattttaaatgagttaatgaatctgccagatctgtgaatgatagagattatgctaaattaatgctgattctttgtgtgtgtgggaaatctctgtagagcaccttttctttcttagactaagtaacccagtacaatagttgtgaactgaataattaaaactttggcttctcttaggaaaagacgacttcctagtcataggtgtcctatggggaaatttattttttttaatgtcctgttccttaatgctgcaaattatcagtatttataaagtaactgattttgcaccacttttttgttactgtgaccacggcagaacaatgtcttctagactatatctatgtaaagttattagaatggtatctgttcattttagtgatatgaagatcacaactaacaactgacaaatcagagtttgccagttcaaattcagcatggctgcagctgattaagaaattgatatgattattctttgctagcctctcttactaatggaattatatactggccagtaaaatgggcctcccaattgctgtttcagcaggttttaaaccttcaggaacaccagttaggaaaatagctccagaaaatatagatatattttatttttattaaaatggcagtctacatcataattggcatttctcaagactgtctttaccagaatctgtgtgaaataaggcaatctagtctccttgaaaaaaaaatctcttggatgtttaggaaggaagacttggccgtgatgtggtgtcctggctttgtggtgtagtgctgtgtgtatggagttagtgtaaaaacatggattacaccaagtggaagaaacgtcttcttgccaagctcattcttagaacttacacatctagaacagcttccactttggcagtgaggtcgtagccttttaggtggaagaagtgagggtgcagcgtgtcagacacaacattcatgttactcttacattggaatctgaaggtagttcagacttcgtgggttttgtttttaagcaaaacaatgtgaaaacatttaagtttgaaatgttgcatttgaagttatgatcatttaatatattcatattaccaagactattatactggaagtggtttttgtgttataaaggtttaattttacataaggcagttacttaatgtgatttttaacccttaaaaaagtggagatgtatacatttgttaacaatgccatgaaagcattttctttctcctaaggaaaagtgaatttcttatcagaatatctggctggccctgtaatttaaattaaaataaaattttggag

SEQ ID NO: 9596 - DNA, 1148 bp, Homo sapiens
ggccctcctcccccagaaccccctgccgtgttcctcttttcttctttccggctgctctctggccctcctccttccccctgcttagcttgtactttggacgcgtttctatagaggtgacatgtctctccattcctctccaaccctgcccacctccctgtaccagagctgtgatctctcggtggggggcccatctctgctgacctgggtgtggcggagggagaggcgatgctgcaaagtgttttctgtgtcccactgtcttgaagctgggcctgccaaagcctgggcccacagctgcaccggcagcccaaggggaaggaccggttgggggagccgggcatgtgaggccctgggcaaggggatggggctgtgggggcggggcggcatgggcttcagaagtatctgcacaattagaaaagtcctcagaagctttttcttggagggtacactttcttcactgtccctattcctagacctggggcttgagctgaggatgggacgatgtgcccagggagggacccaccagagcacaagagaaggtggctacctgggggtgtcccagggactctgtcagtgccttcagcccaccagcaggagcttggagtttggggagtggggatgagtccgtcaagcacaactgttctctgagtggaaccaaagaagcaaggagctaggacccccagtcctgccccccaggagcacaagcagggtcccctcagtcaaggcagtgggatgggcggctgaggaacggggcaggcaaggtcactgctcagtcacgtccacgggggacgagccgtgggttctgctgagtaggtggagctcattgctttctccaagcttggaactgttttgaaagataacacagagggaaagggagagccacctggtacttgtccaccctgcctcctctgttctgaaattccatccccctcagcttaggggaatgcacctttttccctttccttctcacttttgcatgtttttactgatcattcgatatgctaaccgttctcagccctgagccttggagaggagggctgtaacgccttcagtcagtctctggggatgaaactcttaaatgctttgtatattttctcaattagatctcttttcagaagtgtctatagaacaataaaaatcttttacttctg

SEQ ID NO: 9597 - DNA, 225 bp, Homo sapiens
gatctcacttgcttatctgaagaagattgtccaggctcatattgggaatgcttatgaggaaattcatgccgagacctgctattcaatgcatgtatcgttgcctctgcactgacctgaagaaccctgtctccaagtctttggttgaagagaagatatatgactgttgagtgtgctctttcacagaacttggttttcaaataaatataagatctccagatggacaag

SEQ ID NO: 9598 - DNA, 104 bp, Homo sapiens
gtcagggctaaaggaagcgggaattgactttcttaagctttgttttgattacagtgtaagatgtatgtatttttaaaattcaaaataaagcattcattttgaaa

SEQ ID NO: 9599 - DNA, 48 bp, Homo sapiens
ccccagccgggctactaggacaggccagggcacttgctcctgagcccc

SEQ ID NO: 9600 - DNA, 142 bp, Homo sapiens
agccctgcacagggacccccgaagggctggttcagtggcctccagagatccctgggaccctcacgccctgctcccttgcccattcttgctctggacggttcccccagcccatgcaataaatcaccagtgagcatttatttct

SEQ ID NO: 9601 - DNA, 689 bp, Homo sapiens
acagcaaaaaaggaaaagttaaactaaaaaaaaaaaggccgccgtgacctattcaccctccacttcccgtctcagaatctaaacgtggtcaccttcgagtagagaggcccgcccgcccaccgtgggcagtgccacccgcagatgacacgcgctctccaccacccaacccaaaccatgagaatttgcaacaggggaggaaaaaagaaccaaaacttccaaggccctgctttttttcttaaaagtactttaaaaaggaaatttgtttgtattttttatttacattttatatttttgtacatattgttagggtcagccatttttaatgatctcggatgaccaaaccagccttcggagcgttctctgtcctacttctgactttacttgtggtgtgaccatgttcattataatctcaaaggagaaaaaaaaccttgtaaaaaaagcaaaaatgacaacagaaaaacaatcttattccgagcattccagtaacttttttgtgtatgtacttagctgtactataagtagttggtttgtatgagatggttaaaaaggccaaagataaaaggtttctttttttttccttttttgtctatgaagttgctgtttattttttttggcctgtttgatgtatgtgtgaaacaatgttgtccaacaataaacaggaattttattttgctgagttgttctaacaa

SEQ ID NO: 9602 - DNA, 1079 bp, Homo sapiens
ggccggctggggcagctggcactcaccaggcctgggtcaggtggggaggggacaccaagggcccatttcctcccctctctacctgcagtgagttccagacctgcccgtcccctcaccagcgcctccccaccctgttggtactgttccagaaaaactgttactccccctcacccactccctccttccccagttgttcccttcagactcaggggctccaccaatgccatcccaaaacagggtcagacactgcccagcttccctccaggaggttcttgtctctgtgtaagggcttgtctccctcccagtttttcttttgctccacgtcattttgtcaggctggttataagccggaggcagctttaaccagcccccagggatgattgtgaaggaggcccctccccttgtgaggagggggcactcctctccagcccctggtaccacagtcctcacgatggtgcagtgatttctagccaggcgtcaagatgcgctgctttccctctcctgcctcatcccttgttggcagctccagttcaggccgtggagggacgtgatgctgggctgtgtttactaaacccacgggttttcagcctcttaagcccagctccgatctccaattagttgagagcgctgggttgactaacctctggtatctgagcacagacagagggtgctgtgggtctgctgggtggcagaaatggttccttccggcttggcgttctctcctggccactcttcctgctgcctctgactactcagccttgttttcggtgtgtaggccccagctgcccactggaactgccggctaatgcttgctctcccaagatctttaactcctcctggctgcacctgggtagggatggtggcatcgatgcccctctgtctgctgaaggacctgttgctgcttctgtcttttcacccctccttggctgatgacccagagccctctgatgatggcattctcctggcaagagaaaaagacttaactagacttctgaacttgaacagtttcaggttatattttaatttttttttttttgtacaggttctgattctaatacatttcaacatgcttttgtccc

SEQ ID NO: 9603 - DNA, 568 bp, Homo sapiens
gctccaccagccgcctgccccgcctgccccgcctgcctgtcccgccacactggctttaggacctgttgacacggaggggggtttttaatttggtttttaacaactcaggggtttgtttttatttttatttaatttttgcagctcaacttttaaacaaactgcaggggagagggtggggctggaaggaaggctgaggcctggtcagcagtgaccccagcagagcaggccccagtcctcctgggaggctggccccccttttttctgggccctactgccctcctctgcccaggaaatgggggggtttcagcaactcagtgtcacagaataaaatcaagtgtggagtgccatctggtgtgtagggcgcctctgggaagcctgggcagcagaatgccccttgcacccagggcaagggacccagttcaggcttcacccctcgctgctgagccgatgtcaacacctggaactttcctgtcagttccaacacgattcagagctggctgcctggcagatgattgatactggagtctcattctgcctgattaaaaatggaattagtatgcaacactga

SEQ ID NO: 9604 - DNA, 1092 bp, Homo sapiens
gtgtcccgtccctggggctcctgcttccccatcccggagttctcctgctccccacctcctgtcgtcctgcctggcctccagcccgagtcgtcatccccggagtccctatacagaggtcctgccatggaaccttcccctccccgtgcgctctggggactgagcccatgacaccaaacctgccccttggctgctctcggactccctaccccaaccccagggactgcaggttgtgccctgtggctgcctgcaccccaggaaaggagggggctcaggccatccagccaccacctacagcccagtgggtaccaggcaggctcccttcctggggaaaagaagcacccagaccccgcgccccgctgatctttgcttcagtccttgaatcacctgtgggacttgaggactcgggatcttcaggacgcctggagaagggtggtttcctgccaccctgctggccaaggaggctcctggggtggggatcaccagggggattttgacacagccttcggctgccccccactaagctaattccacacccctgtacccccccagggggccctctgcctcatggcaaaggcttgccccaaatctcaacttctcagacgttccatacccccacatgccaatttcagcacccaactgagatccgaggagctcctgggaagccctgggtgcaggacactggtcgagagccaaaggtccctccccagacatctggacactgggcatagatttctcaagaaggaagactcccctgcctccccagggcctctgctctcctgggagacaaagcaataataaaaggaagtgtttgtaatcccagcactttgggaggccgaggtgggcggatcacgaggtcaggagatggagaccatcctggctaacacggtgaaaccccttatctatgcgcctgtagtcccagctacccaggaggctgaagcaggataatcgcttgaacccgggcggcggagattgcagtgagccgaggtcatgccactgcactgcagcctgggcgacagagcgagattctgcctcaaaaataaacaaataaattttaaaaataaataaataataaaaggaagtgttagacaatgt

SEQ ID NO: 9605 - DNA, 835 bp, Homo sapiens
gtgtcccgtccctggggctcctgcttccccatcccggagttcccctgctccccacctccagtcgtcctgccggacctccacctggagctgtcacccccggagtcgccacacagacgtcctgccatggaaccttcccctcccggtgcaccctggggaccgagcccttgacaccacgccctttgctttatcttgctcttgaaattttggccccaactccagggactggggatttgtgcctggcagctgcctgcatttcaggaaaagaggaggctcagaccatccagcccccgcccatatcctgaggtggatcaggcaggctctctccccggggacatgaggcacccatacctaggaccccctgcgccttttttagcttcagtcatggcagcacctgagggacacaaggacttgggtgcatcaggacgccttggagaagcgtggcttcctgccaccctgcaacccaccctcccagccaaggaggctgctgtggtggggatccccaggggggctttgacacagtcctctgctgtccctccactgggctaattctacacccctgtgcccctcctaggggcccatgagtcagagaggcttgccccaagtcacagccactcagatgttcgacgccccctaaggtccattccagcacccacctgagttccgaggagcacctgggaagctctgggtgcaggatagcagtccagagtccatggccccgcctaggccatctgggtgctgggcatggatttctcagcaaggaagactcattaccttccctccctgggcctccattcttctgggaaacacaaagcaataataaaaggaagtgttagac

SEQ ID NO: 9606 - DNA, 884 bp, Homo sapiens
gtgccccactccggagttatcctgctccccacctccgggcgtcctgccctgttccccgtcctgagccgccacttccagcgaacacacacaggtgtcctgccgttggaccttcacctcctagagataaaccagcctcagctggcgcagcggggcccttcttccctccgcatccccttcagggagcaggagcccagggcgccctgggagctgagcctgggacttccaggacctcccctcaggttgttctctgattcttcctcccaaccccagagactgcagatttgtgccatgcggctgcctgcaccccagacaataaagggaccaaaaccacccaacccccaccctgcctctatcctaaggaagaccaagcaggcctggacccagagacgtcccccatcgtgggacacgacacacccagaccgcgtgccccaccgtcttagcttcaatcctggcagcacctggtagacccaaggacttgggtggatcaggacacctgaagaagagaagcttccggcaaccctgcaacccacccaaggaggctactggatcggggattcccaggggggctttgacacagtcctctgctgtctccccactaggatcattccacacccctgcacctgaccaagggaccaatgaggcagaggcttgccccaagtcacagccactcagatgcttcctgccccccagtgcccattccaggtcaccagatccaaggagcgcttgaggagctctgggtacagggcagcaacccagagcccatgggccctcccgggacatctggatgctgggcatagatttctcaacaaggaagactcccctgcctcctcaaggtctccattctcctaggagacaaagcaataataaaaggtgttagacaatgt

SEQ ID NO: 9607 - DNA, 182 bp, Homo sapiens
ggtgggcctgttggggagccaggagacagcagggtctgagagaggagccacagtccctaatgacacccactcctagccctgaggctcgtgcccctcagactggggaagagtccaaggaagggagggagcagccactcctcaatgctcaatggctcccctgaaatcaagacaggggccacccg

SEQ ID NO: 9608 - DNA, 612 bp, Homo sapiens
gccaaccaaccactgtggggcatgtgggagtcacacacgtgggtcacactgagtcttatcagccacgttctcctactgaggtcctaagtgtgctctttgggaagtgcccttcaggactgtgtgagccaaacagccctgagaaaagctggggaaacagtctgagctggagtccgagagtggttgggggtgggccgtggctagtgtcctgctgcagtcagcacacacgtgggattggctagctcatcctggcaccagccacccctccactcagtgcactcccctcacttaggcaaagcattattcattcccatcagtctgaagcccgaaggactgttttgtataataccttcggacttgggactggctccccttttacaagttctccctgaaagagggcagtcacaagaggtgtgaagagtagcagccgatgctctctccaaagcagggcagcagcccataccagctggcatctcccccccgtgccttctgggtacaataagcacccaattctcaacagccccagtggcctttccattcatgtgcatttttctgccactgaccacaagacgatttcctgagttttgtaatcctctttttttttttttttttttt

SEQ ID NO: 9609 - DNA, 192 bp, Homo sapiens
ccctctccctctctggatggcaccatcattgaagctggcgtcatcggagtctcttgttctgttggcgtgctacctggaagatccttctgtcctggacaagaggaattggaagagcattttatgttttaagaacaggctgacacgcagcagctacaacaacagctgagatcacttaataaatggtgctaaact

SEQ ID NO: 9610 - DNA, 1056 bp, Homo sapiens
tcctgctgaccttgccctctgcccacagctgtgcctcacagatgccccgagaagagatgactaggcatcttcatcactgctgtcggtcccctccctgagccagcatctccatccaccaccccgtgccagctcccgtgccagccttcattcctcccagtgtccaagcccctccaggagggtcctggggtgggccagatgcctgcccacctctgtctcctgcctctgctcctctgcccttcttatagccagaacttgtatcttctcagcaaccttcactttgtccttgtccctttaccattccccatcaaagagtagtctgctatatcaatttgtgtagatatgtctgtctttttgggtcctcagagaaaatgcccattttctcggagaattctctgcactcctctctgcttcacattcaacttccctgttctcatctttggtaggattctgccagttgcttttgcatcttctgttcctgggtaatggtgggtcttaatggaggctgggtggaccactgcccgtccactcttcaacaggaggaacagcatgccaccatagtaacacacattagagaaaggacagaggtctgctccttcctgccacctttctcctggccccttagcattcccccagtccctccctcttcaccttgctccgtctatgtcttcccagctcagccttttccccactcttaaatactgtactacttcactgtaagaacgaaagaatagttaggataccaatgagtaaaagggttcctgttcactctgactctgtgcaaattgtattacagtagaccgctgacgttcccaagtgacagatccagggcctttcaaacatccccaaagtcatggccatactcaccattagccagtttctaacatctgtttcagggtatccagctgtagatgttcttatcccccatacttgtgagttcttggggttgctcacaaatactaggggtttttgttgtatttttaacaaatatatcctaatgtcatatttattctcttttgtaactgctgtctttacaataaagaaatcatctgcctttct

SEQ ID NO: 9611 - DNA, 1748 bp, Homo sapiens
gcacctgccagtggactggccatccctctcctgtctgccgactatggagtctccacctttggacacaacacttactcaccatttactctttatcactctgcaacaaatcacagaaccgatcatctcaggctttttcttctggccctttgtgtccaagattctttaatccatttttgttggtgaacatctcagactatagataagtggactggaccctgtgtcttgggggtggcagttgggattactccccaacaaggctgattttaggcagcatgtgttcactgtgctgtgatttcatctactgtctcccagaaagtgtgttgggatcggccattagcagcttgctttctcttgtcactttttttcttctattttgttttttcttcttctttttccccccatcagggcaaatggtctaactggtgcaatcatgaagagagttaatggttaacagacattggccaataacaaaacaccccatggactgtgactcgagtatccaacaggcagtcagagctctcccggtctgaaagttgcattgccactgctaactttgggattgcatcagagaggccctgagtggggttgagatgaggttggtttggtttgatgttacacactcctcacctgttctttctgagtgtcctttctctgaaaggatttatgtttttcttcgttagatagtgacttctgagcaagctgatctcccctggcatgctccaacctgattggacaaaggaagctctatggcctgggagagagactattcttaatttttctttcttacaaaaactgatttttcccataaatatttttacttcagaggactaggaccattttgttttgggcccttctgctgaaaatttgtctcgtttaagaggcagctagaatctttaccatatgtatgaatttgtataatttcatttttggatagggataaacttttgcttctgataaaagcctggaatttcatctggtcctcagagcattgcgtgtgtgtcttgctgtagcccggaaaaggttttgtgtaaagattctgggatggcaagttgtttgccttttctgaaaagagaacatacagaacctgtccatctttaagaccttcatccatggaatctactatacaggaggatgcagtgggctggaggggatgggcgaaaatgggagcaggaagcctggcctggcttctggtcatggcctcctaaaaccttaaacttcaagtagaaatgtactcaagccctatttataaacaaatacttttcctgcctccaccaaacccctacagaacatcacctggaattgccactcacactgggttggagtcattgggcagctgtgcctgtgcgagaggtgctgtggtctgggcagcccctggaaaagcacctttgctgcctgtcattgttgcctgaagaaggctggagttgctctgagagcagtttgggtttggagtattatatttggcttctatttttattattttggatcaccattctccctatcccttcttgcctccctcccttctaaacatgtgtaataactatacagagactgctacaaaattgtatatagtttttggatcaaatagcatgaggggagaggaaaccattaaaagttggggctcctactctcctttgctttgtaaattcaaaagttgggggtgggtaagagggatagttaaaatgtttacaaaactttaggctccctcggaacttttgccagtgtggaggaaaataaaaaagaacttaaat

SEQ ID NO: 9612 - DNA, 41 bp, Homo sapiens
agcgaataaaggggccgcgcccggccgcggcgcgactcggc

SEQ ID NO: 9613 - DNA, 1194 bp, Homo sapiens
agccctcagtgagctgccactgagtcgggagcccagaggaacggcgtgaagccactggaccctctcccgggacctcctgctggctcctcctgcccagcttcctatgcaaggctttgtgttttcaggaaagggcctagcttctgtgtggcccacagagttcactgcctgtgagacttagcaccaagtgctgaggctggaagaaaaacgcacaccagacgggcaacaaacagtctgggtccccagctcgctcttggtacttgggaccccagtgcctcgttgagggcgccattctgaagaaaggaactgcagcgccgatttgagggtggagatatagataataataatattaataataataatggccacatggatcgaacactcatgatgtgccaagtgctgtgctaagtgctttacgaacattcgtcatatcaggatgacctcgagagctgaggctctagccacctaaaaccacgtgcccaaacccaccagtttaaaacggtgtgtgttcggaggggtgaaagcattaagaagcccagtgccctcctggagtgagacaagggctcggccttaaggagctgaagagtctgggtagcttgtttagggtacaagaagcctgttctgtccagcttcagtgacacaagctgctttagctaaagtcccgcgggttccggcatggctaggctgagagcagggatctacctggcttctcagttctttggttggaaggagcaggaaatcagctcctattctccagtggagagatctggcctcagcttgggctagagatgccaaggcctgtgccaggttccctgtgccctcctcgaggtgggcagccatcaccagccacagttaagccaagccccccaacatgtattccatcgtgctggtagaagagtctttgctgttgctcccgaaagccgtgctctccagcctggctgccagggagggtgggcctcttggttccaggctcttgaaatagtgcagccttttcttcctatctctgtggctttcagctctgcttccttggttattaggagaatagatgggtgatgtctttccttatgttgctttttcaacatagcagaattaatgtagggagctaaatccagtggtgtgtgtgaatgcagaagggaatgcaccccacattcccatgatggaagtctgcgtaaccaataaattgtgcctttctcactc

SEQ ID NO: 9614 - DNA, 1324 bp, Homo sapiens
cggggctctcagggctgggaggaccccagtgccctcctcagaagaagcacatgggctcctgcagccctgtcctggcaggtgatgtgctgggtatagcatggacctcccagagaagctcaagctatgtggcactgtagctttgccgtgaatgggatttctgaagatttgactgaggtctctcttggcctggaagaataacactgaaaaaacctgacgctgcggtcacttagcagaggctcaggttcttgccttgggaaacactactagctctgaccttccatacctcacttgggggagcacagggccccgctgggcctcctcaccaacggcagtgccaaaatcagcccccacatcaaggtggtgttctctgtgctttctctcgtccttccaaagtcggttctggcctaacgcatgtcccaacaccttgggttcatttgcccggtgaactcactttaagcattggattaacggaaactcccgaactacagacccctccctggtgggttgcatgaatgtgtctcattactgctgaaatgtcctcacatctctttcactgttcttcagagctttctggctctctttcccccacaaaattcgacatatttaaaaatctccgtgtggctttaaaaaatggttttttgtttttttgtttttttgaggtgggagaggatgtgtgaaaatcttttccagggaaatgggttcgctgcagaggtaaggatgtgttcctgtatcgatctgcagacacccagaaggtgggtgcacactgcatgcttgggggtgccaagggattcgagacctccaacatacttgtctgaaggtggtgattctggccatggcccctctgccaagcctgtgtgcgatgcccttggtgctttagtgcaagaagcctaggctcagaagcacagcagcgccatctttccgtttcaggggttgtgatgaaggccaaggaaaaacatttatctttactattttacctacgtataaagttttagttcattgggtgtgcgaaacaccctttttatcacttttaaatttgcactttattttttttcttccatgcttgttctctggacatttggggatgtgagtgttagagctggtgagagaggagtcaggtggccttcccaccgatggtcctggcctccacctgccctctcttccctgcctgatcaccgctttccaatttgcccttcagagaacttaagtcaaggagagttgaaattcacaggccagggcacatcttttatttatttcattatgttggccaacagaacttgattgtaaataataataaagaaatctgttatatacttttcaaactcca

SEQ ID NO: 9615 - DNA, 143 bp, Homo sapiens
agatgtcggctcaggatgccggaaaatgacctgtagttaccagtgcaacgagcaaagccccacagtttagtcctttggagttatgctgcgtatgaaaggatgagtcttcttccgagaaataaagcttgtttgttctcccctgg

SEQ ID NO: 9616 - DNA, 2637 bp, Homo sapiens
cctctgtcctctcagcctgtggcctccacatccccgccgccgaggcctagcctccgccctctcagcctgtggcctctgcgcctcctgccactgaggccctgggcagatgctgcagcccgcccccttctcatggtgctacttcctctgtcagctacagaaagcctccgtgacaccgtccaccagagctctggggtctcgaacataacaacacagctacctttgaaacaacactttctccagctcagagtcacctggggcacatgtgtcacggccactcagctctcgcccgcctgtgctgtgggccagggaatccagcggcgtctggcctcctgggcactgcttgcctggcctcgtgcttggattgtcccgggggctcctctccgtgtgtccttctgtggccgcaccgtgtggctccgcctcctggcccccagccagttctcagaaacgtggctggggcccagcacagcagcctgcaagggcccctgtttgttgatgcagcttttgttgaacaaaaatcgtgctctttcctggtttgaaagtagcatggatgtttccagtcttgttgattgtaatttgacgtgaagagaaaaaaaaattcctcctgcgtgagccaaggcagcgggtgctgtttcccaggcggggagcccctccctgggtgtcacagggcctgtgctcctccctcctccatcctctctcctcccgctcctccctccccccactgtgggctggggacgcctgcccttctgtctccggacgctctaggcgagttcagcttggggtgtgagtgagacagcttgccagctgcatccctgcagacagaggatgtgtgtccacatgagtgtttctgtgtgggaaatgcttcctggctctgggaaactttttctgcccattctgtggttcccagggagcgtggccctggtgggccaggggtggtttgacctcttcagcccgtccggtggcctggaggccggaggctctcctgagtgtctgcccctgcagtggcttcttgtcgcctgctgctgggcgtgatgtcgctggaggtgctggcagggactctgatttggtggtccgcgctgcccctgccctgcctctgtcctggctctgaactagtagatgatggtgccagagggcagggagctcgcctggggagagggctgtgccccgtagggacagtgcccaggtgaaggatgcccctggtcctccagggcactgactttgcccttttttcccgttgatagtcatggctcagaggtgcttgtaaatgtcttgggaagaggtttctgtaacccctgccctggtgtgaggaggaaatggctctggcctggctgcctggccgtggcttctctttggctcccaaagagaaggacagtgttgggagtatctgccgtggcttctctttggctcccaaagagaaggacagtgttgggagtatctgccggcgctgtccaggtcctttagtcagcgtcactccatctgatgtgcagaagctgggctgcacctgcgggggtgggcatagaccgggctgggtctgcagcagcccctggtcctgagcaggcggcagtgaacagcactggcccacctcccactcacagcccctctgtcccctctgcagtgcacccaggtgggcccctctgcgtgcctttgggtgctcccctctcgtggtcgttctggcccgaggcccttagagtatggaggctgagccaggccttgggtttccccagcacagcctcctgtcgctgcatgcgacgtgttgggatttttggatgaaagactctcccacgctctgttggtggacttagctgcctcactggaagtgatgtgggtggaaggtggttgtatgttaccttttccacctctcattgttttccccagaacattgtagatgggggttggcagagggagaaataagccagccacggcagtcgcttggtttcccaggtggaatgggctaacacaggagatgatgggaacctgtcccgcagtccctgcatgaccattggccctgctggcctggcgatgtgggcatcctggggttcttagggtcccagaacaagccccaggcaagctggaacttgggtggggaggggacatgaggaggataaacagctgactgtggcttcaaggacatcagggccaccccaagtcctcagtgtcctactcctggcaaggagttgggtttggatcaaaagtgtttaaaattaatatgttgtcagtgattagaacaacactgtttacataaaaaccatttttctaattctaacaagttagaatgtgaggaaggaatgaacatgagtgtttaggaacctgccctttggtgctgggctggcgtcccgcactggggtgtcctcgctgtctgggggctgctctgctgccccggcccaggtccccttgtggtgttgccagacgggcctcatggtctgctgtgcagagagaggcaggaaggatccctgaagagtcttggagaaaaggttctgtgccctcaggtggggcttaccccctcgtatttataatcttaatttatatagtgaccaccgtggaaacaaacgcctcttgtattgtcatgtacatagtccatacctgagtgctgtacataagttgttctgtgtataaataaaacaagcctgtttttgatcttcc

SEQ ID NO: 9617 - DNA, 746 bp, Homo sapiens
gaagtgggtgggaaataaggtaaaattttgaaccattccctagtcatttccaaacttgaaaacagaatcagtgttaaattcattttattcttattaaggaaatactttgcataaattaatcagccccagagtgctttaaaaaattctcttaaataaaaataatagactcgctagtcagtaaagatatttgaatatgtatcgtgccccctctggtgtctttgatcaggatgacatgtgccatttttcagaggacgtgcagacaggctggcattctagattacttttcttactctgaaacatggcctgtttgggagtgcgggattcaaaggtggtcccacggctgcccctactgcaaatggcagttttaatcttatcttttggcttctgcagatggttgcaattgatccttaaccaataatggtcagtcctcatctctgtcgtgcttcataggtgccaccttgtgtgtttaaagaagggaagctttgtacctttagagtgtaggtgaaatgaatgaatggcttggagtgcactgagaacagcatatgatttcttgctttggggaaaaagaatgatgctatgaaattggtgggtggtgtatttgagaagataatcattgcttatgtcaaatggagctgaatttgataaaaacccaaaatacagctatgaagtgctgggcaagtttactttttttctgatgtttcctacaactaaaaataaattaataaatttatataaattctatttaa

SEQ ID NO: 9618 - DNA, 2223 bp, Homo sapiens
atcatattaaggaatgctgatgaacaattttgctatcgactactaaatgagagattttcagacccctgggtacatggtggatgattttaaatcaccctagtgtgctgagaccttgagaataaagtgtgtgattggtttcatacttgaagacggatataaaggaagaatatttcctttatgtgtttctccagaatggtgcctgtttctctctgtgtctcaatgcctgggactggaggttgatagtttaagtgtgttcttaccgcctcctttttcctttaatcttatttttgatgaacacatatataggagaacatctatcctatgaataagaacctggtcatgctttactcctgtattgttattttgttcatttccaattgattctctacttttcccttttttgtattatgtgactaattagttggcatattgttaaaagtctctcaaattaggccagattctaaaacatgctgcagcaagaggaccccgctctcttcaggaaaagtgttttcatttctcaggatgcttcttacctgtcagaggaggtgacaaggcagtctcttgctctcttggactcaccaggctcctattgaaggaaccacccccattcctaaatatgtgaaaagtcgcccaaaatgcaaccttgaaaggcactactgactttgttcttattggatactcctcttattatttttccattaaaaataatagctggctattatagaaaatttagaccatacagagatgtagaaagaacataaattgtccccattaccttaaggtaatcactgctaacaatttctggatggtttttcaagtctattttttttctatgtatgtctcaattctctttcaaaattttacagaatgttatcatactacatatatactttttatgtaagctttttcacttagtattttatcaaatatgtttttattatattcatagccttcttaaacattatatcaataattgcataataggcaacctctagcgattaccataattttgctcattgaaggctatctccagttgatcattgggatgagcatctttgtgcatgaatcctattgctgtatttgggaaaattttccaaggttagattccaataaatatctatttattattaaatattaaaatatctatttattattaaaaccatttataaggctttttcataaatgtatagcaaataggaattattaacttgagcataagatatgagatacatgaacctgaactattaaaataaaatattatatttaacccttagtttaagaagaagtcaatatgcttatttaaatattatggatggtgggcagatcacttgaggtcaggagttcgagaccagcctggccaacatggcaaaaccacatctctactaaaaataaaaaaattagctgggtgtggtggtgcactcctgtaatcccagctactcagaaggctgaggtacaagaattgctggaacctgggaggcggaggttgcagtgaaccaagattgcaccactgcactccagccggggtgacagagtgagactccgactgaaaataaataaataaataaataaataaataaataaatattatggatggtgaagggaatggtatagaattggagagattatcttactgaacacctgtagtcccagctttctctggaagtggtcgtatttgagcaggatgtgcacaaggcaattgaaatgcccataattagtttctcagctttgaatacactataaactcactggctgaaggaggaaattttagaaggaagctactaaaagatctaatttgaaaaactacaaaagcattaactaaaaaagtttattttccttttgtctgggcagtagtgaaaataactactcacaacattcactatgtttgcaaggaattaacacaaataaaagatgcctttttacttaaacaccaagacagaaaacttgcccaatactgagaagcaacttgcattagagagggaactgttaaatgttttcaacccagttcatctggtggatgtttttgcaggttactctgagaattttgcttatgaaaaatcattatttttagtgtagttcacaataatgtattgaacatacttctaatcaaaggtgctatgtccttgtgtatggtactaaatgtgtcctgtgtacttttgcacaactgagaatcctgcagcttggtttaatgagtgtgttcatgaaataaataatggaggaattgtc

SEQ ID NO: 9619 - DNA, 288 bp, Homo sapiens
gtgtccctcgcccttttggtttgttcaaggagctgctgctttgcatagctgctctagtgtctggtatcatcggatctggttttgaataattcccaggagtcctgggtccctggcctccaaagctggaatgtgaacgcatgccacggtggtctgaccctcacactccttttctcttaacagcaaaatgcaatggaaggaagaaaagttccaacaaagaatgattttgtgaattctgtgatttttcttctgatcagtttcaatctgtaataaatgccttatttttcctgt

SEQ ID NO: 9620 - DNA, 1896 bp, Homo sapiens
atgggtcccctcccctcctgctgctctggagtgcaagccctcttctgccctgcgtgccctgctgtcaccgcggagctgaagagggaggaaggggcggctgctcagacagatttagggcccgccagctaggctacacccatcatgcgccgccctcctccatcgagggagaggcctgaagggactgcctactgcagctcgttgccaatcacatagctttctatttgttaagtataaatttaaatttaaaatcacttttttaacgaatggggggaagggatctatgagaaaggtggtatctaatttttttatggaccataaaggtttaaaagaaaataggggcacaggctgttgaggtttttatgttgttatagacctttttaaattatgttagagatgtatataggtatttaaaggtcactgggagcgtttctgattcccggccacactttgcatttcaacactcagcccggaaagatgctcgttcggttgttggacctctttcactccctgcgtgtaagaaggtgaatcacgtgggaaaaagtggcttttcagtaaacgggtacagctcattctttctgagaaggccccaggtcctgctccctcctcggatttgattgtcttccgtgctttgcctcactcgtagtaaatgaccatccatagaatatgtgaatctttggtgagcttcagtgggcagagtgaagtcccgcattagcatttaggtgccctgagctgtttctgccaatagattagaaagcagccatgagttgacagtctttagggcccctgccagtgtgcaattagtcattgacaagaacaatgccatttgagagtgaggtggtccctgctgctacgaggccattgtactgttttttccttgaggtcaaagcagtgcttcccatagagtttgctgcctcttctgtggacaggaagaaaacttcatgaccgaatcagagccttggtggccactgactctcgtgcttattgcagatgctgtggttggcctcacaagcaacgccttatgctgatgtgcagaggtgccagctgccatttgccaaactctgcatttcatttcatctaaggcttaacccctcttccttcctggtgtacctgtgtctcctcggaaggaagtcatagtttagatgaaaccattttttgtacaatgtaaagatcatctgagcaagatgagcattttgtaaaaatgaaaatgtgactcacataaaatcaggaacttgacacagtgttgcattaataactttagggtgcagacatgctgtgtgaatctcacaatgcgtcgtagatgtcgcgtgttggaagggagcaggaggaaggactgatactggcaaatcagtagagtgaggtgatccttagcaacgtgccaggacacttcctgtgtgcctgcagttgtcagggaccatttgggatcccgaatctcattctctaaaactgctttcttgaaacatgttacttccttagtataatcaatgtatactcccttactggcctgaaacgttgtatagctacttattcagatactgaagaccaacggactgaaaaaaagaacaaacattagctattttatgctgcaagaaccaggacacacaattcgccaatcatcccaccatataaccttcgattgtgcttctcaactccaccccataatttctcccagagaccatctatcaccttttccccaaagaagaaacaaaaccagttgcaccttaaaccatggatattttttcctcaggggctttaaatagtttcctatgcaacgtgtcttgtagcacaaataaaattctacaaaagttgcagtaaattttatttggatattttaacctgttaagtgtgtgtgtgttttctgtacccaaccagactttaaataaaacaaacatgaaacct

SEQ ID NO: 9621 - DNA, 1348 bp, Homo sapiens
ggaacagccgtgcccgcctgctcgccgcacctgggacgcggcagcctcgccgcattctcgctcagaagtcgcagcacgtgagtcccgtcgcatcccctccctcttcctggtggccacctccctcccgcccacccactctcaccccaaacaaaatcacaaaacctggacatccctcaaggggcgaagaggcggccgggagactgcagaagtggctccttttcataaactcccctaaaccacacacaggagagagcgacgggcctcggccctttgatgatagcacatggcgcaggacccttgtcctggtggcacaagggatggggacgcgagggggaggggaggcgaggaacaaggagaaggggcaactttccttaactggcagttgagcacatagtacatttcccctctaccaaacggaacacttggattccatctcttctctgaggagctcgacggcataaatcagaagcaagcacagagtttgtcaggtttgaagcccctatgatggtgtgtgtcaaatcagttgtagctaatctgtccagggagaatactggcttcattacacttgtacagccgagttcttcccgcattactgctgtttaatagaacgtgattagtcatcgccgagaagaaagcatattagccgaggaggtagtcacgcggcacgcgccggtgattgccacgatgtgattgcaatactcttagaagcaccatattatcccagacatgttctttcaagcccttggagccctctctaaattcactgtcatcatttagtatctgtttaatttttcagtccaaagagaggaaatcagtcgctgagtattatttgactccggtctccttggtgcaaaaacaaaatgggaaaaataaataagaataactcagaaactcaaaaggaaaccacaaattcagctaataatagcatttcgagtatatttcgtaaactaaggaaatacacaaaaggctgttttttccgactgtaagagatatttgatgtccttttgccgaggtggatgtgttagtctcaggccctcctggaccacgttgcccaagtcacacaggcttctgtgttatgtatttagataagatgtgtgaaaatatatttgaataaaagaagttcataaatatgcattgatttttgtacagacaaatggcacctctcttaatttataaattgaactggatgtgaactaataatgtgcaactagttgagataagagggttacagatcattgtacatggaaaatattcccagcagtaaacacttccattaatgtgatctacggcttttgaaaaggagcatctcagaataagatggtggtacaatttgcttattaaaattgag

SEQ ID NO: 9622 - DNA, 795 bp, Homo sapiens
tctgccctggagaggctctgggacgggtttacttgtttttgaacagggtgatgggccctatggttttctagagcaaagcaaagtagcttcgggtcttgatgcttgagtagagtgaagaggggagcacgtgccccctgcatccattctctctttctcttgatgacgcagctgtcatttggctgtgcgtgctgacagttttgcaacaggcagagctgtgtcgcacagcagtgctgtgcgtcagagccagctgaggacaggcttgcctggacttctgtaagataggattttctgtgtttcctgaattttttatatggtgatttgtatttaaattttaagactttattttctcactattggtgtaccttataaatgtatttgaaagttaaatatattttaaatattgtttgggaggcatagtgctgacatatattcagagtgttgtagttttaaggttagcgtgacttcagttttgactaaggatgacactaattgttagctgttttgaaattatatatatataaatatatataaatatataaatatatgccagtcttggctgaaatgttttatttaccatagttttatatctgtgtggtgttttgtaccggcacgggatatggaacgaaaactgctttgtaatgcagtttgtgacattaatagtattgtaaagttacattttaaaataaacaaaaaactgttctggactgcaaatctgcacacacaacgaacagttgcatttcagagagttctctcaatttgtaagttatttttttttaataaagatttttgtttcct

SEQ ID NO: 9623 - DNA, 1102 bp, Homo sapiens
tttatcactctgagttcaagattcatcttcagaatcctgtatactgacaaacgtagaaatgtaaagtttgtattttcaatttattggatggcttaagcacctcagcattccttactatgtgataaaatacatatagaatataagatatactatatacattttgtccataaacgttatgctgaatagttgttgaaacagttctcattttgtagtatttaataatctggatggagcctgtcagtattacagttagttttctagtgactcataaaataagatttcctgtttcatgtagaatagtgtttgtcaactgtcttttctctgtcccagcacatgccgtactcttatatgtaccattggttgataattataatgattcatttggacttgaagaaagattgtccccaggcacagtatctgaatcactggggattatgattcaccctctttggagaacatgctctcttttcaccccccacctcctgagagccactaatgtaagatacagaaacatagctgaggaacaaatagaccatttccatactaaaccagtttgttaactttagattttttccaatagtgtgagtatatccattgctggcagtggagggcttgccatgaaaatgcaacttatttaagacatttatgagacatattaacttgtgctgtcgccttttagaaggagaaacttaagtgtggaatgcattatatgggcaaagaagctatgaagatacatgatacactttgtacaactatcctgcagcccattggttgcttatatttatcgcttggctcaagttctgccctttggagaaatactgagcaagtctttcattctctgtgtgacagccctctgaatatttgaagttgtttgttgtaacttaaggttataacagcccttagttcatttactctgcatttgttcaataaatatttaactgaattcttcaattatttcatctaagatagtttctggaaatttcactctcgatctttctgtggacacaatctattttgtcattgtgtctatatgaatctcttaagtagaaatgagttgtatggtgaatctgtgtagtgataattatataatttatttattttg

SEQ ID NO: 9624 - DNA, 1725 bp, Homo sapiens
cgggacaggacagagagacagagcagccctgcactgttttccctccaccacagccatcctgtccctcattggctctgtgctttccactatacacagtcaccgtcccaatgagaaacaagaaggagcaccctccacatggactcccacctgcaagtggacagcgacattcagtcctgcactgctcacctgggtttactgatgactcctggctgccccaccatcctctctgatctgtgagaaacagctaagctgctgtgacttccctttaggacaatgttgtgtaaatctttgaaggacacaccgaagacctttatactgtgatcttttacccctttcactcttggctttcttatgttgctttcatgaatggaatggaaaaaagatgactcagttaaggcaccagccatatgtgtattcttgatggtctatatcggggtgtgagcagatgtttgcgtatttcttgtgggtgtgactggatattagacatccggacaagtgactgaactaatgatctgctgaataatgaaggaggaatagacaccccagtccccaccctacgtgcacccgctctgcaagttcccatgtgatctgtagaccaggggaaattacactgcggtcaagggcagagcctgcacatgacagcaagtgagcatttgatagatgctcagatgctagtgcagagagcctgctgggagacgaagagacagcaggcagagctccagatgggcaaggaagaggcttggttctagcctggctctgcccctcactgcagtggatccagtggggcagaggacagagggtcacaaccaatgagggatgtctgccaaggatgggggtgcagaggccacaggagtcagcttgccactcgcccattggttacatagatgatctctcagacaggctgggactcagagttatttcctagtatcggtgtgccccatccagttttaagtggagccctccaagactctccagagctgcctttgaacatcctaacagtaatcacatctcaccctccctgaggttcactttagacaggacccaatggctgcactgcctttgtcagagggggtgctgagaggagtggcttcttttagaatcaaacagtagagacaagagtcaagccttgtgtcttcaagcattgaccaagttaagtgtttccttccctctctcaataagacacttccaggagctttccaatctctcacttaaaactaaggtttgaatctcaaagtgttgctgggaggctgatactcctgcaacttcaggagacctgtgagcacacattagcagctgtttctctgactccttgtggcatcagataaaaacgtgggagtttttccatataattcccagccttacttataaattctattctttgaaaaaattattcaggctaggtaaggtggctcatacctataatcccagccctttgagaggccaaggtgggagaattgcttgaggccaggagtttgagacctcctgggcaacatagtgagatcccatctctacaaaaaacaaaacaaaaaaattacccaagcatgatggtatatgcctgtagtcgtacctacttacttaggaggctgaggcaggaggatcacttgagccctggaggttggggctgcagtgagccatgatcgcatcactatactcgagcctgggcaacagagtgagaccttgtctcttaaaaaaattaataataaataaatgaaaataattcttcag

SEQ ID NO: 9625 - DNA, 1122 bp, Homo sapiens
gctgaggcaggcggcaggcgcggtgcacaggaagtctcagtgtgaaggggtcttttctctccactgccaatgtaagtagaatgttctaaattcatagagaggcactgtatgacaattaccaggtgctctactgctttaagttatagactgttacttgtagatttccatgtaatcattgaggttatcacccagattagaaagacatatttgttatcagtgtacgttctaattgagagcattccagtagtatcaaacaataatgtctactgtttatagtccacttaataaaaatagaggcatttactatttgccttaggctgataggaatgtgggttttcttgaccaaatatatcagcatctaattgaaatgaccaaatagcattcttagacttctgtattatgaatataattgatatttaaattaatgtcttgttcacatatgtgtactttcatatttgattttaaaatgtacattataacctgtatggtattttatttaaaggagataaacagccaaatagcaaataggtcactgaatgataagatttgcaccttagaacaataatcattttaaggataacaagtaaatgtctgaaagcatgaggggctttatttgcctttacctcatatgagtctttgatcttgaaccgatacttttggatctcattgttgatatacctgaatttactttgtaagagattttaacttcacttcatgctgatgatgtatcaaattcattttatagaaagatttaaagtttttttctggaagtgatatatgtcaaattacatttcctactgcagtatttgagcagggacagtcattttttaaatgtttttggccgggcgtggtggctcatgcctgtaatctcagtacattgggaggccaaggcaggtggatcacctgaggtcaagagttcgaggccagcctggccaacatggtgaaaccctgtctctactaaaaatacaaaaaattggccgggcgtgatggtgggcgcctgtaatcccagccactccagaggctgaggcaggagaatcgcttgaacctgcgaggcagagattgcagtgagccaagatcaagccattgtactccagcctggacaacaagagcgaaactctgtct

SEQ ID NO: 9626 - DNA, 328 bp, Homo sapiens
gcggggcccaggctgcccgcgggtgcacccaggctgcagggtgaggccaggcaggcctgggtaggggcagcttctggagccttgggacagagcaggcccacaatgccccccttcttccagccaagaagagctcacaggagtccagagtagccgaggctctggtattaacctggaagcccccctggctggaggccaccgccaccctaggaagggggcagggacgtgaccttgacttacctctggaaagggtcccagcctagactgcttaccccatagccacatttgtggatgagtggtttgtgattaaaagggatgttcttgaacttgg

SEQ ID NO: 9627 - DNA, 697 bp, Homo sapiens
taaaaggggacgattgcaggcccatggactgtgttacagtttgtctctaacatgaaacagcaagaggtagccccctctcccgtcctcatgctccctctcagtcccctggattgccccagtcctgtgaccatgttgccctgaagaagaccatcttcatgactgctcattgtagatggagaattcaacataaatacagcaagaaaatgtgtttgggcttctgaagagttgtctgcttaccttaacatgtttacttttttgaacttgtactgtataggctgttggtgaaattcttaagaagttgtaatgaactcaaaattgaggccagagcttgctttcccttttcccaaacaaaattggttttctgcacaagcgatgctaatgatgtgttcagtgtaactcgcagattggcaataagatacccgctacaaactgtgattggatgcaaaatctcttagcttctttcacgaatgttggccctgcctagatgttgtgaagcctcccagaatgcatagagtcattcactgtagatctcttattgaaatgcgtattttatttaatgtaagtatattttggaacagatttgtaatttgtacaattcaatgctttaattattttttctattctcatttagtttgtattttcattgtatagagcagacagaaagatgttgggtcaagcaactattgaagagaaatac

SEQ ID NO: 9628 - DNA, 1057 bp, Homo sapiens
cactggggccgccttccccaccccgcttctgggaagcccgtggcagggcacagggttgtccctccagttccctcctgagggctgtgccaggatgactgtctcatgccccctctgcattttgtcctggagtgccagcgagtgtgcacccccagtttccttccctggacccctgcagagctcacagggcccaggacaccaacgccgcataggactgcccacatgggaccgcccacataggaccgcccacataggaccgcccacatgggaccgcccacatgggaccgcccacatgggaccgcccacatagaaccgtcctccagtggtgaagcggaaacacttagctttatccaccctccccactgggaactgggcacgcctgttgtgagtgccctttcctggaaggtgtttttatctggaagatagaatccaagtatttataactcattgtcagccaaatgctatcatgaacgtaggaaacttgatttttttgttttgatcatggcctctacatgcacctttccagagtggtctcttctcaggccctttttagtccctttccaaagctgcccccaccaccctgctcctctggcctcagtgcacagtggcccccagcctcggccaggcctgctctgctcagcgcccaccgcccaccacccctcctgcttccccgagcctgaccctgttccgcccactggcaatcagggctgcgcacttccctgtccacggtccccaggccttcctgtcttgtcccttttgatcattattaactcagggtttcagctccaacctcgctgagttggtgcagctccaggtcattcctggggtgggaatcggatcatccctgactcagcttttaccttaattttatttgcagaggattcttttctcaaaatgctctggcatttggacacacatcacatgtcgatatttgcataggagtcattttcagtggaataacatttttaatgtgtggttttacggttcaaggaactacttgatgattttgaggaaacacttgccagaaactaaattaacgaataaaagatttcagtgcccg

SEQ ID NO: 9629 - DNA, 1555 bp, Homo sapiens
ccctactggcagcctgctttccagaatgtggtttgggggtgacttggagtttctcttttcttttccttgctcacacccttggtgttcaggtgagccgggcaaggctgcctccagtcctaccagttatcggaggctgcgggactgttctgttgtggcatggttctcctccgagctgggactcagactccttctcaccactgcacccaggaagccccttggcaggtcctgaagtgaggcaatgggccaccccagtccagggcacctctgcccagccggcccccgagacctgggatgctgcctgtttctcacttgtccttccccagtgtcaccagttcccttggcgtcctgtccctcagtttctgtggtgctggtggcctcggccacatccatctttcatgtgagtctgaggtggccccaggccctggtcctgcccctgtttctcctgctgaccttgggtcacaccccttcacctcccatctgtgaatttgggggagctggagtgattccgaggacagattccatgggcaggaggccttcctgccaggccatccctgctggtcacacaccgatgcccgccaggccagtgccccagcccagggtgctccggaggccctgcttcctcaaaggaggctccccatggggcccctgtcctccagcctgaccagccctggcctagtcgtgggccccagcaaggctggagagcagggacgtgggagtagcagtggctgagagagtcctccaggcagggtggctggtgcccactctcaaaggctgctgcacacagaggagaatgccggcaggggtgggcagcagccagacctcaggggggcgtggatactccgtgagggcacctgggtgtcacccacagtgcacctcttcacaggggcctgggtactggagggagggatacaggaagggagatggattccgtcctcgggggctctgggtgctgcggagtattcctgggcatggtgctgggcatggctggcatagggtgtggcttgtccccagcttctgatggcagccaggagaatgggtcatcacccaggctctggggctgaggagggctgggcccaagcccacagggactttggaggtggggctctgcagctgtgagatggcccagcagggagtggcagggacgggaggcttcaggaatattcctcctggcatccaggccccctgggacagaggagggtgcagtcaggcgacaggcttatcaggactccctgcctcaatccctggggattgtccaggcaaaacctggagggcagcgggcaagctgttggatggaacagagagaccctcgcagctgactagggcccaaggggacggacactcaagaagatgtaaaattgggaggggtggtattggccattggggcaggcagggccgggaagggaagtagcaccggccgcagccccaagccagtggcttttccacaagggcctatcctgcagccggcccgctccggcttcctccactgctgaagaccctgctgtagagctgaagctgaacatgtgtttgctaaataaagattcccattcctagcgca

SEQ ID NO: 9630 - DNA, 1841 bp, Homo sapiens
accagggccagggtccccggggaggagtccccacagcggcccctcatcagcctgtggaacggcccctttcattttcgcttatttgttcactcggagctaccattccttccaagctgcgctcaggccaccaggggtgatcagacggcatggcttggaggacacagccttggtctctgtggccaccacactaaactctgagctgagcagtgacaagggcctgagtgccagacgctggcataacagggacaggaagctctgctgcccctggggttcccgagacctcagagaggggagccgggggccgggccagcattcccagagcttgcgagccccactcctgcccctggaccccagcaggggcttttggagcagttgcatgaatgtggggtgaacacggagcgtcccagaaagctgaggctgctggggaaggcaggccccggagatgggatcagcaccaggtcctcgtgggcctgcttctgcccagctcacggcagcgtaactgtggccagccacctcccctctctgggcttcaagctccgcgtccaccacacacggggctggctgtgtgggctttgggtccccactcaggctttgcatgttggtgctgtgtttctgcttctgtggacaaaggaggcccccacccatctcttgcacccagagggcggtgcccacagaggcaccaggaaggagggaggcagggcgtggggcggggctggagggtcccagggaggtgagcagttttgctctcagaagggattgcctccgtctctgtgtgtcagaacaaaggctcttcattagaatggaatttcccaccaggggacgactcttgggtgcattggtggcagcctcctgagggtgaggggtagcatccgatgggcccctgccagcatgcagcccgactccggctggctcaggctccgagtggcttctccctcatcctgaatgaggcacccacctttgcagctaaggagacaatgaaggactctccctgggtgcccaatggcgtgtccctcctgtcacaggctccgccctgggacatggggctagaagtcaggagtcgggcccggccaggcacaggccctggtgttgccccagaggccctgggcagctccggtctcccgccggatccaggcttcctctccaggaccagcccctgggttcctccttaacaccccccgcccctggggaccagaggggcctctgacatccttgggttctgaggacggaaacccctgagcctcttgagcttctgtaggtagggatctgctttgctcccagacctgcctctcatagcttttttttttttttttttttttttttgagacggagtctcgctcttgtcgtccaggctggagtgcaatgctgagatcttggctcactgcaacctccacctcccgggttcaagagattctcctgccttagcctctcaagtagctgggattacaggcactcgccaccacgcctgactaatttttgtatttttagtagaaacagggtttcaccatgttgaccaggctggtcttgaactcctgacctcaggtgatccgcccgcctcagcctcccaaagtgctgggattacaaggtgtgggagaagtgagttgaccctggagggccagacagagtggggcctctgggtgctaccaaaggaacaagagcccagagctgaggagaccttcggtggcagatggattggatgaagcaagggtgagggtttctggggccctgggctctgtttccatgtggaaatctgaaatgttttctagacagtgatggaaggaggtcagccaaagggctgtttaaaaacaaagcctccatgtaaaccatttctgcaagaatatttt

SEQ ID NO: 9631 - DNA, 236 bp, Homo sapiens
acactcaaaagtttcagagatgaaaagtcacctcagtttaaaagcaaaaaggaagatagaaaatcattactcttttaagttccagtttgctaagaaaatgaacagtttacaatgttattatccagctaattttcagagctttaaaactgtaagcatgttaagtgtattaaaaaaaccatgttttcttacctccttccagatggaatactggctagttataaatagcgcttccaaac

SEQ ID NO: 9632 - DNA, 1785 bp, Homo sapiens
ctgccccaaggccccagggacagaggccaaggactgactttgccaaaaatacaacacagacgatatttaattcacctcagcctggagaggcctggggtgggacagggagggccggcggctctgagcaggggcaggcgcagaggtcccagccccaggcctggcctcgcctgcctttctgccttttaattttgtatgaggtcctcaggtcagctgggagccagtgtgcccaaaagccatgtatttcagggacctcaggggcacctccggctgcctagccctccccccagctccctgcaccgccgcagaagcagcccctcgaggcctacagaggaggcctcaaagcaacccgctggagcccacagcgagcctgtgccttcctccccgcctcctcccactgggactcccagcagagcccaccagccagccctggcccaccccccagcctccagagaagccccgcacgggctgtctgggtgtccgccatccagggtctggcagagcctctgagatgatgcatgatgccctcccctcagcgcaggctgcagagcccggccccacctccctgcgcccttgaggggccccagcgtctgcagggtgacgcctgagacagcaccactgctgaggagtctgaggactgtcctcccacagacctgcagtgaggggccctccatgcgcagatgaggggccactgacccacctgcgcttctgctggaggaggggaagctgggcccaaaggcccagggaggcagcgtgggctctgccaatgtgggctgcccctcgcacacagggctcacagggcaggccttgctggggtccagggctgttggaggaccccgagggctgaggagcagccaggacccgcctgctcccatcctcacccagatcaggaaccagggcctccctgttcacggtgacacaggtcagggctcagagtgaccctcagctgtcacctgctcacagggatgctggtggctggtgagaccccgcactgcagacgggaatgcctaggtcccttcccgacccagccagctgcagggcacggggacctggatagttaagggcttttccaaacatgcatccatttactgacacttcctgtccttgttcatggagagctgttcgctcctcccagatggcttcggagggccgcagggcccaccttggaccctggtgacctcctgtcactcactgaggccatcagggccctgccccaggcctggacgggccctccttccctcctgtgccccagctgccaggcggccctggggaggggtggtgtggtgttgggaaggggtcctgcagggggaggaggacttggagggtctgggggcagctgtcctgaaccgactgaccctgaggaggccgcttagtgctgctttgcttttcatcaccgtcccgcacagtggacggaggtccccggttgctggtcaggtccccatggcttgttctctggaacctgactttagatgttttgggatcaggagcccccaacacaggcaagtccaccccataataaccctgccagtgccagggtgggctggggactctggcacagtgatgccgggcgccaggacagcagcactcccgctgcacacagacggcctaggggtggcgctcagaccccaccctacgctcatctctggaaggggcagccctgagtggtcactggtcagggcagtggccaagcctgctgtgtccttcctccacaaggtccccccaccgctcagtgtcagcgggtgacgtgtgttcttttgagtccttgtatgaataaaaggctggaaacct

SEQ ID NO: 9633 - DNA, 340 bp, Homo sapiens
ctgtttctggcaaagcctgccgtgtcttacatttgtctctctatccggattagatgttgctatatgaacacatcgggactgtgtctgcaggaaggagctccccattcgaggccttcacagtgtcacccacattcacctctttccacttaaacgtgtcccatgaatcttgtcataacagttttgtgttccttaactattttgtctgccatgtcatttatgatgtatataacctctttaatgcctgaaatcataagaataatcatcaaaggcaagagggttgtatattttcccgttggagacacatctggaatttgctgcaataaaataataataagaaagc

SEQ ID NO: 9634 - DNA, 832 bp, Homo sapiens
ccctgttggcgggctgaccctcgacctcccagacaccacaattgtgccttctgtgggccaggcctgccatgactgcgtctcggctctggccatgagctctgcccaggcccacaagcccctcccctgggctctcccaggcagggagaatggggagagggacctccttgtgtctggcagagacctgtggacctggcctccccactcccagctctcttgcactgcaggccctggggccagcccgcacacaccatgcctcctgtctcaacactgacagctgtgcctagccccggatgccagcacctgccaggtgccgccccggggcaagggccccagcagccctatggtgaccgccacactgtgccttaatgtctgccgggggcccaggctgtgctgtccctgcagcacgcctccttgcagggatctgagccaccctccccgcacagccctgcaccccgcccctggggttggcagcctcagttggcccctggcagaggaacaaggacacagacattccctcagtgtggggggcaggggacacagggagaggatggttgtccctggggagggccctctggccccaggcaaccttagcccctcagaacagggagtcccaggacccagggagagtgtggggacaggacagcctgtctcttgtagcttcctggggtgggaggcacaggggcaaagcaataccccagggaaagtgggaggtggtgctggtgctctctccaggcccaccatgctgggagaggcggccagagcctggggcctccagcctgggactgctgtgatggggtatcacggtgatggtcccattaaacttccactctgc

SEQ ID NO: 9635 - DNA, 707 bp, Homo sapiens
atctcatcttagctgagccttctgatgagactgcagccccagctgacacctggattgcagactcatgaaagacctgaaactctaccaacagccacctgggggagctggaagtgaatctcctcgtagctgagccttctgatgagactgcagccccggctgacacctggattgcagactcatgaaagacctgaaactctaccaacagccacctgggggagctggaagtgaatctcctcgtagctgagccttctgatgagactgcagccccggctgacacctggattgcagactcatgaaagaccctgagcagaggacccagtttggcagagcccgaattcctgacccacaggaactgggagataaaactctgtggttttaatcttctcattttagaggtaatttttttgtgtagcaataggtagctgacaatgcacagctaaaataatagataattaaccctaatgctagtttcattcatccatcagggtttgcaaagtagtgatattctacttctgtcttccttcattatttattagcagaaatgtatctataaaaagaagtgttccttcattaactctttggtcatgttgaggtacagtttgcataggaaaggcagggcaaatgcttgattctttcccttcctttcctcatttataaaataatgaactgttttcctggcatctttcaacaatgactaatgagttttt

SEQ ID NO: 9636 - DNA, 423 bp, Homo sapiens
cagggtggccccctgtgccagctcaggtgactggagcccgagggcctgacaggttcccagcagctgggccggccagccttgcactgtgggggctggtcctgagtcttggcctgcctcccagccctgccaggaggctgcggcctaggggtccacgggaagcctccgtcaggagagacgcagccctgggggccagctggtgctgcaaggaagggtgggaagcttgctggcttctgttgcgccactgagacggcagagaccccaggatcccagagcttcccaggatccctcccagatcctctgctgactccatatggaggcctcacacccagagggtagggcagcagatcttctttataactatttattgttcgaatcacttttaggatgtaactttataaataaacatgagcgctgatgatttgc

SEQ ID NO: 9637 - DNA, 370 bp, Homo sapiens
gaggcgtgctgtgggcgctgtgggccaggtctcgggggctccgggaggtgctgcctgccaggggaagctggaaccagtagcaaggagcccgagatcagccctgaactcactgtgtattctcttggagccttgggtgggcagggacggcccaggtacctgctctcttgggaagagagagggacagggacaagggcaagaggactgaggccagagcaaggccaatgtcagagacccccgggatggggcctcacacttgccacccccagaaccagctcacctggccagagtgggttcctgctggccagggtgcagccttgatgacacctgccgctgcccctcggggctggaataaaactccccacccagagtc

SEQ ID NO: 9638 - DNA, 126 bp, Homo sapiens
gtggccttgctctgtgtgagccccgtgcgagggccctgcttgtagctggaccctggaaccttctgtagctaagagggaatcctggccccctccccagaagccatttgtcaataaaccatttctaag

SEQ ID NO: 9639 - DNA, 299 bp, Homo sapiens
cctgcccactggcacacagctggcactggcacacacctgtcccatgcccaccctgagggatcaggagcaaacagaccctgcaaggtcctccaggcctggggacaggaaagccactgacccagcccgggaggcagaaccaggcagcctccctggccccaggcagcccttttccctccagtggcacctcctggaaacagtccacttgggcgcaaaacccagtgccttccaaatgagctgcagtccccaggccatgagcctcccgggaatgtttaataaagggcctggccaactctcctcac

SEQ ID NO: 9640 - DNA, 201 bp, Homo sapiens
gtccttcttggctcctcatgtggtccctctcctcggaagaactgcccagccacgggtttttaacccacctgttgctcctgaggtcgtcactatatcaacagtcacaaacccaatggcaataaaggcactgacgatagctggcgcgcgcgacgtcacacaccattttcagatgccgttgcaattaaatcttgccacactgtc

SEQ ID NO: 9641 - DNA, 1223 bp, Homo sapiens
cgcctggaaggacatctggtggtccttaggggagtggcccctcctgagccctgcgagcagcgtccttttcctcttccctcaggcagcggctgtgtgaaccgctggctgctgttgtgcctcatctctgggcacattgcctgcttccccccagcgccggcttctctcctcagagcgcctgtcactccatccccggcagggagggaccgtcagctcacaaggccctctttgtttcctgctcccagacataagcccaaggggcccctgcacccaagggaccctgtccctcggtggcctccccaggcccctggacacgacagttctcctcaggcaggtgggctttgtggtcctcgccgcccctggccacatcgccctctcctcttacacctggtgaccttcgaatgtttcagagcgcagggccgttctccctcgtgtcctctggacccacccgccccttcctgccctgtttgcgcagggacatcacccacatgccccagctctcggaccctgcagctctgtgtcccaggccacagcaaaggtctgttgaacccctccctccattcccagttatctgggtcctctggattcttctgtttcttgaatcaggctctgctttccccctagccactacaggcagcctctgacagtgccgctttacttgcattctgcagcaattacatgtgtccttttgatccttgcccaacttccctccctctcccagctcctggcccctggcccagggcccctcttgctgtttttacctctgttccttggggcctagtacccagcaagcacccaaatgggggaggttttgggatgagaggaggaaacgtgtatacctgtaacatctggtggctcttcccccagaagtttgtgttcatacataattgttttccacgctggatcataatgtgacgtgcagttctgccctgtgctggggagccacatgaagcttcccctggctaacttgctaccccgcagcaatcccagtgtggccgtctgcttgctaaaaaatggatctgtgctcatctgtattgatgtccttggagttctacaagtggaacttaagtgtcaaaaagaatatgtggtttttagctgagcgtggtggctcacacctgtaatcccaggactttgggaggctgaggcaggaggattacaaggtcaggagttcgggactagcctgtccaacatggtgaaaccctgtctttactaaaaatgcaaaaatt

SEQ ID NO: 9642 - DNA, 248 bp, Homo sapiens
ggcctgagggcatggtgtccagagtcccagagcagatcaggccccaaagtcctgctggaccccccagccaccgtgagctcctccgtgtggctagggagctgctgtccagaggcggaggtaaacattgatccctcctgcacactcagctctctcatggaagtcggagccctcagggtcacctgaaaactctgacactacctttgccattcacctgtcccgtctccaacattaaagcttttgggtaggcg

SEQ ID NO: 9643 - DNA, 2058 bp, Homo sapiens
aaaacactttcctggataaaaaagaaaacattccagatgcatgatccagctgtgtgttttcaatccttgggagggtgccatccacattttaacagtacctgtgcctgagaatttaatttttaaaagactttgatgtgtttttgtatgaagtacttttaacgtatgtatttcattgctgtgtcacactctgtgttttgtgaggtgaatgtcttccttttctttctccctaaccactaatgttagaattgatttccaagaatcggcatgtatacttaatactgaatttctttgatttaactgacttaacaactgactaaccattgatgagcactcctgatttttatctagaacattcagatttaccataatgttccttagtggtagaggtgtgtgcctagtgatgtagaaagatacactgacttggtgcaaggccatctgcttaccacatcacaccacttggagatctttgcttccttgcttttatgtttgtacacaacacctaaaaccagttttgctgctataattctatactgttgattcgtctgcgattttatctgttaaccaaataaaacataatagaatttcctaatgagatatatctttatacttaaacagcttttttagaggtgagttttaaagaagtctcttaattctgatgctaggttgtttttaaaaccactatgcaaagaactcaccacaagccaccttttgtagtgttctccactaatactggttatcctgtgctacagagaaaatcaaagcagtcataagctccagttttcgtattgcaaataagactcttacctacaaaatgagattcagtgaactaatttggtttttactcaaccaaattaaaaatttttttaaggaaaattagcagttggtctattcagaatcaaacctttttatattttatactgcactttagtgtattttctgtcactgtaggtatagaagatctgcctcccctgtggaaattggggtctgttggtgggcgtgcccctgaagcctggcttgggttgaaaagtgttcccgccctaaggccttggtgccctgaacctctgatgcctaccgggttctcctgatttgagtttcctttaaatactccctttttgagtaattttctgatgggaggaaagtagcagtcatcatctttttgtgtgcaggctgtctcatttatttttagccattgtcgtttcattcattttgtgtaatataaaccgtgtgtcatgtcaaagtgaaagacatttcaaatctgtagcataggctagtgggcaggtccgcacagtcgaagccacacctggtctgttttctgtgcactgtagccttagtgtcacctttcttcttgtgtctccttatggtacactccagcggttgccttttttatcatttctactgaagttgggaaattcaaccccagaaattgacagatgaaaggagacaatggttgtgtagggagatggagaaaatgcttaatctgaggatgagacagggttttttcatttttgtgggggctagaaaaaacataaaatgaggcagttaaataataatagttaatgaaggtgtgctacagaaaataatctggtgttcttgctaactttgcccttcactgttgcttaattgtgaacagccaaaagctatatgttatggcttattgtgtgaaggtaactaagaagtggtgttccatgacttcagagtacatccatgcggagtccattatttgagtttgacatttaataactttgctggaaaatctgtaaaaaagaaaaacaagtttgctagtgactaagccccgcatatgtgagtgaaagtacttcaggcacgctgcctcctggtaacagctatgcagggagggaggacccacactgctacacttctgatcccctttggttttactacccaaatctaaatagatacttttgataatagataactgctcttttactaagacatagtctctacctatagaaatgtattttgaaaacacttattttacacagcaattttgtatccatttaaactaaccttttatcaataaagcactattgtttagatatt

SEQ ID NO: 9644 - DNA, 715 bp, Homo sapiens
cgctcaacctgcccaggtttggacacaactacaaagaacagcaggacacagaggtgacctctgtcctgaggcttctcaacagatgggaagtggctgtggtctcactggatccccactggcaccagcagtgtgggtgggcctcatgtaacatctgggaggggcttcatccccccacccaggacctagtgcatgccagcagctatctggggccctgggaaaaatgtgcgagtcttgagcgcggagccgctcaagccacagctcccaggcccctggctcaaagacgcagacaaggcctgagcagtgctctcggcatcggaccaaagcctgggcacaccctgcctctctccccagagcagggtccctgccgaggactggcctagagcaagcactggaaaagaggccctgccatacaccctgcgtacccactgccaggaccctctcagacaagcgtggcacagccatgctgaccttccatctggtgaaccaagtggcagccccaggggcctgccctgcaggtcacagctaaacaagtctggcagaagccacgcttgttccccatgtacctctagagaagcagaaaccaaagtccccctgtgccctgggagggtggggccgtctaatttattactgcccagcattccttccaacgggaagtagatgggcgactgctttgttcacacacatttgattaaaaataaacaaacagcatctcccc

SEQ ID NO: 9645 - DNA, 1714 bp, Homo sapiens
gctgcccacctggcagtggccgcagcctggccctctgggcccaacgcaggaggccctcagcacccgaacacatcttcctcctccccacccgagcctggagcactctaaccctcggagaccccctaagccccgttcctccgcagacccaggccctccggaaggggtgagtggggaggggctttcctgagcctggagctgggctttggggcagcctgcgaccctccccgcttgtgtcccttctcctgtgatctctgtgttttcccttttctttctggggccaggaagtcagggtcaactcccaggcctcagatgcaggggcccagaacacctgctctcacctgagccccaggtgaaggggcccgggaacacctgctctcacctgagccccaggtgaaggggcccgggaacacctgctctcacctgaaccccaggtgaaggggcccggaacacctgctctcacctgagccccaggtgaaggggcccggaacacctgctctcacctgagccccaggtgaaggggcccgggaacacctgctctcacctgagccccaggtgaaggggcccgggaacacctgctctcacctgaaccccaggtgaaggggcccagaacacctgctctcacctgagccccaggtgaaggggcccggaacacctgctctcacctgagccccaggtgaaggggcccgggaacacctgctctcacctgagcccctggtgaaggggcccggaacacttgctctcacctgagccccaggtgaaggggcccggaacacctgctctcacctgagcccccggtgaaggggcccggaacacttgctctcacctgagccccaggtgaaggggcccggaacacctcctctcacctgagccccaggtgaaggggcccggaacacctcctgtcacctgagccccaggtgaaggggcccgggaacacctctcacctgaacccgggggtcccatcccaggaagaagggccatctcaggacatgagtcctcaggggccctgcacattcaatctgaaggtgaccctggcctggctgaagctggaagagctgtggggactcagcctgtaaacagagcgtaaggttcacatgctggttgcttaatccgtttctggaggaagagtatgacacccacttgtgatggggtccttgtgcggtggggaccggggccggcgggctccaggccagcacacctaacccatggatgtggaacctacggccgagaaggaatgttgcatgagtcggatcccagtccattgtcagtggagggtgagggtgaccccatctgctatttttgtgctcatcctcatacaaccatttggggatgtgcctattagggctccgtaagaactcagatgcctgggaagcccagcccctcaggtgcccccacacacagccttcccttgacgcctacatttctaggcacatgtgaggcatctttcctggagccccgagccagccctgtccctccccagtgcagcatggcactcaggagatacaggctggacatggggcagtcgttctggggaggcctggcctagcagccacccacctgagccctcccggccaggcttcgtgctggggtgggccatgtgccaggacaggagggtcccggcggaaagccagccccggactcatcgtgacattgagatcccactggagggtaggggtggtaataaacttctccaaacgatcgttgtcattttagacag

SEQ ID NO: 9646 - DNA, 1644 bp, Homo sapiens
agcgactggaaagattcttcgactcagaagatgaagactttgaaatcctgtccctttgaaaatcctggggtcgggggtggcacctgtgagagcctggggctcctggtgccgctgcgtttcatccatcccgcccgctcgcctgccgagggctgcgccccgtgctgcctccccccagagggccacccgctgtgctcgtggactgaggctgcgctgcccgggaggccttactgcttggtgtcagactgcccagctcagagtgcccgtcagggcctgtgcatccgcacgcggagccgtctgttaggagcttccagagtgttctctcgacactgccagccccgtgttagcacctgggcctcagtcccacttgctcccaggcgccggttctgtggttggtttggaattaaagtcctgtttgaagttgtcagacacagacatgaatttctgggcgctccctgagtcagagtctcagaagacctgtgcaggctggcgtgagaggagcggcagccacactgcggccccacgcccaaggactgggctgctctcgaggggggcgcgcccaccgctgtgtcctctctgcccagcctggcttaccaagggctacctcagtgggagatgaggttggaggaacgaaggcgaggttcctccttgctttggggagaaaagtattcaggaagtgggtgtgtgggaaacctgaagatggcgtgcacaggacacagcgtgggcggcctgggcagaagggcggctggctgtcctggagctgctgctggagcctgccctcagagtgtccctttccagtgctgtggcattctgtggcagcttccccaggtgtggtgacggggggggggcggggcctccacctgtgacagccaggcttgagggtggacggcgtgcctctcccaggagccttccccatgtccttgccttgctgagaattgccctcccatgccgctgaggtgttaggtggtttagggccaaaaggggaaaaccacttgagtcttgtggtgtgtggtgggcagacaccacagggtggcatcacctggtggcatttccagaacctcagccccgattccagcacccaccaccgcctgaccctgtgtaacctgctgtcccgggtcccagagtgcactctgccccgctgctctgctgcctgtcctgggaaagtatctttgccccactaggaaatgtaaacaggagggcttggggagcgtgggcacttttctcatgagcagctactgcggcgttggcaggactcgctgctgctgctgctgcttgtgtaggtcggggagccagagatccccgaggacgcgcgccggacagtcggcactgaccggcccacctggtagcagaggacacccccagccccccaagcattgaagacatagtgtatttcctcgtatcctttctcccttgggtgtagttggggtggggaagcagggaaggctggtgcgatctccattccttgggctccacgtccgagttcatggtgcgccgctgtgctgggagctgcagtggtaatgtgtgggacaccttgaccaaaggggagctttgtctcgtgtgttttgaaaaaggcttaatgaagagaatgttgttcattcttagtagtatagtttgcaattcttaatggcaaataataagtttcagtag

SEQ ID NO: 9647 - DNA, 4444 bp, Homo sapiens
gaggagctgtgtgcccggatccgaggagcaagttaatctgtcccttcattcgtgtcgcaatatttcccttccttttaaaactaccttgttcggttgatacttagtaactccgtggccagttgaagcgctggatgtttcctagaacaagaaccaccaaagcctgttcgcacagaagggcgaccttgcagggactcgccgccgcgacctcagtgtggcttttacaggactccccccgagcatcagcagggaccccggcggacgtgggcgggcgcgcgtgagctcgggctgcccggccgggcgtgcgggcggggacatggtaacctggtccacggagggcggccgccaccctcgcgtagctttcctgtggttttccaggactgtccggtacagcccgggctccgcgtgccccgcccgctggagcacctgccaccgaggcgcgcgtggggccactgccgtggcggcggctgccctcctcacactcggctccgcgccgcctccggccaccgtgcgctcccgcgtggggcgcctcggatgggcccgggagggctgggggctcttccctggaggaagcggcctccgcttcgctggcgccgcctttttagcttggacttcagtcctccctcggggactcacctccggagtaaacggctcttcattagcttggagtggccgcaggtcccgtgaccagcacccgcgagaccctgtgcgacagctgggctgatgctccgtttctctgggaattggtgattttttactgtgaagatgaaattaccctaatagcatgaagatcgtgggtctgtgtgtccgtgaagtgagtcccgtctgccaggagctgacgaaccacgaatgcttctgcctgtgctgtgcattcccaggcccgcagctcccggtcgaggggactccgatgtgaatttgttgtgaatttgttgtgccacaatagcagttctggaatgaagctaggaaactcgagtgtgctttttgtttaatgagcgttcaccaagctgagccggagccatcctttcggtggtagttggggaaggctatgcagatttgctctgttgtgacgcgttggtgacggtgcccagcctgcggttccccacagcatcgcaggcgctcggaaatcctctcccgtgcctttagaggaaggagaggattgctgaggaatgcagggacgcctgtttctgtcctcacaccacagaaagaaacctgagggaaaactgagacgtgaggttcctgatttaagaagcctgggtttcttcatggtggggggccatttggaatgacagcctcacttccttctgatggctacatctgtatcttttcctcctgtgtttaatgtttcactagggagaggaaataaagcagaaggaacgtgtgaagctctgtgtctcagacggggccctcccgtcgagaagctggtagtcagtgagtgagaacaagagaacaagaacaccctgaacagtcctggttgggatggtgtccacattcatgttctgcggttcttgaacacacggatgcctctgggccacctgtccttttccgagggtgtgggtgggagtggatcctccgggcgcaggtgccaggcaggtgcaggcgggcggtcggccactgctgctgctcgtccctgccagtgtctgggcctgaaggggctccctccaagcggtgccttcctgcggcttagaagggaaagcgccagagagggcaggctacagtgcttcacacccttcgccacggctgtgaaactggagatgggtgggttttgtatgttaatttttttttttgagacggagtcttgctctgtcacccaggctggagagcagtggcgtgatctcggctcactgcaagctccgcctcccgggttcacgccattctcctgcctcagcccccccgagtagctgggactacaggcgcccgccaccacgcctggctaattttttatatttttagtagagacagggtttcaccatgttaaccaggatggtctcgatctcctgacctcacgatttgcccgcctcggcttcccagagtgctgggattacaggcgtgagccaccgcgcctggccacccagctaagtttgtatttttgttggagacggggtttcaccatattggccagactggtctcaaactcctggggtcaaatgatccgcctgcgtcggcttcccagagtgctgggattacaggtgtcagccactgcgctcagctgggagatgaattttcatttaatgacttaactttttgttagcacaggttttgtgtgtgtgtgtgtgtgtgtgttttgttttttgttttgtgtttttgaaacggagttttgctctgtcacccaggctggaatgcaatggcaccatcttggctcactgcaacctctgcttcctgggttcaagtgattctcttgccttagcctcccgagcagctgggattataggcgtccaccaccacgcccagctaatttttgtatttttagtagaaatggggtttcaccatgtgtggccaggctggtctcgaactcctgacctgaagtgatccacccgcctcgacctcccaaagtgctgggatgacaggcatgagccaccgcacccggccaacacagatgtttattgatcgtggaggatacattgtggaaaatgtttttctctcttttaccatttttgggaagagggataggtaagtgcagggagtttgtgctgaaacagcgcctggcaatttttcagaaatgaatttgatattgcgctccacctttgagctgttcacacctgtggctacccctggaaagcgctggggttgttgatgcttttggctgcccggcttcctgaggtctcgctgctttttggggaaagatgactggcttccctgtgggacgcttttgtctgacacgtgatgatgtggtcctgcctgccactgtgcaccatcccaggtattgaattttgaccttttcttttcaagtttctgtgcttagtgtttttaatgtttacttttgccacttacaataatatcaccaaaataatatgcatagagttttggaagaaacatagaaaacatgagcagaatgagacaattccttgggctgtagtttggacccaactgaatcctgagtgctctgtggctgacgctgtctacccgtgggagagacacactcaggagtggccgtttggccagaaaagaaggtcatggcccctggcctggcccccgccctgcagggacacagaagccacaccatttgcaccatccacgccttgctccagaaggcctggccgccttctccctgggggtgattcaaggatttggtctcggaccagacccccctccacagctgcccggccccagacccatctcttggattgagggtgtgtgggctggaaccagtgggtcactgtggcagcttcatctgagccgaaggtgtgggtcctctgtggctgtgcgattgacctcgatgggaaggagcgttctacccattttccttgttttcagtgctgcggtatcagtcagtgatctgaggaaatcctgtaggggaaggcaggctgcagtgaaaacaggagctggtgaaaccgagccctctgcatctgcgaatgtgccctaggtgctgctgctggggacatggatgccaagcggaggcctgcgtggcctcctgagcagcagctgaccgcccgtctcatgctggacgggacccctgggcgggtggacatgagaccactgttggccagggacgccgtgcggaggcctacgtggctgcctgagcagcagctgaccgcccgtctcactgttggccagggctttgtggcgtgggtgttttccagtctgcctggagcagcgagaagcagctgtgcagactggtggcggtgggagggtttgctgggactgatggggacaccggccagcttgtctggtgtccagcagccctgccggacttggcctcctgtcctgtcgttgggagccctggctggggctgctttgagcaatgacgctggcccagagcagcttcccacatgaccccagagccgagggtctgccctgtcctaggttaggtcttcatggtttagagtaaaaccgtgagggatgttaattatgggcattgaagacttaaggttttcttaaatttttagtgagcagtgattggccttcaatacttgtgctgagaggaattttaagccaggggaagtgtaagaaaatgttcccattcaggagagattgtgttggagtttctttcttcctctgtatgtattttgtggtgtccacctttaaccacgtttcatccaaaacgatgatgcagctttaacatgaatgttacatttttattttcaaggaattattatctatgttccctttgtaaaggaaagataatgttgtaaatctttttattagataatgtaaagatgtatatcagtatttttggatcatgttatagattatggatatattgtttaataaataaagtattttttggaac

SEQ ID NO: 9648 - DNA, 847 bp, Homo sapiens
cggccactcctgctgctgccaaggcccactgggggtcggcgggtggctctcgggcgggggtgttgcggtggctctgagggatgagccggcagtgggcaggggaccaggcacctggttgaagggactgggagcccgcactggggaactgccggacgcaggccctcgggcaggagcatctggcagagtggggggcgtggcaggcaccctcctttgcagggcgaggtggggcctctgcagccatcctggacaggccggggtggcggcagctttgcccacgtggaagcggggtgggtctcacttgcgtggtggcccctggccccatcttgcctgctgcggcctggggagcaggcgctgggtggtggttctgcctgcttgctgctcgttccccgggcatgcgtgggcagcggggggcatgcgtgggcagcagggggcgtgggcagcgggggcacgggcaggaccacgtgggccgtgatcgtgggttgccgagaggacctgagcgctgcggctctgctgaatggagccgggtccctcaggccgtggacgccctcgggaggggggtgactgtggcttgtgtctggacaggaatgtgtcatttcccacatcttctagagggctgccagctgggaagacagttatcagggcaagctgtgctctgagtttcgggttctgctcctacaaagaacgtgcggtgctgcgggcgagggccccggcacggacaagggccactgcagagtgtgtttctgctcgtcagctgccctgggcagcggatgggctgggcgatgcagctggatgcacatctcattctgtcatgaatgtccagtaaaaatctgaattggttgcaaccttc

SEQ ID NO: 9649 - DNA, 121 bp, Homo sapiens
aggggccgggccggggacgaggcctcctgcggacaccagctcctctctccgccgtcaccggggaggccggggatccttgcagggcttctggggcgttgggaaacccaggcccgccggccac

SEQ ID NO: 9650 - DNA, 656 bp, Homo sapiens
agcgtatactattttcttctttgagaattacaaaaaaattatttctacactgacaggatttactagttaagcaatgtttaatataaattttaaaaaacttctgttctacaaaatttccattccgtatgtaaaagattttgtttttctatataaaaagagctgactgacatatctttaaatactttgtactaactttatcacacttactgtgtcatagaatatcatacagtttatacgctcatagttctcttgtgaacacttcaaacatcgctaagcatttgatctggccatgtatatggtagctgtgttttaatttgagaatcttgagggtagagccacaaatttcaattcttacatttccatttgcaaagtgactagagaaaaagaaatcagcttaaatgaggtattaagtaatgtttagagtcgtaggtattaactagaatataaatccttagaaattgtctttataccttcaaaaattatactatgcatttatcatagaaatgtgattacaaagaagtctgactaccatgtctttaaacatatggcatctctcaacttttcttccttatggggctacatttgttcatttccagcagtagcataaacttacggtgacatggtagacttgtctctaaataaaatttttaaatgtt

SEQ ID NO: 9651 - DNA, 586 bp, Homo sapiens
gcagaccgtacaggagcagcacaccaggagccatgagaagtgccttggaaaccaacagggaaacagaactatctttatacacatcccctcatggacaagagatttatttttgcagacagactcttccataagtcctttgagttttgtatgttgttgacagtttgcagatatatattcgataaatcagtgtacttgacagtgttatctgtcacttatttaaaaaaaaaacacaaaaggaatgctccacatttgacgtgtagtgctataaaacacagaatatttcattgtcttcattaggtgaaatcgcaaaaaatatttctttagaaacataagcagaatcttaaagtatattttcatataacataatttgatattctgtattactttcactgttaaattctcagagtattatttggaacggcatgaaaaattaaaatttcggtcatgttttagagacagtggagtgtaaatctgtggctaattctgttggtcgtttgtattataaatgtaaaatagtattccagctattgtgcaatatgtaaatagtgtaaataaacacaagtaataaatgaagtgtttgttataa

SEQ ID NO: 9652 - DNA, 1605 bp, Homo sapiens
ggggcagcagctgcttggagtttgcgtccttcccgtccacccagtgcagctcccagtgctgcagtgtgcgtggcgtgggcatccttccagctgactcatggtttgaaaaaccgttgttttatttaaatatccacagtggtagggcacacactgaagttggcttttcagccagcactgaatgtatccatcaggacatgcgtcttcaggtgcctgatctttgtagtcaggctgtgggaacggtctctgcagagcttcataactgggaatttgatttgaagaagtccatgtcatatgtgtaactagtactaattataaatataaaatacacaatataaaatatgaaactcaataataaacagtgccacctgtacatgggcaccatgccctcctcctcgtgctgtgttttctagtgcatgccacagttcgcagtagagggtgttttcaccttccaagacatggggcaaagtttggagacacctggttgtcactggagggggtggtgctcctggcttctcctgtggagcccggggtgatgcataaaatcctgtgtgcctgggtcagccgcatcacagacaatgacttgacatgaaatgtcagctgtgctggggcagagagaccttggaaggaagctcttggaaaatacgttgtatctcagtttgatgaaccaattcacaagaggctaggccctctctagcaaagttatgggctgctttactgaaaacagaatggaagccctgaagtcaacactccatggagaagcgtgtctttcctaatgtcctggtgttctgttgatttaggtgcttgggaacacaatgctcccagttctgttaggacaggcatactgttactttgcaatatccactttataaaatagctcctgcccagtggctcttggttcctgtcaaatgtggacctgtagtttaagaatgacaggtggttagagacccagatatttaaaaataggtgttcaataagggaatactgattgtgcattgtatctggatagcatgcctaattgtgcatttctgaaagttaccaattcaaaatgtaattggaacagttatctttgattagacaagcctgggaagagaatgttgaggtgcagagctcaccagccaagttcatgcccctctcgggcctttgtggctgagaagtgggacagaaagatgattaaggtaatgtgtcctccctgtagcattgtccagggccgttgtgtagatatttgacttcactgacagaaaagaaaccagggagtttgtagagactgtgcatttttagtataacattttcaccatctgatatggtttggctttgtgtccccacccaaattgcatctcaaattgtaatccccatgtgtcaagggagggacctgatgggaggtgatgggatcatgggggtggtttcccctatgttgttatcataatagagagggagttctcacaagatctgctggttttaaagacagcagtttcccctgctgtcactgtctctctcctgctgccttgtgaagaaggtgcttgtttctccctctgccatgattgtaagtttcccgaggcctccccggccatgtggaactgagtcaattaaacttcttgtttataaagt

SEQ ID NO: 9653 - DNA, 2752 bp, Homo sapiens
acagctgctgtagtgatgaaactcttgcttaaaaaggatgcctcttgttttttgctgctgtaacttaccagaaagtgttctatatttatttctgtttgaatttgaaacagtgttatgcttacaagacttcataatgattttatgtcttgctttaaagatagtacctgcagaatagtttttgaatacacccacattttgtacgtttccatgtaagctgacatagtgttctgccatgtaatgtttatagctgctgatgtatgcacatttgggggtatatctatttctgaagaggtaagctgatcaaaataaatagagtgtaaattctttttaatgctttagtgattaaatgttttagtattttgaactgaaatggacacacaaacacacacacgcacacacagacccacagctttgaatgatcatgttgtggctgagcagccgctttttagacgttatcattttgcctcatgttggaggactttatggaatttaagaaatacattttgtgtgcatattgtttcatagcaagaattcgttgcaaaaatgctttatttttgaacaatgcttggaaatattatgtgacttttttgtttgtttgttttaggaggatggtgtatggtgggggcaataaatgaggttttttgcattccaaggaaatggcatatggattaactgtaagaaatgaaataagtaatttattgtaagacaacatcaagccatggaaacttggcagaagattcaaagcagcttaaacagcacttttaaattaactcctaagcgttacatggttgtgactatggaaactccagttaagacaggatcttatcagaggtggacaacgtgaagatttccttttccattttcaataaactttggaacaaccttctcgtatctcccctagagtttcgtgcccctctgaactgtctgttattgcaatgtagtttatcaacagaatttgtgtgttttcgatttaagctaaaagataatttaagaacatttatttccccttttcactttaaaaaattatgattattcctattattgttatgaaccttcttattttacatttgagggataaaggcaaatgatttgtgagtcttctagttactggaccgagttttctgctggatctggtgggaaggcagctcggtaaagtttccctcctgctccccccgcccgactttgactctgaatcagcatttggtcctattcagaggactcttaccacgacgtttctgttctacacttgggtggagaccagttgaccatagagcatttgcagagcctcattgtttgatttcttgtgactattctaagaatgaatgcaatcagattttaaaagtaactaaatatacttcagcacttttttgctttaaactagatcatcttagacttgtttataccttccagatttgattgttttactcccaatgactgcactatatgtatgcataagaccacttttgagcgctgtgttcccccttctgagtagtcctttgacgacgtgttgtgttttctgatgttgacttgagttccatttagtagcatctcttccttccatgtcttgatgttatgcaggaagtacagacgtactttaaatttttgttatgaaataaaaaaaagatgggttttgtaaaaataaaaaaaaaatatttttagcagaacaggacttacagggtcattgtccccacaatgtgccagtcgactatttgcacttaccttgtcctatatatccgtacggaggtgtgcaattcctcgtgtcagtagccttgtgacactgaacctggatggattatagaggagccctcacggctgatcaataatgttgcaaagggagactacagggatctcacgacgaatattctgatacaatactcaacctcggtatatatatatgtgtataaatatatgtatatcccagcggcactttatactgttcactgtacaaaagcttacagttttccacaaggactttaataactagctgggaaaagacgatgtaattatttcggggctctgcggaaccttctctgtacagcgccccctttctgttgtgctattggttgcagctgccatgctcagaatgcgttttgagagctgaagcaaggtgcttgcagtcacctgaggccgtccgtgtggcccagggccccagctgcctttagggcccccattgttcataacagcatatgcatttccccaccgcgttgtgtctgcagcttctttgccaatatagtaatgcttttagtagagtactagatagtatcagttttggattcttattgttatcacctatgtacaatggaaagggattttaagcacaaacctgctgctcatctaacgttggtacataatctcaaatcaaaagttatctgtgactattatatagggatcacaaaagtgtcacatattagaatgctgacctttcatatggattattgtgagtcatcagagtttattataacttattgttcatattcatttctaagttaatttaagtaatcatttattaagacagaattttgtataaactatttattgtgctctctgtggaactgaagtttgatttatttttgtactacacggcatgggtttgttgacactttaattttgctataaatgtgtggaatcacaagttgctgtgatacttcatttttaaattgtgaactttgtacaaattttgtcatgctggatgttaacacatcttactctaaataaacaaggtgttgccacatttgtagcacgaaggatctct

SEQ ID NO: 9654 - DNA, 682 bp, Homo sapiens
gccatgtgactttagtccttgggagaacttgagccagcggctgtcttgctgcctgtacttactggtgtggaaaatagcctgcaggtaggaccattgcagtgatgggcagatgcgtctttcacacggaatcaggcacagtggccttctgtgacatgtgtttataaaaaatggttaagtatataataaattgaacatctttgagattggagaattatgtgagatttccacattatgtttactgggttcaatactgtccttgcttgttttattgcaggcaagcaaggcaaatggcctaaaatgctgtggcttatattttgataagaaatcaaaaaaccattggttaaaagatgcaactcagaagtctggaagtattctgaaagcatccatttaccgtccagttgacaggtttgagtctcctgcttgtataggtgacttgtgcccatgggtacattaaaggaacatgctgcccagggcctgggcggacagctcagtgggcaggatgtgtgctgggtctcagccccatgtgcctgcttgctgggcagttagtatagggcaaagcctgcctgcggcgaccctggctgctaggccattctctaggaacagctgcgactcataaagaccaagaagcataaataaactttcaaaaatttatttggctctttcgttaaaaactgtgcaaatt

SEQ ID NO: 9655 - DNA, 362 bp, Homo sapiens
ctcccgggcctgggttatccaggtcccattgagtggttttcctcttggcagattctcaaacagtcgcagctctttggaggtgactcgtgttccaggtggatccctctctgggagagccgctgttcccttcctgtagcagcagcatttatgaatggggtgaatggggctattgtcgacggcacagctaatgcccgaacccagcccctgtcggcagagacagagccccacattattatgtgaataacaatgttttctgttttaagggtgtcaggagtttcgctttttaaaaaaatgtctgttcctgcaatagtaactcttctttctcttgagagtaaaaaatgaaataaaataaatccacgctg

SEQ ID NO: 9656 - DNA, 1043 bp, Homo sapiens
cagtgctgcctgggaactaacacgtgcctcgtaaaggtccccaatgtaatgactgagcagaaaatcaatcactttctctttgcttttagaggatagccttgaggctagattatctttcctttgtaagattatttgatcagaatattttgtaatgaaaggatctagaaagcaacttggaagtgtaaagagtcaccttcattttctgtaactcaatcaagactggtgggtccatggccctgtgttagttcatgcattcagttgagtcccaaatgaaagtttcatctcccgaaatgcagttccttagatgcccatctggacgtgatgccgcgcctgccgtgtaagaaggtgcaatcctagataacacagctagccagatagaagacacttttttctccaaaatgatgccttggggtggggagtggtagggggaagagctcccaccctaaggggcacacactgagttgcttatgccacttccttgttcaaaataaagtaactgccttaatcttatactcatggcttggagttaccttatattcaggtatatgtgatattttgcctggtttgttaaaattgccccatttagattccttctataattgttcttatagataagtaatttatatatgagctgtgttagtattttttcagtgtgagatctctggattctttcacaataaagctgttgaattttaacaggagtattagtacataaattttctactcaacaattccgagataggattatgcctagtttgtcatatcacagaaaaactccaagttaacttcatgttttggaagggcaggtcgtttttaaagtatttctttttttaactggatgaaaaatcttcatgttaggattaattttcttaatcacctccacactgtacagaggaaactcaagccttaaatgtttaagtaaactctgtctcagttttaggattaaaatacccaccggtggtgtgatgatgccatataccgcagggcttgcttctgtcaagtgtgactctatctcagtaattaaaataagtgctgatctactg

SEQ ID NO: 9657 - DNA, 1528 bp, Homo sapiens
ttactctggccaggtgccacgtctaactagattagatgttgtttgaaacatctacatccaccatttgttatgcagtgttcccaaatttctgttctacaagcatgttgtgtggcagaaaactggagaccaggcatcttaattttacttcagccatcgtaccctcttctgactgatggacccgtcatcacaaaggtccctctcatcatgttccagtgagaggccagcgattgctttcttcctggcatagtaaacattttcttggaacatatgtttcacttaatcactaccaaatatctggaagacctgtcttactcagacagcaccaggtgtacagaagcagcagacaagatcttccagatcagcagggagaccccggagcctctgcttctcctacactggcatgctgatgagatcgtgacatgcccacattggcttcttccacatctggttgcactcgtcatgatgggctcgctgcatctccctcagtcccaaattctagagccaagtgttcctgcagaggctgtctatgtgtcctggctgcccaaggacactcctgcagagccatttttgggtaaggaacacttacaaagaaggcattgatcttgtgtctgaggctcagagcccttttgataggcttctgagtcatatataaagacattcaagccaagatgctccaactgcaaatataccaaccttctctgaattatattttgcttatttatatttcttttctttttttctaaagtatggctctgaatagaatgcacattttccattgaactggatgcatttcatttagccaatccagtaatttatttatattaatctatacataatatgtttcctcagcataggagctatgattcattaattaaaagtggagtcaaaacgctaaatgcaatgtttgttgtgtattttcattacacaaacttaatttgtcttgttaaataagtacagtggatcttggagtgggatttcttggtaaattatcttgcacttgaatgtctcatgattacatatgaaatcgctttgacatatctttagacagaaaaaagtagctgagtgagggggaaattatagagctgtgtgactttagggagtaggttgaaccaggtgattacctaaaattccttccagttcaaaggcagataaatctgtaaattattttatcctatctaccatttcttaagaagacattactccaaaataattaaatttaaggctttatcaggtctgcatatagaatcttaaattctaataaagtttcatgttaatgtcataggatttttaaaagagctataggtaatttctatataatatgtgtatattaaaatgtaattgatttcagttgaaagtattttaaagctgataaatagcattagggttctttgcaatgtggtatctagctgtattattggttttatttactttaaacattttgaaaagcttatactggcagcctagaaaaacaaacaattaatgtatctttatgtccctggcacatgaataaactttgctgtggtttact

SEQ ID NO: 9658 - DNA, 1790 bp, Homo sapiens
gaaaaacaagcaaaggagaagagtgttactgtacctttatgacagaattgtcctggattttgactccatccacgcccatcacctttctacattttgctgacagataactaaccgatgatgaggccgaggtaaaagagacatctgcagtgtgacagaagggagcatgagaagcatggctcaccagccagcctctgtggtctttgtaattagaagcttcagaactcactaatactactgtacctttcattggcgcattaccccataaaactttttgagacgaggtgagatctgagtataaagataggtcagaagtattttaaagggcttaatgtgccaaaaagaaaaaaagctagagaccctttttgcaaacatttggtgaccacacatttgagggaagacgtggcgttaggtgaagcagaagcaaaccctgctcttaggggctcacctaggtgagtgcacagcctgtgacgctacagggagaggctgagtaaaccgagatccagcgttctgtatggcaggggtattgcttatcacagaggttctgaagagtaggaagtacataatgaagagggctttaaaaattgccaacaaagtgagtcaccagggctggcagtagtgtgacggggctgtcctgagctgttaggagagtagatgcggggagggctggtgacctccgtgggtttatatgtcggaaactcttctctccaaatcccaggcctggcttccagcaccatccagctgtgcccaagaagccaccctggtctgttctccaactcttttaaatggtgcccaacttttctaagtgagcttagcaatgagaagaaaaaaaaacatgaattctttttctggaaaatcagggagacatgggtaataataggtactaataaatatttatagatgagtgaatgaggaaataattacatcaaaaaggtcagtgacaattgataaatgacaaggaaatatttaattaggtaaaactaaatcattgctctctatactaggatagactttatctacttcatctgttcctaagtcagcatgttagttctggggaaggatcataagaaaggaaatactttttaaaaaaaaatttggaaacatgtaacaaagcaagggtaaaatatatatatatatctatataagtgctgtgactgtaaaagtgtactttccattaattattagccgagttaagagaatggtcacattgaagtactgtgtggactagaaatgtaccctgtcatcatgcaatgaaatattgttatcgttttaacatagctcatttatgtagaatgaattctggtggtttaccccaagtcacagttaggacggtagatggtgagatcgcagatgcgctattatctagattcagtgttacattttcgatgtttatcactcagtgggtttttattaatatgctgattaagttatttactgggccagtcattgtgctaaatagttgctcttttgtgtttcattgccttgatgtttgagtgtaatctagcattttaatacagtgtttattttgcatgatctttaacaaatgttttaagcaattttaaaaaggcaggatgttattgacattatacactgaagtcttaacattttaacatttatagtgcttatttgcaaaattgtataattaggaattatttcagagacaatgttttctttttcaggtgagtagttgccgcgtaatatcattggagtacattctttatactgtttgtgaaattaatactagcatattaagtgtacaaatagatttagaaaacaataaaaaattgcatgct

SEQ ID NO: 9659 - DNA, 2108 bp, Homo sapiens
tcgggaaggctctgagggctgttttttttttttgatgttaacagaaaccaatcttagcaccttttcaaggggtttgagtttgttggaaaagcagttaactggggggaaatggacagttatagataaggaatttcctgtacaccagattggaaatggagtgaaacaagccctcccatgccatgtctccgtgggccacgccttatgtaagaatatttccatatttcagtgggcactcccaacctcagcacttgtccgtagggtcacacgcgtgccctgttgctgaatgtatgttgcgtatcccaaggcactgaagaggtggaaaaataatcgtgtcaatctggatgatagagagaaattaacttttccaaatgaatgtcttgccttaaaccctctatttcctaaaatattgttcctaaatggtattttcaagtgtaatattgtgagaacgctactgcagtagttgatgttgtgtgctgtaaaggattttaggaggaatttgaaacaggatatttaagagtgtggatatttttaaaatgcaataaacatctcagtatttgaagggttttcttaaagtatgtcaaatgactacaatccatagtgaaactgtaaacagtaatggacgccaaattataggtagctgattttgctggagagtttaattaccttgtgcagtcaaagagcgcttccagaaggaatctcttaaaacataatgagaggtttggtaatgtgatattttaagcttattctttttcttaaaagagagaggtgacgaaggaaggcaggaatgaagaagcactgcgtggcctccggtggaatgcacggggcacagccgcgactctgcaggcagcttcccccccatgccagggctctgcgccgtcatgtgagacttaaaaaaaaagttgaatgacttcgtgatactttggacttctaaattaaatttatcaggcataaattatgtagaattagaggctttgaaaataatactggtaggttgctcaaaggttttgaaagagaaatcgctaggtaggttactatctggctaatccatttcttatccttgacaatttaattcatatttgggaaacttttagggaaatgaaaaataaaagtcactgagtctgggtgacattttttaagaataatataaattcagtttcaaactcttctcacattaaaattttgctgtgaactcttactaaaatgagttttaggttctgtaagtggaaaaatgtgcttttattttatgggccatttttaccacaactaatcttgccttggattactaagcatctcctgcgatcccacagaggactgtggtggccacaggagctgaaagcagaagagtgggatttgatgccaggcagtggagtggcctcagccccagattgtacctcctgccctgtaggaggggagggggcaaagccttctgacttcacctttgtttgacctatgtatggaacttacttttactttttgccttaaatttttaatgaaatgcaaattttctgtgatggggttctctctctctttttttcggggggtggagtcactaataaatttgcaaatgaagttaaagacaaggcaaccatctggcttatgctatataatacttcatttaaagaagaaaggaaaagcaaatgcacttgcagcttttgaggtctcagcaaaaatgggcatgtgtcttttttgaagtttagaaatatcctaatctatttttatttatctaaaagtaagtgttttccggctgataaggctaaccctacccaggaaaggattgataactaaataaatttcctctgttttcccatgcattgaaattatgttggctgagcatggtggctcacacctgtaatcctagcactttgggaggccgaggtgggcggatcacttgaggtcaggagttggagaccagcctggccaacgtggtgaatccccgtctctactgaaaacacaaaaattagacgggcatggtggcgcacacctgtaatcccagctacttgggaggctgaggcaggagaattgcttgaacctgggaggtggaggttgcagtgagctaaaattgtgccactgcactccagcctgggtgacagaggaagactccgtctcac

SEQ ID NO: 9660 - DNA, 1140 bp, Homo sapiens
atcctgcaatcaagtagaagtcaacttcatctgaaagttcagctgttttcaaactgcaatgctgaaatgttatgcaaataatgaagttatcccttgctctagattttctgaagaaaatggattgtgtaaaatgctgatcatttgtttattaaaatgtgtcctattacacagtgagttaactctcaatgaagtcatctattttctgggctaaaaaacttcatttgtctttttcaacttctaataagcttaacctaagtgtcacagaagcctaggtgtcacagaggtccactcagtgacaaacacacactgaaggcctgaggaagacgagatgtcacagaggtccactcagtgacaaacacacactgaaggcctgaggaagactagatgtcacagaggtccactcagtgacaaacacacactgaaggcctgaggaagacgagatgtcacagaggtccactcagtgacaaacacacactgaaggcctgaggaagactagatgtcacagaggtccactcagtgacaaacacacactgaaggcctgaggaagacgagatgtcacagaggtccactcagtgacaaacacacactgaaggcctgaggaagacgagatgtcacagaggtccactcagtgacaaacacacactgaaggcctgaggaagactagatgtcacagaggtccactcagtgacaaacacacactgaaggcctgaggaagacgagatgtcacagaggtccactcagtgacaaacacacactgaaggcctgaggaagacgagatgtcacagaggtccactcagtgacacacactgaaggcctgaggaagactgaggacatgggctcagtggtggcttcccagtcatggtatcactggcatggacctctgtccggcagaggtgtggactggagaccaggattcatgctggtctggaacagtgacattgccaacttaagacacacaaagcagattttcagaagtgtctggtcaagataacatgctggccaaccacaattcctagagttaagagaaccttaaaagattaccgctcatgctaaaagtatgtaaagatcccatgtacagtatgatagtgtactttttttaaaggactgtcaatatacaaaactttaaagattaaaaacatt

SEQ ID NO: 9661 - DNA, 893 bp, Homo sapiens
tttagttctcagctcttctgacttaagtgtgcaaaatatttttatagatttgacctacaaatcaatcacagcttgtattttgtgaagactgggaagtgacttagcagatgctggtcatgtgtttgaacttcctgcaggtaaacagttcttgtgtggtttggcccttctccttttgaaaaggtaaggtgaaggtgaatctagcttattttgaggctttcaggttttagtttttaaaatatcttttgacctgtggtgcaaaagcagaaaatacagctggattgggttatgaatatttacgtttttgtaaattaatcttttatattgataacagcactgactagggaaatgatcagtttttttttatacactgtaatgaaccgctgaatatgaggcatttggcatttatttgtgatgacaactggaatagttttttttttttttttttttttttgccttcaactaaaaacaaaggagataaatctagtatacattgtctctaaattgtgggtctatttctagttattacccagagtttttatgtagcagggaaaatatatatctaaatttagaaatcatttgggttaatatggctcttcataattctaagactaatgctctctagaaacctaaccacctaccttacagtgagggctatacatggtagccagttgaatttatggaatctaccaactgtttagggccctgatttgctgggcagtttttctgtattttataagtatcttcatgtatccctgttactgatagggatacatgctcttagaaaattcactattggctgggagtggtggctcatgcctgtaatcccagcacttggagaggctgaggttgcgccactacactccagcctgggtgacagagtgagactctgcctc

SEQ ID NO: 9662 - DNA, 1308 bp, Homo sapiens
atccatacagggtgtcatccttctttccttcaagaaacctttttacacatctccattccttattccacttggatttcctatagcaaagaaacccattcatgtgtatggaatcaactgtttatagtcttttcacactgcagctttgggaaaacttcattccttgatttgtgtttgtcttggccttcctggtgtgcagtactgctgtagaaaagtattaatagcttcatttcatataaacataagtaactcccaaacacttatgtagaggactaaaaatgtatctggtatttaagtaatctgaaccagttctgcaagtgactgtgttttgtattactgtgaaaataagaaaatgtagttaattacaatttaaagagtattccacataacttcttaatttctacattccctcccttactcttcgggggtttcctttcagtaagcaacttttccatgctcttaatgtattcctttttagtaggaatccggaagtattagattgaatggaaaagcacttgccatctctgtctaggggtcacaaattgaaatggctcctgtatcacatacggaggtcttgtgtatctgtggcaacagggagtttccttattcactctttatttgctgctgtttaagttgccaacctcccctcccaataaaaattcacttacacctcctgcctttgtagttctggtattcactttactatgtgatagaagtagcatgttgctgccagaatacaagcattgcttttggcaaattaaagtgcatgtcatttcttaatacactagaaaggggaaataaattaaagtacacaagtccaagtctaaaactttagtacttttccatgcagatttgtgcacatgtgagagggtgtccagtttgtctagtgattgttatttagagagttggaccactattgtgtgttgctaatcattgactgtagtcccaaaaaagccttgtgaaaatgttatgccctatgtaacagcagagtaacataaaataaaagtacattttataaaccatttactatggctttgtaacaattgcatacccatattttaagggacaggtgaatttactactttctaaagtttattgatacttcccttttatgtaaaatgtagtagtgatacctatatttccacattgtgcattgtgacacacttgtctagggatgcctggaagtgtataaaattggactgcatttcttagagtgttttactatagatcagtctcatgggccatctcttcctcagatgtaaatgatatctggttaagtgttatatggaataaagtggacattttaaaact

SEQ ID NO: 9663 - DNA, 114 bp, Homo sapiens
ggacagcatgctccacccccgccaggcctcggaggcacctgctggctggggcaccctctgcttgcacagagctctagcaggagctgaaccacctccaaaacgcagtcactcccg

SEQ ID NO: 9664 - DNA, 342 bp, Homo sapiens
atagcactctggtagctgttaactgcaagtttagcttgaattaagggatttggggggaccatgtaacttaattactgctagttttgaaatgtctttgtaagagtagggtcgccatgatgcagccatatggaagactaggatatgggtcacacttatctgtgttcctatggaaactatttgaatatttgttttatatggatttttattcactcttcagacacgctactcaagagtgcccctcagctgctgaacaagcatttgtagcttgtacaatggcagaatgggccaaaagcttagtgttgtgacctgtttttaaaataaagtatcttgaaataattaggc

SEQ ID NO: 9665 - DNA, 1303 bp, Homo sapiens
tttgggaagtggtcctacctgtgattagggaggggtacgtctcccccaaactgatcatcgttagggtgttaaacacagacgaggaaacacacgtttttaaagttcatgtacgttcttgtacacagaggtaaagatttgaaaacctgtgccttgtgggttggactttgaagctggccccgccgacggccaccgcacagccccaggggtgtgcttgcgagtcgttgctccctggaaacattgtcctttccccacggcgttaatcatgaaaaccaggctggggtttttttaatattgtgaaatgtacaccatgaaatgaaaggtttatcctgtgccagaaaccaaggtttatcatgctctaggaacttttttcttacactgcctaccgccattcatgattaaaccatccagaaataccatccctgttttacctggtgtctgtgtattgcctgtgtttgtgtttataagtttatgctgataggtttgttcggcttgtttatgtattagtttgggatttgtttttaaataatttataccaagagagtataatctaatggtgcaggttgagagcatcccaaatccgaaaatctaaaactgtttgagcactgtatttatctgttcttgcactgctataaagaactacctgaaactgggtaatttataagtaaagaaaagaggtttaattgactcacagttctacaggtggtacaggaagcatggctgtggaggccctgggaagcttacaatcgtggcagaaggtgaagcggaagcaggtatgtcctgcgtggctagagccagaggaggagggcaaaggggcagatgctgcacactttcaaacaccagatctccaagaactcactaacacagaatagcaagggggaagtctgcccccatgtttcagtcacctccctccaggcccctcctccaacaccgaagattacaatttgacatgagatttgtgtggggacacagagcaaaaccatatcaagcactgacatgacattggaggaaaatgctcattagagcttttcaggttttggattttcagatttgggatacttgactagtaaatataatacagatattccaaaacacacaaaaaaaccaaagtctaaaagacttctggtcccaagcatttcagataagggatacccaacctgtaataatgggaaacaagcagtagaggctgttggttaatcttggcacaagtttaattacaggttttttttttttcctgtttcttaagtacagtcaaacataaacttactggaggaaacatttataaaaataaatatactttcatttg

SEQ ID NO: 9666 - DNA, 865 bp, Homo sapiens
gagccacaacagaggcttcagaccattttcttttcttgggagccagtggatttttccagcagtgaagggacattctctacactcagatgactctaccagtggccttttaaccaagaagtagtacttgattggtcatttgaaaacactgcaacagtgaacttttgcatctcaagaaaacattgaaaaattctatgaattgttgtagccggtgaattgagtcgtattctgtcacataatattttgaagaaaacttggctgtcgaaacatttttctctctgactgctgcttgaatgttcttggaggctgtttcttatgtatgggttttttttaatgtgatcccttcatttgaatattaatggctttttccattaaagaataaaatattttggacaatgccgataaatgtatgaagttagtatccacatcataaattcagagtgatgtttagcagtaaatcaatattttgaagtgatacacagatgtctttcctccccacaaacttttttaaacaaaaaacaagacctcttttctttagatggtgccacctatgcccaccacaacagagattttacatggaaaccgggctcagtgagaactgatttcctgcccaatatttgtctttgggctgtctctagtgactaattattaaggaatctagctggttatacagttcaaggctttctatgttgttaatgaacctcaaaatagccgttaagacatgaaatacagcagcaggttaccaatgcgaacaggtagttcgcatttatgtaaaacattcagaaaatgaagttttgaatttgttggaacattcaaaggacttgagagcattttattgtaacttaaaaaaataaatacaactgtcact

SEQ ID NO: 9667 - DNA, 1785 bp, Homo sapiens
ctgccttctatgaaagcagtcattattcaaggtgatcgtattcttccagtgaaaacaagactgaaatatgatggcccaaaatttattaaaaagctatattttcctgagagactgatacatacactcatacatatatgtgttccccttttccctgtaatataaattacaaatctgggctcctttgaagcaacaggttgaaccaacaatgattggttgatagactaaggatatatgcaactcttccagacttttccataaagctctctcggcagtcgctcacactacaatgcacacaaggattgagaagagttaaaggctaaagaaaacatcttttctagcttcaacagagaggtttcaccagcacatttaccagaagaatctgggaatggattccactacagtgatattgactgcatctttaagaagtgaccattatactgtgtatatatatataaacacacacacatatatatatatatatatagtactctaatactgcaagaaggttttttaaacttcccactttattttttatacacattaatcagatatcattacttgctgcagttgcaactatgcacttgtataaagccataatgttggagtttatatcactcattcctgtgtacctgatggaagttgcatgttcatgtttaagcagttactgtaacaagaagtttaaagttaattatatcagtttcctaatgcttcatgataggcaactttacccattttgaatgccttaatttaatttttttcaaagtctcagccctgtctgtattaaaaaacaaaaaaagcgtttaccagctcttaggatgtaaactagctttgtggaagataaatcgtgcactatttttacacataaatagttatatcaatgtcagcctattttgattaacaaatgtttttaaagtattattggttatagaaacaataatggatggtgttggaactaatatatccttgatgtctgtctattattcattcaactctttttacagacctcagtattagtctgtgactacaaaatattttatttgctttaaatttgctggctaccctagatgtgtttttattcctggtaaagacatttgtgattacattttcacacttaagattcaaaatttttcccaaatataaagaaaactaagacagactgtagatgcattttaaatatttaaatatgatcctcagacatgcagctgtgtgtggcagtattttagtaccgggttaagaaaactggcaactgggaagaagtggcctcaaaggcacttaatttgatttttattttttaaatgctgtcaaagttacagtttacgcaggacattcttgccgtattctcatgatcccagataagtgtgtgttttatactgcaacaatatgcagcaatggtaagcgtaaagttttttttttgtttttgtttttttttatattatgaagtcttttaacagtctctctttatataaatacacagagtttggtatgatatttaaatacatcatctggccaggcatggtggcttacgcctgtaatcctagcactttgggaggccaagacgggcggatcacctgaggtgaggagttcaagaccagcctgcccaacatagtgaaactccgtctctaccaatatacaaaaattagccgggcatgatggtggtggcctgtaatcccagctacttgggaggctgagacaggagaatcgcttgaacccaggagacggtggttgcagtgagcgaagatcgagccactgcactccagcctgggcagctgaacaagactccgtctc

SEQ ID NO: 9668 - DNA, 2101 bp, Homo sapiens
tggcatttgagaatttatgtatcactgagttttttgggaatatcttcgtggagaattacgcatcaaatttgattctcagagcaataaattatccatgaagtgctctcgttctcagtagcggcatcatggccagtagtgtctttgaggagttcaccacttagattactgagtaattgtggtttccacatttgaaaacaactccttttataattattcactgctttttgtcagtgaaatagacatcttgcctcctgaagtagcttcatcacagagtgtcatgaagacagacagtcaggctgaaatggacagttctttgtggactctacccttcccttcaaggagtatgtcatatatcacaaaagaaattgccttacactggttcatgtttgcagttactgttgtacattgcatagatgtacacacgaatttaaatgtgatgtctttgtatatatctgtataatgttgagattacttacgaaatatgtctgagtgacacttttcacccttgtacagccaaaataatgtatatatggaaagtgacagacaaattctctaatctctttggtacctataacttattagaatcctctggatgagggttagaagagactttttccaaacttctacatgtagaagtatcataaatgtgctacacatttatgtttgtggatttaattaaagtattttaatatggttttcagtgctaaaattggagtcagatacttcttggttttaagctgtctacctaattgctgtctcccagcagactggtggcatgcccagtggctttgggggcaaggatagaaatgccatcaggaaatagctgaattcattgtgaaacatgaattcagtcatggtgataattggaaactcctttcaggtttttgcaagtagattttgtaatgtttgtgtatgcagccttgctgttgagtcagtccaaggggttttacttaggacaagttgtaccttgccctctctccagctctgctcccacattttcacatacctagctgtttctacctcattgggtaagtcatttaccactctgtgcctcagtttactctgtagtttaccattagactgtgagctccttgagggactttgtcataatcactgttacatcccagtgcctcacaccatgcctggcccttaagaagtgctcaataaatgtctgaacaaataagtgagtggagtgagtgaattgtaagatcagaataataatatttggtttgtctatcgtacaagattcctgtatcgtttgaatattgcttttaaagaaatatttgaagcgacttcaaattcagactgtgtttaaaaagatttaaaatcggaatccaaaatcaaagtattaaaaaataatgctgagtgtttaggattcacatacctctgagctctggtggcttttgccagtcctgtccctctgctgagcaccagcccttcctgcagcagtcctgccggtgtgtttctgtgcacctggggatgaagtgtgctcctcccccagcggttagcctcaatgcttttcctccctctgttttattatttgaaattagccaaagaaaagctgcagggggcactgctgatcatcactggactggtgggtcgtactgtttgacagaatagggaatacaggaggaggagcaagcctagggtaaaacttaggtttgggacatgcttgatgaaagcaagagttgagcaggttgttgtgtgtatgtaggtcaggtgctcagcggaaaagtctgagctgtgtagtacgtcaggcagatgtcagtttagatgcgatagtttaagccacaagagtaggagaggtcatctaaagagtacagcaggcctaagggcatctatatttaaggagaaatacagaagaagtctcctgagaaggaataatggggcgggtggggagggagaaggcagtgtcccaaaaaccaacaaaggttttaccaaaggtaataccatcatttctgagcagcagttccttaacttgtgaatgtggcaaatgttctcctttacaaattgttctgaaggtaaaatgagatcatgtaaacgaaaatcctttgtaaattacagatgtgtgttataaatgaagtatctctcgagtcactcc

SEQ ID NO: 9669 - DNA, 300 bp, Homo sapiens
atgtaatgcaagaatgaacagaacaagcaaaatgaccagctgcttagtcacctggcaaagcaggtgagcaacctcatcactaatcattcaagcttcgcagccagggcgacttctatcaacccctgctctgctgagaaccatcaagcgcagggaagccacgtgacccctcctagcctcaggctccctcgtctgtgtagtggagataaagaacagcacccatctcttagtgttgcctgagactaaagtgcttagcacagaacctggtgcgtagtagatgctcaataaatttttgctggcacg

SEQ ID NO: 9670 - DNA, 140 bp, Homo sapiens
gggccacctgtggccctgctccttagcagaaaaagcatctggagttgaatgctgttcccagaagcaacatgtgtatctgccgattgttctccatggttccaacaaattgcaaataaaactgtatggaaacgatgagcaag

SEQ ID NO: 9671 - DNA, 303 bp, Homo sapiens
agctctgctcaaagaagaggatctatgtgctgacctcagaagatgtatatgtttacataatttaatacagattgatgttaatacttgtgtatttacataaccgtttccttcttgtcactgaaatatatggaccttaatttgtatcctgactgactcaacccagcagagcataaattgacttgagagccttacctttgatgtctgaaatgaaacccccttctccaaaggcaaaattcggagactttgatctttgctactggagtcctttaacaacatctataacgataaaaaattcctaattgt

SEQ ID NO: 9672 - DNA, 1685 bp, Homo sapiens
tttgtaacttaacatgccttgtcctgatgttgaaggatttgtgaagggaaaaaaaattctggactctttgatataataaaatgagactggaggcattctgaaatgaaagaaactcctttatatatccaaccacaatcaaacatataaataagcctggaaaaccaactacaacctgcaatttaagattactattactttaagaaaatcaatttcatagtattggttttaaatctttttaagtttttttaatacgatctatttttataggttctttttcagaagtaaaattttgtacatatatacatgtacatatctgtttagtttgggttcatttctataacattttgtaagaaaataaaagtttgagcacctgattatatttagttttgcttttccagatattacattctatagttaccaaaaatggttgaagggagggatttctcattgcagagggtggggtgcaagggaataagacacttgtacggaacactgaagctttgccaacttctacacatgccttttttgcagtcctttaactgtccaccctaccaagagcttataaccagtatcagaactggataatgacgcagtttttcactctgacctccatcatgcttgcctgatttaaaagccctcagtttgcagtccagggactgttcaggcttgtcctcagctgagaggacacaggctagagggactgtgcagaaccaggctgggagaagggctgggaaaactgggagtggagggtggatcctcatggagcaggagagtagctcatggctccaggagcctgaggccatgcagttgatggtgagctgacatcaattctaagactcatcctaattgaggggtgttaaaaagtgtgctgcttagaatgaccaaatatagttattgtaaaaaatgatatttatgaactttttattttagaaaacatgaattttattgctccctgtattatttgtttgatactaggattcatgctaaactttttaagaatgtattggatatcaagaagcattccttacattagtagcaataaatattagaataaatatgaaattgaactattttcagaaaaagggcagtatattaagagcagggactgttctctagttattgaggaaaactggactttgtttgtgtttttggtggaggaagaagtttaagatactttagtcttaaattgaggtttgccaaatgagaagttcaaaaacttgggctttctaatcagaatttccaggaggaggaaagtgtgtgctgaatattttaaacatttcccactgatcatacaaagtctgatttttaaatttacacttataatgcctttgtattaaaattatttttaacatgtgcttttccaaattaaaaatgaagtagagtataccaaatgcataaactttcattagctaaggaactcatgtctgaattttgttgtagttttgaatgttgtgctctttcatacagaatgggaaacataatcctcaggtatcccagcatctcttgttgaattgaagattattcattgctttggcctcacaaagttttgatttcaactatcataagtgaaaatatcttcctttaatgttctaagtagtgataatattactagaatgaaagaataaaaagaaattgttcttttaaaatatgtgtaacttctaaaaataaaacttaaaatttatatg

SEQ ID NO: 9673 - DNA, 460 bp, Homo sapiens
gaacaaggagtaaaagagctgtttataaaactgcatatcagttatatctgtgatcaggaatggtgtggattgagaacttgttacttgaagaaaaagaattttgatattggaatagcctgctaagaggtacatgtgggtattttggagttactgaaaaattatttttgggataagagaatttcagcaaagatgttttaaatatatatagtaagtataatgaataataagtacaatgaaaaatacaattatattgtaaaattataactgggcaagcatggatgacatattaatatttgtcagaattaagtgactcaaagtgctatcgagaggtttttcaagtatctttgagtttcatggccaaagtgttaactagttttactacaatgtttggtgtttgtgtggaaattatctgcctggtgtgtgcacacaagtcttacttggaataaatttactggtacaa

SEQ ID NO: 9674 - DNA, 924 bp, Homo sapiens
gggcagggaggagaaataaagtggtgatagtctggtgttacagaagccacttcttttggctctctaggataattagataggtatttcagaaaattggaccttaaaactttgcttctttggaaaggttttctcctgattttttggaaaaccttttgaaccctcaagttaccatcaaactacttctctttgaactaccaatactgttgaatgccattacacctatctctgtgtaagtcataatgatgactctttaggataagtttagaacttgaatatttgcatgcttaaggcactgttttagaagcttacttagttttataaacactgctcatttttggatgtttgtagataacaatgaattgttacccatcagcattgtagaatagtgtcttcaaaggtagaaggagtatggttaagcacactcttgaaaactggagctttgtattctgtgactgctatggctagctttgtaaccaaagcaaaatgagaatttcactctacctgcatgagtataacaattttgatactgctcatttagaaataaatcatctggttgttcctccagggtactttctaagataagccttaaacagaaacccctaagaaaggttctctgaaaattatttggtgggttaaatgcctctgatccacagagtttcatatttgaagtctccggctttgggcctggcaggctggcacatccatatttgtatggaaaaaaaaaaaaaagaccctacgctaccacttcaaaaagtgacatgaagtgtagtatcctggcccttcattgtcattctctcatgatttttgttttgttttcaacaaaaattggttggtcattaaatatatcatatgttaggcacagtgacctggttattttcacatgttacttcattttcttatcaaattaaatgtttgtgacatagt

SEQ ID NO: 9675 - DNA, 789 bp, Homo sapiens
atagaacctgtgggtcacaaggaccctaggcccagcggccctctcctccatagggaccagaagcctgactctggcgggcagcgggagaggcgctcgctcgggaccttccacctctccaacattgtcccctgggtccctggcgcacgcggcacttcagagccccgcccggggccgcgaccccgaccgtccctgctgctcccctaggacgcggctaaactcttggccaaaaggcggtactcacgtggcggaagggaaactgcattaaaaaaagaacgaaagctccgcggagccgcagcggcgcctctcccagaagtattactttttctattgttattttatacgttttcttttttatttttgtctttgaccatataagcttgtaactctgactgcggagagtgagtggagagaggagaggcaacgaagtccttagcactggcagctcccacctcctcctcccgcccctgcccccacccccggagcctgcaaaagtgtaatccctgtatctgcttcagcctcctgccctagggaccgcggggcagccccctcccagctcttgcagctcagctggcggccgtgggctccgggactaggagagcgggacggggacctcgggcctggggtctgcagggggcccggcctccgctgccgcgacactgcgagggagcagccagccaagagccgggcgttatattgcgattggcactttatgctgaccatcggtaacggacatttatcactggagttttttttttttttaactattaaataaacggttattttacaggc

SEQ ID NO: 9676 - DNA, 228 bp, Homo sapiens
tatttttaacttaatggaagtattgattcatgatccttacatctgcatctagttatcagtaatttagatattgagctattttgatttatatttaagaaattaatacattagcactgaaagttaaatagtgtgtttaaggtagttaatttcaggttgaatgggttttttttaatgaagtgtaaataataccaatgtataagtgtatattattatattaaatattatagt

SEQ ID NO: 9677 - DNA, 3288 bp, Homo sapiens
aggaatgataaactgtatataactgtaaaatatatgtagcatatatacatggctatatgctgtatatgtaataaggtttatttctgtgagttttgtatgaaaatcagcctcattatttatagttgaatttttgcacaaaatatatgttaataaaataatttttatggcaatacaactgtgaaataataaggccgattttcatataaatgtatgaaaatcaaccatgttttctctcaccctctctcttttgtttatcttgtttttggttacatgataccatggaaatattccaaataaatttttttctcacagtgtcaaggtaactgaattcattaaaaaatcttgaagggagtagggagtgggggaagcatgggagtggggcaaagttgaatttagagaatttttataacccatgttacaaggaagttaaacaattgtaataatgaaatgagctttctctatagccatatttaattaaataagtgtcgaatgtcttctttattgtattttcagaagtgaggcgatggcattttaagacattttttacaatctgaattgtttctaatagccctattcttctattttaaaacctgtccttttagtctcatttaagagatggcatttggaatttacactttcatatgattgtgcagaaaacttgcctctatttataatgaagataacttaaacagaaatatccattttgtagttatagcttctgttgaaacattgtcactaagttggaccgtttatttacacaagtattgttgagggagtgattttttcttgatatgcgtctgttttcatttattattaatttgaaagataaacagttgtgatccataatggatcatttcttatgtcttttacatagctaataatgttctctgtttatttctcatgaattcccattttgtggctaaagaccagacctttgcactatttcatcaagattattttattgaggtttggcttacatatagtagaggcaatacatagagatacgcaactttgtttttgcagctacaatacactttctcaatctcatatgtttttgtcttgtagagacagagacaagttcagcatgttgcagattgggaatagtgagctatgagaagagatttagagcctagatgagcttaggatagagagtgggctcattggcctaaataaaaagagaagaccagaagtctttgaggtctctgtctctattcatgcgcctcgtggaaaattaccttggtacaatggtagcctctaaatagactgcctcgcaagctattccagaggtcatggaacagaaagccttataaaccaaataaaaattctcaaaatacattggtttattgaaccaatttgcaatacacagtgaggaacaaggagaaagcaatgatagattaacactgttagtgtaacgtgccagtggagtggaaagaccgcaacacctgaatcctgggttttgtaatgtttttatgtcctgactcacattctgtcacatacgctttcccctaatagtcgggttacaaaaaggaccagagtggccgcttgagccagatgactcaatcagatgaaatgtgcctgaggccaacgatgtacacttgctctatagaagggtgtcaggggcaagtacacttcaccacagcaatagcttgcctattagtctgctgagcagtcatgaattttattgtatttcttgggtaaggacaggccagaatgagtgtcaccagtgggtaattgaatcaacttctcacacatactgaaggctttatatgtctcatgcatacttagtgtatcatgaatatttggtatctttgtggcttttcatatttttagtgcttcatgaatatttggtatctcttgctcctttctatctgtggtcacacatacacgctctattaactttgcctaataagtctcctaggttactaacttacttacctaaatgtaacacaatgaattccagctttctcatttgttctataccagaatgggaaatttccccaaatcagaaaatcacatcctaacaaagaagtctgtctaagacagtacatctcctgttgaacttgcatctttccacaggactttctgtttttagggatgagactattctctgcttcatcaaggaaagagaaatgttcagggttgtagggatggcacacttattagttctgcctgtctgaaaggttcctgcaggacagtttggtcagagctgcaattcttagtccatggtctaatgcttgagtatctcttctttccctttcctgtctcaggaatcagctgagaattcattcgattgtcatgcctctagccccttactgtgatttgttggttgcactttcatttgctttagttctagaatcacctgttgactcctcagacttcacctaactttggaaactctcttttggaggcttctcatttccccctaattctgtgctgcctgagccctagaattttcccaccaacgaattattccaggtagatcctaagttgctggatctagttgatatttaaacaatatctagttgatatttctcattcagttggatccagaaaccagtatctctaaaaacaacctctcataccttgtggacctaattttgtgtgcgtgtgtgtgtgcgcgcatatgtatatagacaggcacatcttttttacttttgtaaaagcttatgcctctttggtatctatatctgtgaaagttttaatgatctgccataatgtcttggggacctttgtcttctgtgtaaatggtactagagaaaacacctatattatgagtcaatctagttggttttattcgacatgaaggaaatttccagataacaacactaacaaactctcccttgactagggggacaaagaaaagcaaaactgaccataaaaaacaattacctggtgagaagttgcataaacagaattaggtagtatattgaagacagcatcattaaacagttatgttgttctccttgcaaaaaacatgtactgacttcccgttgagtaatgccaagttgttttttttattataaaacttgcccttcattacatgtttcaaagtggtgtggtgggccaaaatattgaaatgatggaactgactgataaagctgtacaaataagcagtgtgcctaacaagcaacacagtaatgttgacatgcttaattcacaaatgctaatttcattataaattgttttgctaaaatacactttgaaactatttttctgtattccaagagctgagatcttagattttatgtagtattaagtgaaaaaatacgaaaataataaacattgaag

SEQ ID NO: 9678 - DNA, 1058 bp, Homo sapiens
attgctccaatttctcacctgaaaatgtggacagcttggtgtacttaatactcatgcattcttttgcacacctgttattgccaatgttcctgctaataatttgccattatctgtattaatgcttgaatattactggataaattgtatgaagatcttctgcagaatcagcatgattcttccaaggaaatacatatgcagatacttattaagagcaaactttagtgtctctaagttatgactgtgaaatgattggtaggaaatagaatgaaaagtttagtgtttctttatctactaattgagccatttaatttttaaatgtttatattagataaccatattcacaatggaaactttaggtctagtttcttttgatagtatttataatataaatcaatcttattactgagagtgcaaattgtacaaggtatttacacatacaacttcatataactgagatgaatgtaattttgaactgtttaacactttttgttttttgcttattttgttggagtattattgaagatgtgatcaatagattgtaatacacatatctaaaaatagttaacacagatcaagtgaacattacattgccatttttaattcattctggtctttgaaagaaatgtactactaaagagcactagttgtgaatttagggtgttaaactttttaccaagtacaaaaatcccaaattcactttattattttgcttcaggatccaagtgacaaagttatatatttataaaattgctataaatcgacaaaatctaatgttgtctttttaatgttagtgatccacctgcctcagcctcccaaagtgctgggattacaggcttgaaagtctaacttttttttacttatatatttgatacatataattcttttggctttgaaacttgcaactttgagaacaaaacagtcctttaaattttgcactgctcaattctgtttttcgtttgcattgtctttaatataataaaagttattacctttacatattatcatgtctatttttgatgactcatcaattttgtctattaaagatatttctttaaatt

SEQ ID NO: 9679 - DNA, 553 bp, Homo sapiens
agaaattctgcctttgacaataaatcctataccagctttttgtttgtttatgttacagaatgctgcaattcagggctcttcaaacttgtttgatataaaatatgttgtcttttgtttaagcatttattttcaaacactaaggagctttttgacatctgttaaacgtctttttgtttttttgttaagtcttttacattttaatagtttttgaagacaatctaggttaagcaagagcaaagtgccattgtttgcctttaattggggggtgggaagggaaagagggtacttgccacatagtttcctttttaactgcactttctttatataatcgtttgcattttgttacttgctaccctgagtactttcaggaagactgacttaaatattcggggtgagtaagtagttgggtataagatctgaacttttcatctgcagaggcaagaaaaatatttgacattgtgacttgactgtggaagatgatggttgcatgtttctagtttgtatatgtttccatctttgtgataagatgatttaataaatctctttaaatact

SEQ ID NO: 9680 - DNA, 1967 bp, Homo sapiens
cgcgggagccatgcgccccctccgccctgccactcactaggcccccacttgcctcttccttgaagaactgcaggccctggcctcccctgccaccaggccacctccccagcattccagcccctctggtcgctcctgcccacggagtcgtggggtgtgctgggagctccactctgcttctctgacttctgcctggagacttagggcaccaggggtttctcgcataggacctttccaccacagccagcacctggcatcgcaccattctgactcggtttctccaaactgaagcagcctctccccaggtccagctctggaggggagggggatccgactgctttggacctaaatggcctcatgtggctggaagatcctgcgggtggggcttggggctcacacacctgtagcacttactggtaggaccaagcatcttgggggggtggccgctgagtggcaggggacaggagtccactttgtttcgtggggaggtctaatctagatatcgacttgtttttgcacatgtttcctctagttctttgttcatagcccagtagaccttgttacttctgaggtaagttaagtaagttgattcggtatccccccatcttgcttccctaatctatggtcgggagacagcatcagggttaagaagactttttttttttttttttaaactaggagaaccaaatctggaagccaaaatgtaggcttagtttgtgtgttgtctcttgagtttgtcgctcatgtgtgcaacagggtatggactatctgtctggtggccccgtttctggtggtctgttggcaggctggccagtccaggctgccgtggggccgccgcctctttcaagcagtcgtgcctgtgtccatgcgctcagggccatgctgaggcctgggccgctgccacgttggagaagcccgtgtgagaagtgaatgctgggactcagccttcagacagagaggactgtagggagggcggcaggggcctggagatcctcctgcagaccacgcccgtcctgcctgtggcgccgtctccaggggctgcttcctcctggaaattgacgaggggtgtcttgggcagagctggctctgagcgcctccatccaaggccaggttctccgttagctcctgtggccccaccctgggccctgggctggaatcaggaatattttccaaagagtgatagtcttttgcttttggcaaaactctacttaatccaatgggtttttccctgtacagtagattttccaaatgtaataaactttaatataaagtagtcctgtgaatgccactgccttcgcttcttgcctctgtgctgtgtgtgacgtgaccggacttttctgcaaacaccaacatgttgggaaacttggctcgaatctctgtgccttcgtctttcccatggggagggattctggttccagggtccctctgtgtatttgcttttttgttttggctgaaattctcctggaggtcggtaggttcagccaaggttttataaggctgatgtcaatttctgtgttgccaagctccaagccccatcttctaaatggcaaaggaaggtggatggccccagcacagcttgacctgaggctgtggtcacagcggaggtgtggagccgaggcctaccccgcagacaccttggacatcctcctcccacccggctgcagaggccagaggcccccagcccagggctcctgcacttacttgcttatttgacaacgtttcagcgactccgttggccactccgagaggtgggccagtctgtggatcagagatgcaccaccaagccaagggaacctgtgtccggtattcgatactgcgactttctgcctggagtgtatgactgcacatgactcgggggtggggaaaggggtcggctgaccatgctcatctgctggtccgtgggacggtgcccaagccagaggctgggttcatttgtgtaacgacaataaacggtacttgtcatttcgggc

SEQ ID NO: 9681 - DNA, 2893 bp, Homo sapiens
attacaggagcaagagaaagaagataatttaaccatgtgaaaagaatttttttgtgtgtgaattatcaaaacacaactcaactatgaatcttcaatttttttttaaagcaaaactatttattgactttattcatccatttgtaaattttttaaggttcttgtgtatatttggggggtgggggatgaattataaattatattcagccctgagtggagacctatcagattggattgctggcaaagcacagaatgcctgtatatgatgtaactgtatcaaaaataaaaagctgtcacatattttgtaaatttttaccttgtaaagtcacaaaaatagtttttaaaggaaaaagtacagtattcttttaataaactggctcacagtctggtaggtctacaaccccatagcacaacaggtttatagagatgtatatagaattatagtccttatttttttcctttgcgtgaaaccttttataacagattaacaatcaactgcataaatattattaatattttaaaaagagttaagttgtattttgataattcacaaactatcatgcaaataacgagtaagtagacaagaataaagtggtttgagatgaaaagaacctaacattatttacagtagatgtggttttaatacaattactgccctaaaatgtctctggcaatgtacagaaatattgtatatacttacatatgtaattgttgtaagagttaaatacaaaatcatggtgacacttccaattaagtgcactaaatgaaaagttaagtcacttattaacttttcagtttggtttgcaatgagaaagagtggaaatttgtattttgttttgcttatagaattacagacatgttgaggaagtgttgagctttattttgctttttcatagaggcagaaagtaggaaccagatagagatgaaaaggggccactgaaaagtgaatttgatagctcagcatttaagcatgattacatattcagatagctctttttgctttctataaatatatgcattgtgtgtgtagtaatagatgtaagtttacactttgaaaggaaatcttgtttcaatgtttattataaaagccttgctaatttagtagtgatgctttccttggttgtacaggtgtacatttgtaaaccttcatgctgtaaatggaatttgttttatctctttgggatacatttgcattttagtgtacatttacgtccctgccctctttgacctggcaatatagtgttgtataatgtaaatttatttctccaaatcgagagtgattttttaaaaattttttatctttatatggtttcagaagtatgaaccagctttctttttattattgtgagatcattttgttttataacatagttgttgactgttaatatggacctgctagaatttggatcactttcaattgaagtcagggtattgtgcataatagaaagtattggactgagatatttggttaccatggaggccaatgcttttttcatcttattaaatgtgatgtgacttttttctttgtacagaagagtactgtatttttgaatagcctactcccaagtaagagcaaatctgtatgataacattttttcctctggacataagacataacagtaacacgatgtacatttacaagcggccttatgtacatttcccaacaatctttttaaggcaaaattgtgaccatatgtgtataattaaaatcgtttttaatcctttgcctatgaaaatattttggaaaaaaacttgctgtgtatattcagtttctgaaagataaagaaagtgctttgtattttgttgaagtcagtattttgtataaacatttatgttgacccacttatgttcagtgctgaaaactaaaatgaacatgctattctgtcagctgaatatggaagagatctttttttactagagatctgcagaagaaacgcaatcttctgagcacaatatggaatctaaaggttttatcacttagttgttcatattatgaacctaaaaataatggcataaagtttggggatgccaggcatactttttcatgtttggtgttgagttattttacttttctaacccaacattccttggtgagaccattaaatccaaacacttgtcaccgttccttctcatagtcactctgggtcatcagcatgtcccagtcactgcagcaacgccttgtgtttgtttcatttttttaaaacccacacaaagccgctgtctcactttttcctactttaccaacctcagagtatttcggcccgtatcgaacttttgttctcagtatcagcccatggtttcaggatcaaagctgtcatgttggagattggtaatggctttcctgtctttgtacagttgaattcctagtcttccttcatccttgccctctgttggcacaggcattatctctgcaattttagaaaatgacaagtagagaatactacattgagaaactaaaccctcttcttggggtcctgatactcattcccatttgtcccagtgctgacaacccaatcttcccaatactttcaggcctgctctacaaaagtacctgttcttgtagaaattttacagtctgccattttgggtgcccaccccaatttttaccttttagtaagttggcatgaaattttggtaaaatctgaaaatcacatttcagaataaaacaattgggcaaaactacctaggctttactcttgagtgtctccttttgatagggattgtttctggaccagtttgtctaagtcctggctcttattggttcatatgaaataatgttaacttcacttctttgtatattatgtataaattagaaaatgaaaaatgtgtgaataacattgtatgaaataaacctggtcttgtgtttttctctagataaaatacccctctgtacctc

SEQ ID NO: 9682 - DNA, 1183 bp, Homo sapiens
cccttccatgctggcccctggcccagcaggcctgtctgtggggacatcggtgtgaagggaagggactgggccctgcagggtcagaacctccccacccccaggggaggccaggcagaagcctgggtcacagcacccagaactgcatggttccattttctccggggctgtggggccaaagtagaagcctgcgggctgcgggagcggctctcaccctaggagccagagcccaatgtgtcttattccccgtggacatgaaggggagggagggtgtggggatgccttgccaaccagaagcccagccccaaggatgaagcaagacatgtggggccgtagcgaggtgtcacatggggcagggaagcttcatgcccacgggttctgccagccccagcacagacccaaactggggctgggcctctatccctcctctgcctctgttcgcatagtaagaaggagtgaccggtatcctccccttcccctaccctaagctgtagcctgggtgactgactggcctgggcctggggtggggacgtccccaagccaaattactccagggcctctgctcctcgtggctgccaggggcctgcagggtctgggtgggtctcccaggagaggaatactgagtgggagatcggctgtctggagtgttctgatgcaagtctctctctcctgagcctcctcttgatgcaagctctaaagggagaagtcaggccctgcctctccagggtatagacggccctgctaggccccagttcttcctccttccccctttcccaggaaaggccagcccagtccatggccttcttgggcctctgggcacagagccaatgttcgtcattgcagctctcagcaaactgggtcatagctttccccacagctcagcctggggcctgggcagggctcccagcctgcaccgcctcccactgccagtggggcatgattctctcaggcttctgccccgaggccttcgtcgtcctcagggtctggacttggtcagtggcctttcaccagtggagctgccttcccagggagaaggagccgtgcgccagggcagggcccgtgccttagacttctcccgacccccagagcgctggtacacaggtctaggcaccacacagtgctttggaaattctcagtgaatgatgtttaataaagcaaaaaatgtcaaggtgtctttcttggatat

SEQ ID NO: 9683 - DNA, 1845 bp, Homo sapiens
attggcctgaggaacaagcccccactgccagtacatggaggcagtcagtgtactagacttagtaggtaaatgtttaattttgaagactgatattagaaatgaagaaagtgagaacctttgtcttacaaaccaactctccgctcgccatgttataggctgaagtaaacacagttgatgaatcattccataggtttaaccatacattttccaagactcagggaacacagtgatctacacagagtcttgtgtttgcacaagatgcccagtggcaccatatggtttattttggtaggcaggatctttgcagatgaaaaaaaaatctacatgtacttgattttaattgagttacattgtagaataggctcctctggaggaaattatgaaatacctactagaaaatgtaaaataaatcagtgaatgttaagagtatagttagatatgtgaagtgtatgagattatgacaaggatacactcatgttccaggagcaggaagtgaacctgggtctcctgtaagacagaagatgaagatgagcccaggctaacttagcacagatcttggctgagatcatcaatgtgacgtctaatgtacctgcactagacagagaataaagttcaccagacattactctggtcagctaaccagataaagaattgttgaaggaccccaactgtgcctcctgccacaggacaaccagcaagttctatgctgagccttagcctcccaggttataagctccctgcaggctcctcctctccagagccaggatggagaggcactgggctgtcccaaagcaggcttggatgtgccaacgtacagttgctccttctgtaattcttgcactaaaactccattaaagaccatcaatgagccaaatagtgtgctagccattgaggatggagttcttagctacttaatgattcttttcttctggaaatcttctagtgaataatttttaaaagcttcttttaaactgctcagtaaaacattgccatacattaactctccatttctgcattaacttcatttgctggaaagaaattattttgttaatgaaccaaacccagccattaagttatgtgaattcaccttctctagacacattgaggtatggcagagaagacacatattccctggcctagagtgggctgacaatattgctgcctcccctaaattgactcaatcttgagaaccacatactgcagtgacagttgatcatggatcagaaatattcctttttctcctagaggaaatccctcatggcattatcattccctaaggacaatgagatgtccctccgctcaaatcctaaagccccctgatgaaagatttggctctgatttgctgccaacttattggtaagtgctgaatgagttactgtgctttggcatagcttctacatcacagcaagtgacttctcagaggggaaaagccaagctccagacaaggagtgctgttagcccaaggggaagagctaatagatacataggccgtaagcacagggctgtacacagatcctttattggcatctgcatgagaggcctagaaatcggatgttagaagctaggaatcatggctctgagcgccttgcatacaggagatactcactgatactaaatcaaggcatgtaaacaatactgggtaaatcatacctaccagaataaagagtaacattcagagcttttcttttatctgttattttaaatgttactccatatttcaaaagtctgcacgtatgaaattgtgtcttatttctggtttttagagcctaagaaagatactcattcttaattcctatttatcatctgaaaaccaaatgaatttttgaaataaatgttttaccagca

SEQ ID NO: 9684 - DNA, 300 bp, Homo sapiens
ttttttaaaagaaatcttcatttattcttcttttccaattgaactttcacatagcacagaaaaaattcaaactgcctatattgataaaaccatacagtgagccagccttgcagtaggcagtagactataagcagaagcacatatgaactggacctgcaccaaagctggcaccagggctcggaaggtctctgaactcagaaggatggcattttttgcaagttaaagaaaatcaggatctgagttattttgctaaacttgggggaggaggaacaaataaatggagtctttattgtgtatcat

SEQ ID NO: 9685 - DNA, 1557 bp, Homo sapiens
tatctgcagtgtccttgctgtgtagctcttcagatgagaccattacaaacaaggcctgcttgacactggacactcgccaatgagactcccactgcactcaggcgaagcgcttgccatggtcggctctcctggtttccccctgtttcccctgagctgaggctcgctgctgtgtagcagagctcagtctttattagatggctccgaaagtggtgtttatgtattcatgactgtgtggttttgactaagggcagaattctcagaacaaaacaatattatggtgccatatggatggtgttttatggtttctctgaggctttgtgtcccttgtccaaagctgcattgaagctgtcttaggagcacttaaaagataccttggcattgttataggtctttttcttggcttcaagaggaggttgaggagtctgctggggggcatgtgctctagcatattaacctcaaaccagcaagaattagcagagctccaaggaggaccagagacccactggcttctgctctcaggaacaggaagtggctctgatgttgcctggacctcccagaatttaaaccaaaccctcttgcttccttaacaaattctggctgacgaaggtccaggtactcttaaaaactggccctgggaaaattttgaatgaaatttcaagggaatttgtcccctctgggttccacttgaggttgtgccgatgctgctaccacactgtcgagcccaggtaagtcctactgcaggattttgtgctgtggccactcatgagtgtccctgaaataactttttttttttttaaatccagttttgggatcacgcaactttcctatttttctcccagtagtcagctcccttagttaacttgtcactttaatttgatatttttattttctctccttttaagtcttagagaccagcagagaatctgtgagagaaagtatttcaggaagttagaaattcaaccgaatctgaggtagtcctaaaaagtgccattttgtttcacttatgggctaaagtaccagcttagtcaggtaagagccctgacccacttcagatggtaacaccacttctcactgccttcagatggaatcacagatttcagtcacggcgcataacaaattgatcagtgagtggctaggcatctgcagataaattgtttcagccatagaagctccattagcacatatgcttccttttccccccttcctttaaaatcatctggaaagaaactattttgtgcccttggggactcctgtctgtctgttacagtttaccaagatggagctgggttaggaaagaagtgagggcccattttgtggttcaagtgcactagacagctgctggggtaggaagcacaggcaatgtctgtaatcagctgtgggagagcagtgactgagaacagtctgaggcctggctccacttggaagtatctggggtgcgatgaaatcacaattatcttgaagcctaaagagggaactacaagactgttaactaagatcaatgtgggcacctaaaagggtatgttaaaatcaccatttctcaggtcaaaatactgtgaa

SEQ ID NO: 9686 - DNA, 177 bp, Homo sapiens
atgttttctacattttcatttggactaaatcccacgaatgacaactaccacctttttttcctttttaattaatactaaatattgtgatttcttatttgaggttcaaaatgacctgcttgaaactttgatacatattggaatacattatgttaataaacttgtagctttttgtgaaac

SEQ ID NO: 9687 - DNA, 144 bp, Homo sapiens
aggaggatggggcaggacaggacgcggccaccccaggcctttccagagcaaacctggagaagattcacaatagacaggccaagaaacccggtgcttcctccagagccgtttaaagctgatatgaggaaataaagagtgaactgg

SEQ ID NO: 9688 - DNA, 209 bp, Homo sapiens
gtcatcagaggcccatgaaagacaattttattattttagaagaaaattgaagagcctaaagaaaaaatattttatggttgaaaaaacactagacagaaggcactaaaaaagaagaatgaattaagggagcaatttttattacttccagagatcctcttctttcactggaattacttgatcaactgttttttaataagtgttggtcatcg

SEQ ID NO: 9689 - DNA, 760 bp, Homo sapiens
gggttctaaaggacagcaccagcgggacagcccacaaggctggggctggagaatgagagactgcgctctcttggggctgagggagcaccatgcagcttcacccctcacaaagccatgcacgctgggggctctgttttcctgcacactaaatagctagcaatctatgcaaacacctttcccataaagaaaccaaaccccatagtacagtgccttgtcctagtgttcacatgttcagctctgtttgtttagatgccaaggtttccattttcagggctataaaaagtattacttggaaatgaggcatcagaccaccagatgttaccgctcggttgaatgtgtccaccgtggagtggtttggtgacgctgtaaccattccacgccagtgacctctgctgggtcacagccactcaggaggggaagggtcaggatgagaggctgcagcctcgacacttggcgcggcctgatactgaaatagcgtctactcgtgcactgaataaaaacagaaacttgatcattttattcctgattagattttatcactctctgctaagacaatatagtctggagtataagtgggaaagcttgatttaaatactgtgaactctaataatgtggaaaatatttttcaactttaattttctgaagtataaattatttatgtaaattcattgtttttgcatatttcttaggacatgcatctttaagctttatcattgcccatatgtacagaaagagaataaagacatatgtttatggatgg

SEQ ID NO: 9690 - DNA, 570 bp, Homo sapiens
gagatggtgggcatcagactcagggctgcctccacgcagagtcaaagcaaggcatcacttttgatgtgtgaattcacaaatagtgacggaagctctcacatcctccaaatgctgtctctgcctgccggataatgcttgagattgaaagtctctaatgagctctttcccccagatgaggtcactcagagtgaagcgggagaacaagagggcattcgcatggcttcgttggatgtggcaggagccccatcaaggaaggacggggatagagtggatgggaagggcctatggcagaccgtagcttccttggatatttgcctaatatctgttttaacatctgacattttcataaactggtatctctggaggaactgtgaaacagtgaaagtgttcacctcatggttgtatcagtttggaaaacccaatgggagcatattgtaaaatagttcccaaatatcatatagctactgtttgtttataccagtgacctctacgctgatgacagctatccttattcgagtagcactttaaaatgatttgtgcttgagtgaacaaaagaagactttccatttc

SEQ ID NO: 9691 - DNA, 142 bp, Homo sapiens
ctgctgctttgatgtgtttgaatacgcaggccacccattccaaagcatcatgtgttccttgcagtgtcagcttgctcccgtctttcagttgtgacaatttcttgagggttaagcacatgttcatattaaagttgtcattaat

SEQ ID NO: 9692 - DNA, 762 bp, Homo sapiens
atggcctcgagcctgcaacagtccaaaccggaagggagaatttattttttgaaactgaaggaagtcccgaccttcctggattgaagtgcacactcatggactttaggtttagaaacctcctcagccttcatttgttcgtggatgtgtgagctctgagggtggccctgctattcctgtgtgtgcctgtagtgtccccagcataggggtcttaggcatagggctgaacagtccttccagagccctcgttccaatccctgccgtccttgcccctgaggggccctgaccactgtgagcaggagggtggcagagctgggacaaagctgcctttgccgctgggctttccgggactgtggagggagcacaggcggggaagctccacttcagacagggcttggtggggcaggacatggctcccattttgaagggaggtctccatgtggtccgagtgaggtgagacggccctcgtcctggtgttcctgatcatcttgaaaggttcttctggaactcctgtccccttagtcatgagaacagaaagtgcaatatttcctttcacctggcaggggaggggggatttatttctgaaagaaaaatatataaacagatcttctacatttatatttttaatcttctgttaaatacactttccgatattgccttgccttttgagctcttgctacagtcgcctttgctactgctttaagagaatttacaggtattgataaagaacaagactgttttattaaaagctttattcaacttgaa

SEQ ID NO: 9693 - DNA, 3980 bp, Homo sapiens
aaagtacagaaaaaagccacatgtgggactcaaatgcaaacagactttccctagaggtgaaataaccaacgtggagttttccttcccagaatctcactgctcttttcattcatgtgttgtcatttgtatatcagtaattcaggtacccatttcatagacattttactgagaaatgacctgcatttgtatgaagtgaactgagcgtcacaccctgtacttcatttcatatttctagataattctgaatttttttctcattcgtcagctctgtaattatagtatcacttagacatttcacttggggaaatccacaaggttcctggaggagggaagagaggacaagaggaccctttcactttttcttttttacggaattcatcatcagagaagaaaataacaaaaatggaagcaaacaacatcagaacccctgtaagtttggtgtgaccttacagacaagttgctgcttttacaatgagttccttaggtggtattttaacccatcgatctataatgatgactcttggcagccctttgggagtttgtaaaatgaggtgatacagttctgaattgagcattcctttatgatattcactctgttcctcttctgcagccaccagtgggagagacaagccagtcctaagagaaaaggtggtggcagccacaaattctaggtacactggctgctgcctatcctgtccctggatctgaggcctttcccttgccatagaaatggttgctggtagcagtagagagcactgtgcacctgggaatgaggaatcaggccccaagacagaagtacttggaggagccagctgcagtagtatccgcctgtagtcccagctactcaggaggctgagacaggaggattgcttaagcccaggagctcaagtcccacctgggcaacatagtaagatcttgtctcttaaagaaaaaaaaaaaaggtacttagaggtcgcacttaaagattatgcacatcagcagaggaaaggccagccaagcttggggcaagcttgatgcagtaggagagactccttatgaggcttagcccttgtcttactgccagcctttgccacaggcaggtgagaaaggcagggccactcctcagcaaagttggcctcttctacacttcctcaccagtgttgtttcttccttttttcccctcttccccttcccgtcttgtgttttttctgaaccccacatctgccatcatttctctcctctagagtccctggcttctggccactgcctcctccctcttctaagccttggcctgaatctggttgatcagaggcaagtgtggatcctttgggtggcagtcaggggagatctcagggcctctgttgggaggaatctctgtaattcctgcttgggctccaaatttctgaagagtaatatttttaaactatagcttacaaaatacattctctgaccacagtctcctccttgatatacaagggatggatgaagttcatgtattaggactggcactccttacggtgcttatagaactagtctcaccacttgactcattacgtcgtcattcttgttacatcactcatacttttagctgcaaccacactaattcacatttttatatactttcaattagctgtactaattggggcttgaaagtatataaaatcttcctgtcctgtgaattttaaaaagctatcccatatcgattgccaaagagcatctaccttacctcctaagaagaaaagccactttcttccaatccaagcccactgcagccttgtggattttccacacagcagcttttcactgtatgcctgtacttgggctgcactgagcttgtcttcaggaaaccagagcgttgctttatcatcgcacttttcatcttggtaatatcaaaacaactttttaaatgaactgattgatatatgttatttcttgcgaggttttcctctggcctttaactggcttctgaggctacagaactccaacccagagttcttcgggacctaaattttgcttaaggaaggcctttatcatgctgaaagcactcagacatgtctgtcctcacagcagaatgtagaagtcatatgaatgagggatcgtgcacggtagcgtcagcccgaattgacacgacaactctgaatgtgtggccctctatgaaagctggtgccagttttcatcactgttattaaatactagattgggaacctcattcagccgtattgcacagatgagcaattacagcagagaaaattcattagtgctcccactcatatccttatgtgtgagttggtgaaatttagcctgagcttgattcttaggtcttgagactcagtttccaacaccttcattattaatgttaagaatggccatataccacttcatttacgtaaaaggaataaaataagcaagttaagcttcagggtcctagaatttttctgatttctataatccttcagcagaatattaagaaataaagcatgatctgcaatggaaaggtttttttggcactaacttcatgcagaatttcacagacatctatgcattaatttaaattcttggtgcaaatgtgtgctttgtagttcaaccttattaaaaattcttcagccagttaggatttcaaaatacattagtgagagtaacagctagcagaataattacaatggctaaaacgtttttatagagaatcttgtttttcaaaaaagaataaaaagtttgaatagctattattaaagaaaagccatgtcttcaacatctgagtcaccaagaagtaacactttttaaacttgttagaaatccctggaggcatttcaaattcatcttctaacctacctaagcactttaaaatacagcctccttctgttcctctgttccccttcatgcctccttttgaattgatatctcagctgtcaatatttctttgacttcagcattgttattttatttctctatatcaatgtgtccttagttttcttagcctgttaatttaaaaatccagacttgggggtcattgtgttgctacccaagagaaaatgctacagttttatagattgcacatcattctttaaggcatacttttacctcaggaaacttactctagtatgttctcatatattgaattctcaactaagtaactatttctttatacctataaactagtacctaattcactgttagttaaatgagctatagataaggcagctaaatttctgaaagatagccagagtaagtaagcagccactgcaagctctgaatcagttttttaaaaaaaagaaaaaaaaaaaaaaggagctgtgccccattgaacaatgacaacatcacaaggggaagggagggattttgccaaaagttagaaaggtggagctgtaagccatgtgcttgttgcctttgacagtgacagtgcgcgtcttacaactaattccactaggcatgggaatgtcacctcctttgccactgtaccccatcaagcttactctgaatcaaaggttttgtaaaacttttgaaaatgaacttagctgcaaaatatagctaaccactttccattgcaagctttgcaaagtgaagagaggttcgtacttctcataattggtatttagcacaattgtaagatacagttttactgtttgtacatcgtttttttccattaaacttttctagagaagacaaaagcttacactggtgacatggataagtgagatggtgtctaacgagcagtgcaatattaggcggtgcaatagaggccctgttggcaagatgagttttgctggagagctggacagtgttggttagcttcctgcattgattgcccctgggcgttcttcccccttaactgtgaaagcagagtctataaatgaactctttgctcttacaaggtaatttacatattttctttctgttgaaataactgaaaatgttaaatctaccagtttatgtcttgtaaacagagtgtcatatgtatttaagttgtgtatttttataaagtaaagccaagtatcaaacaccgg

SEQ ID NO: 9694 - DNA, 228 bp, Homo sapiens
gggcacagcggggccccagggctaccctcccccaggaggtcgaccccaaagccccttgctctcccctgccctgctgccgcctcccagcctggggggtcgtggcagataatcagcctcttaaagctgcctgtagttaggaaataaaacctttcaaatttcacatccacctctgactttgaatgtaaactgtgtgaataaagtaaaaatacgtagccgtcaaataacagc

SEQ ID NO: 9695 - DNA, 1302 bp, Homo sapiens
gggacatgggggcaaactgaggtagcgacacaaagttaaacaaacaaacaaaaaacacaaaacataataaaacaccaagaacatgaggatggagagaagtatcagcacccagaagagaaaaaggaatttaaaacaaaaaccacagaggcggaaataccggagggctttgccttgcgaaaagggttggacatcatctcctgatttttcaatgttattcttcagtcctatttaaaaacaaaaccaagctcccttcccttcctcccccttcccttttttttcggtcagaccttttattttctactcttttcagaggggttttctgtttgtttgggttttgtttcttgctgtgactgaaacaagaaggttattgcagcaaaaatcagtaacaaaaaatagtaacaataccttgcagaggaaaggtgggagagaggaaaaaaggaaattctatagaaatctatatattgggttgtttttttttttgttttttgttttttttttttgggtttttttttttactatatatcttttttttgttgtctctagcctgatcagataggagcacaagcaggggacggaaagagagagacactcaggcggcagcattccctcccagccactgagctgtcgtgccagcaccattcctggtcacgcaaaacagaacccagttagcagcagggagacgagaacaccacacaagacatttttctacagtatttcaggtgcctaccacacaggaaaccttgaagaaaatcagtttctagaagccgctgttacctcttgtttacagtttatatatatatgatagatatgagatatatatataaaaggtactgttaactactgtacaacccgacttcataatggtgctttcaaacagcgagatgagtaaaaacatcagcttccacgttgccttctgcgcaaagggtttcaccaaggatggagaaagggagacagcttgcagatggcgcgttctcacggtgggctcttccccttggtttgtaacgaagtgaaggaggagaacttgggagccaggttctccctgccaaaaagggggctagatgaggtggtcgggcccgtggacagctgagagtgggattcatccagactcatgcaataaccctttgattgttttctaaaaggagactccctcggcaagatggcagagggtacggagtcttcaggcccagtttctcactttagccaattcgagggctccttgtggtgggatcagaactaatccagagtgtgggaaagtgacagtcaaaaccccacctggagcaaataaaaaaacatacaaaacgt

SEQ ID NO: 9696 - DNA, 935 bp, Homo sapiens
gagtcagggacttggctctccagcaggtcccaggaaggatggtctgggtcgtggctaaaggtctgcttgccaaggctatggcctggaggctactggctggatgcagcctgcgcatatgttttatttggcccatagagtgttttaaacatttaaaaaattagttgccagtatttaaaaatcaaaaaatttcacataaaaatctggagttttggcttctcatgaaaaaaaaaaaagctagatctggcaacagcgggctttcataacgccaacgattgctagactgggataatggcggtccctccatcgccttctgtggctggttgtgggccttagttttctgcagctctacctggcctgcttactctcccacgtgccatgcagttcctgggggttgctgtatttgtagcccctggcctgggcactcaagggcagcagataccctgtttgcctccctgagtgcagaggtcctgagcccaccctagttgggctgactcaactggaaatttggttgtgacagtggcgtggggagagggctgggtgattgtattctgtgtactgcccagcccaggcctcttcatctggggactttttggcctaaccctggaagcctggaaagttgcccacttttctctttcaggttaagccagcaatttcagggccaaccgagctgtaaacatgttagtaatgaggacaactagcatttgtacagggcttcacagtttacaaagcgctttctcatacattatcacatttgatcctcccagggccctgccaggttgttttgcatatgtgcattttaatttcaaaaagtcttccttccaagcgtgtatgatgaaatgagtaaattgattaattggcgtaacttattttgcatggatccaacctaatgttcatgcaggatagagaacatttccagaatacaaatttccaaactt

SEQ ID NO: 9697 - DNA, 309 bp, Homo sapiens
gcacagaggacgaggagcaagctggcgccgacatggcgaaggcaaggtcttcccccagaggcacattcctctccatctttccaccgcacacctggaccaggcttgcaggctgccagacgtcactccacccgccagggagaggggagccagagccggtgggaagcggggaggggctgcgtggcacagctagtgggcctccccctgcacagccctgcatgtactagcaccttcatcactcccctcagggcatggtctcatctccgcatcaggaattcacctggaggttgaaaagagaaaagaaaaagcacc

SEQ ID NO: 9698 - DNA, 2645 bp, Homo sapiens
tgagactagaaagagatacactgtaaaggagggggaagggaagggttgaccagttgggttttttgcgtccttttggaatcacagaaataaacaagtaggtttcagttgtcttcagagacaaatgttacttaatcaggaatacaaagtacagattttttacattttagaggaagagcaccttgtatagtaagtctaagtcaagcaagactttgtgaatttgtgacaagtttgcacttacaaaatcatgtaaatatgtcacattttgtttaacattatttttccaagtgtttaggtaataatgtattactttgaattcagattaatgttctactacttgtgactgagaaaagtttaatgccggcatggtaaaaggaagctgtctcccttctgacatttcctaggaagctaggaaaaggaaagtgaaggaatggtctaaagaaatgaccattcacactgattttgtctggacagtctggccgcaggttattcatagattattcagcctttgcaggacttggattcagggttttactcagtccctttaccttaggtggaatcttcttaaattgaaatttttggtaaggaattcatttcacaggtagtgtttcagactctgaaagccctgacttggttcttggcttctactgtactagttactagttactggtactgttgccaagcaatctgcttggaatttgtggatccctgctgttccctaatcccaccccctgccctgagacagtgaatgtagtccgtgaagggagtgcctctctgggaccccctgtgttgttacaggctgtgcagtgcaacaattccagcaaaaataccctatccccgcacttagtcattcgtggtaactaacaattttgaaatactcatataaaatgaacaggaaagtgttagtgattgggtgatttgagctacatcttgttgagcaaggggagtgaaaccacagaaactgttaaattgaacgtaaataactttggaaaacagttttgacactagaacaaggtcgcttctcttttcctcttctctcccaacctgttaacctagtgctagatagtcagctgctgttgcaggtagaaaagctcaccaatgccacatttgttcattctgttcaacctgttttgacctcccaggcatctgaacaggatgacatcatcttattatatcttactttacacatacgtgtatgtacacacacacacacaatacaagacatttttcctgttttagaaaatatagcccttgtttggattactgctgtctgagcactagaaatttctaatggaaagaggcctctgaatggctaagggaacatctggaaaggaaggaaaatgagccctaaaggttttttggttgcttgtttttgtttctttttctttcttgtttccttttttgtttttaaatccttctctagtgactgaagaaattgtgagtacataatatttaggtcatggttaaggaacattaaaataaacctgcagtttaacagaattttgtattaaatgggggagtgtcaatttgcatcatttgcatattgatttcaagtctcctaatttggaatgggtaaagtacaaatgttaatgcaacatagtacagttgtatttgtccttcatattcaggatgtgatatttacaaaatgcagaacagtttaaacttgttaagtcacattccagattaggagaaaatgggcaataatcatctctgttttgcccccattctactacccaccactgcccaccccacccccacatcacacactcttcgatgctttcccacagcccctgctccgctcctctccgtaagaaactcacttcactgtttttcacttttcacttctggcttttttgtggcccaaggccaatataggattaatatctgtgttccagcttcagccagaacgatatgtctgtccatctttctcctttcttccagcacacacagctaagagataagaaggctgcaaggattggggataaggagtatattttcaagccaagaaccagtagaaaacagaaataatggtgctcccaaatattcagtaccttgggcaatccaggaagggtttaaagagacctgttgctgcatagaactctccctgccctaccccttaactccaccttagtgccagggccgagggctggtctgcatgctggaagaggttgagagttttggaattgattccatgctaaatgtcagttaccagtttggattgatgaaagtgatttttctgctttacctttttcctgtcagaaaggttttcctctgtgctacccttaacttagggatgaacagactataactaggaaaggaggaaaggtatcagggatttttaagtccgtttagagagcaaaccatattgtgcctcttcatcttgacccaggctcttatagataggtcctaaacattgctgttcactagattatcttaacaaataatactcagctaaatatttgcatttaggaatactcctaaaacagatattgccaactagatacactgcctcaatcttgaccagacaagagaacagttaagttctctcagttgggtagtaacttgaataccagtctatttatcagttggtttcaacacagaggtttcaagtggaaagccattcatcttaaaagctgaacagaaaaatt

SEQ ID NO: 9699 - DNA, 2392 bp, Homo sapiens
caaccatcacgtcaggctgcccatccaatagactcctgggatggggcagccaaccctggctcatctcatctgccgcttggtgcgtgtgcgtgtgcgtgcatgtgcgtgtgcgtgtgtgcaggggtgagaatctggcagatggtgcctctgcctgctcttcttcgcctcctttatttaattcatgttatttattcgcggagctctgttcgtgttggggagatgccctcgcctgagccgtctgggcctaccgtggtcactgcgtagcctctttttcttctgacttgagagctcccccagtcagatctcaggcttgtccccctgtcagctgcctccagaagggaaggtagccagtgcctgagaagacagtcccttttctacccaccgcactccataacctccatcttctcccacactgatggcgagcagcccctgagcactttctgggactgggagactgcttggtgttccctgaggacaagagacatcctgacagtgttgggcatctgctccccgtggacacagccccactctccactttctgagcctcagacaacctcattcagcctcttgggctccttttcaaggacattaataacctcaccaacatagctcatgcccttcagctttgacaagaactcacagcttcccaaactctgctttctgcccaccttggatgggaactgtggaccaagcaattaccatcgccttggaacctgcaggaaatggaacagcaattgagacaacttgaacagtcatcaacggaagtccctccactggattcctttgtttctgtcccctccgaggagtcattttggtcgacaggctctcaaggcaactccccattttcaagaggctgctcctgcctgcttcgatcatttctccctgcagctgcctagaccccgttcacagtgggaggagtcaatgtcattctacccctcgctaaacgaagatattaacatctattgctttttcccttcatctgtcacaggaaacagaagcccaggcacaatcttttccagctttgcctgttacccctgtttctgaattgcatctttaaggtattattttgttgaaaatagatcctttattcactagttacgcaaattggttcctagggggatactccttaccttcctttgtgatggcccaaaatgtctctaggtatctcaagtgataagtaaatttctacaaaaaaaaatggttaatgttcattgactggctttttaagtgtatattttggaggacgggtgaagaggtcataacgaaagcaagcgagtgaattaggatttcaaagtgccctaatagtgtgagtctccagttcctagaatatgaagagtgctgtcgttggggtgaaaccatgagactgacagatctgcctgaaatggggggtgtgggaggtggtggcgggggttattctctttccttcaggaaatgaacccttcttacatcattcaagttctgctctgaggatcaagcttgggtctgatttaactcagcgacactgtcatttctgcttcattactggactagagggttgagccacccacttgccatttgctcctgtccttccaggaaatcacaattttcatcagagcccaagagattatttgagactcaggattcagatcagaggttcgactgtggctgggacaggagttgtgtgtagaaattcaccaggtggcctgagcgcagggggacctccagggctgcgttgagcagcctctcccactgacctctttctcgtttgtggacaaagcagcacgtatcacctcattcatcacttggacacatcgcctttgcattgtcttgtcacacctccctcacagtcttatagcacaatatacccaaatcagcccccccagtccgagggctgggcccgaggtatggtcggaggaggagctcctgcctgcggttttgtgtatgtgtgtatgtgtgtgcgtgtttgtgtgcgtgtttacctccacaggggacactctacactcagtgtaagatctgctgggaacagggccaccaggagtggctggatctcagtctctctgtctctctttctctccttttccttttggtgtatcaaatatttgattgacaaagtaagggccttgattaggaccaaattctcgtgtgttgctatggtctttatttaggacaacaattaacaatgcagtggcccattcttgtcactctacacatatgactatacgggacatatgtaatatataaatatatatataaaacattcccctctgtccccttggcttcggatggaggcctttctgttgagctgaaatgcacctgcagctgggtgctgccagcagcttgcaggccccagccctgttccaatcaatgcagttgacaataaaggaatgagtatcgtcacggagttgactgcctt

SEQ ID NO: 9700 - DNA, 614 bp, Homo sapiens
gcaggcctcatgcctcgctcagtcagtgcactaaccccagctgccggcagtgctggttctccaacagagtggtgtctagatttatcagagtaacgagaagacaaactccggcactgggtttgctccctgattaaagtgccttcagccaagaccatctctccctcctggtgaagtgtgacttcgaattagtttgcacttcctgttggaaggtagagcccactgctcattgtataagccccgaggcctagagtggcagccaagagccatctgaagccacctctctgcctgttcctcccaagaggccagggtggccaggggtggtgagggcagttctgcacccagccaaacacataacaataaaaaccaaactctgtgtcagcatctttgcccttctggtttaaacgcctccttcaaaaagcaatctggaagaaagccctgtgctttgggggagtaagaatgtgtgtgcagaattctaggcagcaccttagggagggactgggatgagagaaagtgggacctggtgggctcaaccacacacacctgtctgtgcagatgctttgcccaggcttctcaccacggtgtaccgggatattaaacctctttccccagcctgg

SEQ ID NO: 9701 - DNA, 913 bp, Homo sapiens
accacacacggacccatgttcctgcaagggagttgaggctgtgtgcttgaacccaccagatgagccctggcccaatgctctgaactcttcccgcctcccggagctcagcccttgagaaaggcaggcttatatttcccttagtgacactcatttatcttacagctcaccccttctcatttctaaagtatccagcaagaatagcaggaaaaattagctaaaggcacctaatgaataagcctgcctttgctccagaaataatcgacagatatcaaagtgcggaataattacaagtaaactttctcaaccagtttttaactacaacaatacatgttgtgaatgaatatatttgataaaaatggttttaattgacctattcagcgatttctgattatttctttttcaatagttatgaagaaaggatgacttacttgacaggaacctctgatctttcaaacattggagatgaagggcagaatttggtttgtcttttcaagtttaggaaaaggtgaagttaattggtccctctttctttaacctttaaaaaatcaatataaaatgtaagtttcttaaccatatccatgtatagaggcattgattgatatgagcacgttgtaagaataggttataaaaatttaaagtttaatataaatttatatcaattaataaagtttaatttatatttaaaaatgaatactagaagaaaatctttttgaagacaccaagatatctatctggctgaattaacttatggaattcacaagaggaagatgacaggattctgagaaatttttaaactagatacgtgaaaaaagtctgatgaatcggtctttgttaattatgcaattcatggatattttttataaaatgggacgggggcattttctgttaaaataaaaatggttatgctatcacg

SEQ ID NO: 9702 - DNA, 1017 bp, Homo sapiens
ccggcccgacacggccttcgtctggttcctcaaccctctcaagtccatcaagtacctcatctgcacccggtacaagtggctcatcatcaagatcgtgctggcgctgttggggctgctcatgttggggctcttcctctacagcctccctggctacatggtcaaaaagctccttggggcatgaaggccgccagctcccgccagccgctccccagccctgccgcatttcctttcagtggcttggactctttcccatctcccctggggagcctgaggagcccagcgtccactcttcatgccttgggccgagcctgcctcctgcttgcgggggccgcctgtcctcactgccccaggctgcggcttgcccagtcccgcccctctgacccctgcctgtgggctggggagccttggatggggtggggacctggaatgggtctctcttgccccacctggctgaggcgccacccttcttcaggcccaggctccagaggaagactcctgaaaccctccccaggtcttccaagtacaggattgaagctttagtgaaattaaccaaggaccatgggtcagtgcccagggctttaaaaagaatgaacgagcaaaaggtatccccgccgtgacccctgcagatagcaccggtctttgatccgcagcaggggccagaccctgcccacaagtcccagcgcggctgcttctgccactgctgggctccacttggctcctctcacttcccagggggtcgcctgtcctgcctgtgggtttccatggcttcccagagctccctctgccccagccagcgcctccaggcccagctgaggagctgtgagaagcagcagaggggactccccatcccgggcacaccctgtcctcccacccctgcccccttgcccttccagccctttcagctgcagctgggagctggcccgtcaagtgctgcccctgcctgtgtctgggtttctgttggctgtttttcttttcttgagtggtgatttttctctaaataaaagaagtcaagcactg

SEQ ID NO: 9703 - DNA, 157 bp, Homo sapiens
tgtagcggcaaacacctgacatggcagcctcgagggagaccacaggaatcgaaccccctccagcactggagggagctggtttgaagtatgactttgtactgggcccacactcacctctagaatattgtttattagataaaagaaaaagcttttcctt

SEQ ID NO: 9704 - DNA, 673 bp, Homo sapiens
atcttgaagatacaggtaccccacgaagtctcagtgccagaacataagccctgaagtgggcaggggaaatgtacgctgggacaaggaccatctctgtgccccctgcctggtcccagtaggtatcaggtctttctgtgcagctcagggagaccctaagttaaggggcagattaccaataaagaactgaatgaattcatccccccggccacctctctacccgtccagcctgcccagaccctctcagaggaacggggttggggaccgaaaggacagggatgccgcctgcccagtgtttctgggcctcacggtgctccggcagcagagcgcatggtgctagccatggccggctgcagaggacccagtgaggaaagctcagtctatccctgggccccaaaccctcaccggttccccctcacctggtgttcagacaccccatgctctcctgcagctcagggcaggtgaccccatccccagtaatattaatcatcactagaactttttgagagccttgtacacatcaggcatcatgctgggcattttatatatgattttatcctcacaataattctgtagccaagcagaattggttccatttgacagatgaagaaattgaggcagattgcgttaagtgctgtaccctaaggtgatatgcagctaattaaatggcagattt

SEQ ID NO: 9705 - DNA, 655 bp, Homo sapiens
cttccctgcttcctgggaatcaggagcctggacactgccatctctagagcagagtggaggcctggactccctttgctcactccattcgggtccacagctgaggttgccgctgacaagatgaatgggcactgcctgcccttctagtgaaaaggcttggctatggccctgtgtgactccaggtcccaggaaccttgccttcgtcatctgtggatccatccagaacagcggtatctgaagcccaggccatactccctgcctcctttcttctgcctaccagaggctccagagttgagcttgtccttatctagaaacatgtgaagatgcccaagagcctggaggcactgctgtccttcctgcagaaacagtttctcctcctcccctcagccttgtggccagttcctcttcacatgaagcccctggcatttgctggggaagggactggcctggtacttgctgttagggcaggaaggggcaaaaggaagacttgggtagtaatctgggggttcagatgggtagcactaagccagctggcctaaagatgcaataagttcctaggtagtctacccttaccttgaggaatgggaaaatgaacctcagcccattaggcaggaaaagttgatatttaataaacaaggaaagagtgaactgagacccc

SEQ ID NO: 9706 - DNA, 244 bp, Homo sapiens
ttccagagccacggaggccccctggaacaccccctccaaacccaaccctcccaaccaggccccagatctcggggagtccccgagacaccctgaagggctggctggccggaggtcaggtgtgttctcctgctctgaaccctgggagccccttgtggagtctgctgtctccaggctgaagaggaccaagggcaccaaggccccattcagccctccgtgtatctaataaagtctgaccctgtgaaac

SEQ ID NO: 9707 - DNA, 845 bp, Homo sapiens
tgttgactcaggaccccgcctctgtcctcactgtgccaggccatagccagaggccaccctgtagtacagggatgagtcttggtgtgttctgcagggacaggcctggatgatctagctcataccaaaggaccttgttctgagaggttcttgcctgcaggagaagctgtcacatctcaagcatgtgaggcaccgtttttctcgtcgcttgccaatctgttttttaaaggatcaggctcgtagggagcaggatcatgccagaaatagggatggaagtgcatcctctgggaaaaagataatggcttctgattcaacatagccatagtcctttgaagtaagtggctagaaacagcactctggttataattgccccagggcctgattcaggactgactctccaccataaaactggaagctgcttcccctgtagtccccatttcagtaccagttctgccagccacagtgagcccctattattactttcagattgtctgtgacactcaagcccctctcatttttatctgtctacctccattctgaagagggaggttttggtgtccctggtcctctgggaatagaagatccatttgtctttgtgtagagcaagcacgttttccacctcactgtctccatcctccacctctgagatggacacttaagagacggggcaaatgtggatccaagaaaccagggccatgaccgggtccactgtggagcagccatctatctacctgactcctgagccaggctgccgtggtgtcatttctgtcatccgtgctctgtttccttttggagtttcttctccacattatctttgttcctggggaataaaaactaccattggacct

SEQ ID NO: 9708 - DNA, 739 bp, Homo sapiens
gccatggccctgccctcaccccactgccaggccgaggctcagccccagactctcagcatctgctgccctgatcacagagacgggaccgagccaggtccataccccttcctctctccctcctaccacctgccagtttccccagcctcagccccagccccagccccagtgggcaagaccaaagtgtggcggggagtggggtgggagtcaggggaatagatgtgactagttcaggggcggggactcccaggcctcagtgtggcagggtgtgttgaaggcctgtggtgccatctccccatggttcatgtggagccacgaacatcctttccctgcagtccatttgtctgtgtggcaggctggctggctgggggcatctgcctgtctatgtgctgttggtgtgcctatgcctgggggaggtcagtaggggccccctccccacatggccctcgctctgtctatgcaggggccccaaagcccgcactttgtccgtgtgtcttagccctgtggttttgtctgtgtgtgtgtgtgtgtgtgtgtgtgtgtgtgtgtgtgtgttcttggtgctgtggcctgtgtgtctctgtgcctatgtggctgtgctatggtttctatgagtctgctccatccatgtgtctgtttgggggtctatctctccatccctctgttggtgctgtgcccttggctatccctgaaagagggaggactccgctgcagctccaccaataaacttgtgtctcactgc

SEQ ID NO: 9709 - DNA, 124 bp, Homo sapiens
tggcccggtttggggctgcgaaaacgttgacccctttcccccaccccagagttgggatgcggggcagagccaccagggcactgtctgcgtgactattttttaataaaagtactgaagacccgtt

SEQ ID NO: 9710 - DNA, 420 bp, Homo sapiens
gcctgcctcactccatcgtttccaccttgcagtgatgcagcttgaccctggaacggtcagacaacctcctcaaagtgggcataccagtttccacggggttgggttgccggtcagagcttaagaggactagcaccctgcaatgcccctcttcactctaaaatgtacactgactgctttagagcccttgataatagtcttattcccaccacatactaggcactccataaatatctgttgaaccttcatgaccttatcaactttacacccatatcccagcaaatgccactcatccccactcttcatagacacatttgttactctaaccctgcctaggcttcttgtagctccagctctttagagactcccggaaccctttatatggtgcctcagtaaatatgttattaaatatgtaatccggaa

SEQ ID NO: 9711 - DNA, 819 bp, Homo sapiens
ccttggcccacaccagatccttggagtgaagtcggtcaagaacaaatggcccctatgcacagagccataggaactgggggccttccctggacagtgatcatgccaggcctggacctttaggcctgcctccccaggactccttagatcccactctttctacagacttctgtgatcacagccccctgcgggcaggggggctctccctccaccaactctcaaggctcctcagcctaagactatggctcatgagaaacactcaggcctgacctaggcttgggagtcaaactgctcatattgagcatattgttaagtgggtaaagccaagtaaaggtactgggtgtttttgtgaccacttgtgaatgggtgtatggagaactgaaaagggtatctgcatgaaggctcctgtctgactattccaggatccaatattactgccttctgaaacttcctctttagggtaaccatcatgtatgcccacgagggtgatagtaattcgtgagactgaagttgcttagagtacttctttgaccaaggaataccacagacaccctaccgatagaacagtggctcagatcttacttgctcctgcttacgaagtattcccaatcactggtcatctgaccctacttgaacactcctgaacagtcatgttttttaaaatcttcctttatatcaagtcagagagtatacttctataaatttcactcatggatgttaggaaatctagtcatcttccctgtgattgccctgttaagtatttaaccatagctatcatgtgtttcccaaatcttctctagattaaatatcttcagttacttc

SEQ ID NO: 9712 - DNA, 46 bp, Homo sapiens
cgggggaaacacagggttaataaatgccatactccctaccctcagc

SEQ ID NO: 9713 - DNA, 307 bp, Homo sapiens
actaggtccttcttccccatgttttatacagacggaccagaagccacctttttctcccccgctggccaggggctccacacagactaacgtaggcactataaggaccagcccaaccccatgggcgggggggcccatatggaccaggggaccttgccttgactgaggcacttcacgagctcagtgagaagggccctgtattcacctccactgcccccaggggctgtggacaaaccggctgggggactgcccagcctcccacctgtttatttaacttatttcagtgctttataataaaggaaacactaac

SEQ ID NO: 9714 - DNA, 404 bp, Homo sapiens
cagtcatccagacccctgcccacctagactgttttctgagccctccggacctgagactgagttttgtctttttcctttagccttagcagtgggtatgaggtgtgcagggggagctgggtggcttcactccgcccattccaaagagggctctccctccacactgcagccgggagcctctgctgtccttcccagccgcctctgctcctcgggctcatcaccggttctgtgcctgtgctctgttgtgttggagggaaggactggcggttctggtttttactctgtgaactttatttaaggacattcttttttattggcggctccatggccctcggccgcttgcacccgctctctgttgtacactttcaatcaacactttttcagactaaaggccaaaacctaatcgt

SEQ ID NO: 9715 - DNA, 58 bp, Homo sapiens
ttggtagagctgaggaagagttagggcctctccctcattaaagttttataaataattg

SEQ ID NO: 9716 - DNA, 559 bp, Homo sapiens
gtgaagaaacacacccagaagagagatgcactaacaactggggatagggatggggtcagggggagcccaagatggtgatctgcccgagactcccagagggtaatgccactcccacaatctcaggcctggtacccatcctctttccactgtgagcagagccagaaggtaggtctgttcagagtctgtgcccctggacctggggagtggatatcagatgggatatctccttccattccccggtccaggggagagtcactagttgtaccctactccattaggtcccaaatgggggccccatttcacctgtatcaggactctgagcatccccagctgccccacatcttgcctctggccctcagagaggggtgtttctgtgggtactcctcttaccccagcaaataaaaggaattgtctgaccctagaggcagatgctgcactgcactactccaatgtcttccatggagcctcaggtgctccccctctcacctggcagccccttcagctgctagtgatatcacttgttggacatttttccaataaaggttcttggacaaactgg

SEQ ID NO: 9717 - DNA, 1324 bp, Homo sapiens
cttctaaaataacactgattaaataagaactggagcaagtactcttaagtgctacattaacctggttagaaaggctgttggattccagattgctattgtaaaatctccatcatgatgtgttggagtgaaggattagatggttttatccaacagtcctactagatatttggtaaccagcttcccttaactagctttttctttaaatactcgttaataagctattccacaaacctccagttaacctaacacatgaccctaacctagccatttaccatacatcaaactagctaaaggaaaccaacctaaggaagtgaaaacagttgtgatttatttcatctagctaaattgtatttctttatagagaaagtacctttaaggatagcattccaaatagactttgaatagcgttctgccagtttatcctcattccttttgaccaacttagcagacaaaagcagtttttacaagctctttgtgagtttgtgccagtgaccaggtagctccttctagttttctcatgagtgaaaaagcattctgataacagcaagtccagtaagtgctaggcagagtgacctttcatctgatgctaagcccctacaagtttgagaaggtaagaaaagatgaaggagacatatattaggtcagctcttacttttgaaaatgttttatttgaagaaacacctgtagcattgaggtgactgaatgcctccacttatttcaggaaaacgtatccaaaaaaagttgaaatatttggacaactttttttttaagtgccatcgatttccctagcagcattctaaaagatagcaagtaaaatgatgtttgttatcctaaatgctttagttttaggtcatttattaattttcttacaggtgcactttctagtacatgaagtatcctttgtaattaatgtgtgccatatgtttattcccatttagtataactataaattatattttaaattatatatttttaggatagttatattttttttgggttctacgacattgaagttggactagtgatttatttgaatgctgaatcctagtataggggaatataatcttatattttaacaggggtcctctatgggaaaataggatgaactttgtttcccagaaattgttaagtgatgaaaaacttcaaaataattttcctgcattttctgctttatttacatgtaaagtgaattccctgaaaattggatttaaaaagcattctccttcaatgtgcctttaccttgtagctttaacaacttttctgttaaatatgtagttttttattaaacaatgttattaaataaaaacatttatccactgatttt

SEQ ID NO: 9718 - DNA, 2673 bp, Homo sapiens
aaggaaaagagggagatgttttgtccagacctactagacccaacagaaaaggtttttgtattagaatctgtttccttaaaaattgatttgactcctgttcttaaacacaagtggtttttcctaattccagaggaactggacgtcaccaaacaaggttgcattttacttttgcatccagtttttatagttttccacaaccaagccacccttcacagataaaatatgatgctggcatggcaatcagaccaaagcactgtccccaattgttgtcttaactatgactagacatgttatacagccatttatcttgtacaactgagaagaatcatactttgacctaccttgtagagatgtgaggatttagatgtttgctaacttcaaaactgtgcttgaatagactaataatatatgctcatatcagatgtcagttttcatttaacttgattcatttttggctcaggtcattgggaacccattactaatacctaacaggaaatagctaaacacaacacaccttatctattagtcaccttcttaaaactgtttttgctacttttgaagtgtcttatttataagatcagaggtctgacaccttttttgcttagacagctctctatctcatccatttattttcttctctagacttactccatctctcctcatccttttgcctttgttatttctgctcggactcacatactttcaccatatacatattttcaattgtttctttccttttctcctttgtgagcaaagcaaacaagtactgtccaaggacagccttgtgcatatttcatttgttgcatttgcttggtcatcagaggacagcagtccattaagcacactttgctgcttctactgtaaaggcagcctttaaaacatagcaatatgcacctttcaactttacatcatgtcctgaacaacatcactgtggttactcatccatcagactatctgtatatataagtactgaatcagtatttattaagtaaatgatgtagcactgtagtgattaggaatcattagcaaatgtgttgcttcatgccttggtgatggatgccagcatgttaaactgctgaagtttgattttctgatgcaaaatatatcttgtaaaatttagaccactcctttaatgcagaccaaaataaggcacagctttaattcattattgaatgccttaaatgtcccaggtattgagaataaatgaatatgatacaaatgaggttatagtttaacatataattttaaatttgccaattgtaactctttagcacatttctctaaaccctttctgtcacagtcttttttttaatttatttatttatttatttatttttgagatggagtcttgctctgtcacccaggctggagtgcaatggtgcaatttcgactcactgcaacctctgcctcccaggttcaagcgattctcctgcctcagccacctgagtagctgggattacacgcacatgccaccacacccagctaatttttgcatttttagtagagatgaggtttcaccgtgttggccaggctggtctcaaaactcctgacctcaagtgatctgcccgcctcgggctcccaaagtgctgggattacaggcgtgagccactgcacctggcctctgttgcagtcttatcttcattttcctttgtttataatgaaagtggcgattaggcagttagtttccataaagtggccgtatgggaatttagttcattcatccagcaaacattgagtaccaattatttgctaggtcctgtgcaaggaatacaaaaatgattaagacttcttccttacccttttggagcttgaagcataaggaagacaagttattctgtaaggaagataaagcattcaaaagtactacagagaaaaaccaagtatgcttgagttttgcgaatgttctcctcttaaagaatagcttcaaattttgagaccagtggttcccactaagtatagaacattaaaattaatactttataataaaacacttttattgctgcagaatgttaaactgcataacaggcaccagatggtcaagacgagggaaatatgagaaggcaaatgatgtgaggattagtatcttgagattcacctggtctggaattatgtcataggctactatgcatcagaatcacatggagggctttctaaaacagactgctcagcccacccccagggtttctgagttcataggttataagaggtaagttgaacaattccccagatgatgctgatgctcctggtccacaatgtgagaaccactaagttggagtactgactcatagagataaaattctttgaaagaaatgtactgttttaagatactgtaaaatgtggaggcagggcaaacgtttataagggctgttatgtatgaaatgtgcctctgacccaaatccacggactttgcgaaaatcaccaaggagactttgcattaagttcagagtacaatacaaactgggcctagctctgtatttagtcagtatgtgcacgtgggaaactttagtaaaatatcacctccttattgagacaagtttggacatctggccttaagcctctgttgaacaggagaagtgaagctgtttgcaattatataattttctaatttgaaatcatgacaagcagtcttagaacaaagttaaaattaaaaagtctttatccaagtcaccaatg

SEQ ID NO: 9719 - DNA, 216 bp, Homo sapiens
ttgctattagtcccaaaataaatatacctgggaataaaatgtacttgggggtggctgctcctggctaatgcttattagaaaatgtcctcgtcccctttctttgcaaatattagttcttttacgaagtcatcctcaagcttcaatttatttataacgatgattcttttgctttccatgcatttgcacaaaacaaccagaattaaagattccacaacc

SEQ ID NO: 9720 - DNA, 375 bp, Homo sapiens
gtactccagatgacagtaactgacttgaagatggaaaaatatcaaaatagaactttatattgaaaatcactgcttccatagattggcatttttagctattactatgacttatataacttatacatataattttgaaaataacaactaaaagatgtataacatagcaaaactgcttaaacatcccattttgacacttgtcttgcagttagtttgacattttgtagttaatgattccaaattggtttagttgggccatctcattcttcacttcctgtaaaccactccatagatttgtctttcttcaagaaattagttttctttcctttatttgattgatggtcattgactactgaaataaaatatgcattttaagat

SEQ ID NO: 9721 - DNA, 3177 bp, Homo sapiens
caggctgacgagggggccacactcacgcagtcaccccagaaggccaagtgtgacagccaagtgtccagcctgacccagagatgatgggcaaaccaaactcctactgaggtgtcctggaaaggcctggaaggtgcactgcccagtgggtctgctgaattttaaacaatcgccgttttcagtcccagatcttgctctgccttggggttcaaaggttaaccagaacttttagaccccacaatgacagtatttaatgcttcaagtgctggccttaatttggggtggggtggggggtggagaatgtatagttgcatgcttgatagggttttaactgggttcattccttgagatcacttaagcctcacaacagtgaatgaagcacatagcattcttcagttttgcgcatatgaaaaccgaaggtgtggggagaggccccctcaagtgtctggctgaaggtcatacagctaagaagagaatagagcaaaattttgcacagatgagtctggtgttagaatctctctgctctttttattacattccattgcccgtaactattgcgtcactccacctgcctaaagcagacatgggtgcgcaaatggtcgcaaagcttctttgttgtaaggttaagtagcggcacagcattgacaaagtccctattgagagctttgtttagaagtgcatggctcccaaaatgagaaggctgagtgagccaggattaaaacacacagccccacccgtcctctgtcctctcctccttcccaagctcagtttcaatgctgtaaacttaaagctgacagctcacaataccagccacgctgcctctcggcctaagcatgtagcaaatgctctcactgccctacgcattacatgcttctcgacggagtagggtaaaccaagcctcccaaacaaggcagcccattctccacatgccgtgggtgctggagctcagaagatagcgtgggtgaggcatacgtactcacacgccgatctcccctcggaggcttcttggccaactttattcccaggtcatcttgcagaacttctgctggagtcgaaatcaaagtgaaaaacagttgttcatgccaaaaacctgcttctgccaatgagctagatatttgctgcagatcttggaatgcttccactggaggctgtggtgtgcgttctatttagaaaagattttgcagtaattgagtgattcaatgccggctcaatgggttggcaaaagacaagaattcttacccactggggtacagcaaagggacgatcctccagatctgctgcaaagctgatttttaaagtttggggtaattatagacctcaaacccattcttgctgggactgtgggctcaaaaacttgttaaactgggtccctagggactatagcaacctcccccagagagaggctatgactctgagtaaatgaatcccaccttgacttgtccaattattattcaaaggcacccaaagaacagctgattaaactaccaagaggggccacaacccacccctctgctggaaagggacacacccagctgtctgctcgcatttgctcctgttgccgccctcatctcagagaagtgctcaggcagtgcccaggccagccgattctagagccaagccacacccactgctgggtggacacttaggagctgcctggactgcaggcaacgcagggaagtccagccacccaggcagggcaggggccaaggtaagcacgtgaggatggaccaggttcagcaaacttgcccgacagagatctgggcattctccctaaatggttgggcagaccaaccattgggtcaccatggggtgagccttaggtaagctgggcactgagctgagtgagcaggagacacacagtgtgagcggcctttgaggtctagctcacaagtaagtggcttcaggtgggactgctcagaaagtgggccctgcctgggctcagatttaggggcaggattcctggaggtccgaggaaacgaagctgttccccagctgcagggagactggagtgggacacagtgggtgaaactggggtaccatgaggggtggaaccccaggaattatacacattttcattactggaaccgggatatgaagtggagccactccagcagtgaggggaagcaaggctgagtctccagcccaggcctccttccgtaaagggcctcatcttaaaagtccagggctgggtagaaagtggaaagggtggccgagtgccccctgctgtggccatgcaagctagcggcagcagggagccaggcagattattccaccacagaaggggtcagtatcatggagaacacgcaggaagggtccggaatgaacaacggtgctttccgtgagcatgcatggcaggaggctgtctgagactagaggttgtccctcgccaggctaggctggcaagcagcaggaagtgcccacccaccatattgcaggcagcagacgaaggggtacagggcacccgggatcctgccatcagctgtggagatgcccatgatgcctccttgtccctctggaggacctccacgtttgcttggggccaacgtgtgccaggacagggcgaggctcctgccataggtccccacacacgatgtcataaaagcccccagctgccaccagacccaggcagccgggacagtgagctggtgacaccattgtgttgcccagtaaccttaggctactggaattccaagtcagcttcccccactccagggaagatggggaggggttgccaaggtgctgggggctgggggtcaattaggtcaaaggtgaagcagtgctgagccgacataggagcaggcgggtcaaagatgtgtttttggctaccataccaactaccagacttagctcaaattacatgtgaattagactttgtacaaaaggaattaaatccacaatggaacagttttgtggcatctggtcagttttgcctcctagagaccaggtcttccacaaacttgagtctgccttggagcacgcattgctggtggcaggaggggcaaacccagctgtacagcttctcagacaagggctgctcacgcccaccatctcccttctacccaagaatggtatccttgctgggccaaatccacttcctttgcccaagggggaagggaggacagtttttctttgttctgctttttgttttaataaaaattattaagccaatgaacccaactc

SEQ ID NO: 9722 - DNA, 448 bp, Homo sapiens
gctcggtcgcacactcacttctcttccttgggatccctaagaccgtggaggagagagaggcaatggctccttcacaaaccagagaccaaatgtcacgttttgttttgtgccaacctattttgaagtaccaccaaaaaagctgtattttgaaaatgctttagaaaggttttgagcatgggttcatcctattctttcgaaagaagaaaatatcataaaaatgagtgataaatacaaggcccagatgtggttgcataaggtttttatgcatgtttgttgtatacttccttatgcttctttcaaattgtgtgtgctctgcttcaatgtagtcagaattagctgcttctatgtttcatagttggggtcatagatgtttccttgccttgttgatgtggacatgagccatttgaggggagagggaacggaaataaaggagttatttgtaatgact

SEQ ID NO: 9723 - DNA, 465 bp, Homo sapiens
gacaagctcccagtgatcactcaagaatctggctctcattctaagaggctgtgctgcccagtatggtggttgtgataaatctaaaccagccctgcatgaaacagagtccaagctgtctcccaacagcctgggttcggtccttggctggcccaggcccagttaagcctgtggccaccaagcagctcatctgagcactttgggatgtattcagcctacgttgccctggaaaaggaagcaggagatgtctccctgtgggaaaggagaagagaagttgtctctgagtcccctgtcaccagttggattcatttcttggaagagccagaatgagccactttgaccaccctcgggtgctatgggtgacacaagagctgtccactgggtgtttgcagaataattacactatcttatgtctggatcctgatgatttcacagctaaatggcaaaaataaaacatgtttcccataa

SEQ ID NO: 9724 - DNA, 433 bp, Homo sapiens
ggacccctgccagaagcagcaagggccatggggtggtgcttccctggaccagaacagactggaaactgggcagcaagcagcctgcaaccacctcagacatcctggactgggaggtggaggcagagccccccaggacaggagcaactgtctcagggaggacagaggaaaacatcacaagccaatggggctcaaagacaaatcccacatgttctcaaggccgttaagttccagtcctggccagtcattccctgattggtatctggagacagaaacctaatgggaagtgtttattgttccttttcctacaaaggaagcagtctctggaggccagaaagaaaagccttctttttcactaggccaggactacattgagagatgaagaatggaggttgtttccaaaagaaataaagagaaacttagaagttgtctctgg

SEQ ID NO: 9725 - DNA, 1636 bp, Homo sapiens
agagagagtcctcagcagagtcttcttgtgctgcctttgggcttccatggagcaggaggaacataccacagaacatggatctattaaagtcacagaatgacagacctgtgatttgtcaagatgggatttggaagacaagtgaatgcaatggaagattttgatcaaaaatgtaatttgtaaacacaatgataagcaaattcaaaactgttatgcctaaatggtgaatatgcaattaggatcattttctgtctgttttaatcatgtatctggaatagggtcgggaagggtttgtgctattccccacttactggacagcctgtataacctcaagttctgatggtgtctgtcctttgaagaggattcccacaaacctctagaagcttaaaccgaagttactttaaatcgtgtgccttcctgtgaaagcctggccttcaaaccaatgaacagcaaagcataaccttgaatctatactcaaattttgcaatgaggcagtggggtaaggttaaatcctctaaccatctttgaatcattggaaagaataaagaatgaaacaaattcaaggttaattggatctgattttgtgaagctgcataaagcaagattactctataatacaaaaatccaaccaactcaattattgagcacgtacaatgttctagatttctttcccttcctctttgaagagaatatttgtattccaaatactctttgagtatttacaaaaaagattatgtttaatctttacatttgaagccaaagtaatttccacctagaaatgatgctatcagtcctggcatggtggctcacccctataatcccagcactttgggaggctaaggcaggagaattgcttgagcccagcagtttgagaccagcctgggcaacatagagagctcctgtctttaaaaaaaatttttttaattagttggtcttgatagtgcatgcctgtagtcccaactacttgaaaggctgaggtggagagatcatttgagctcaggaggttgaggctgcagtgagctatgattgcgccactgcactcctgcctgagcgactgagcaagatcttgtctctgaagaaaaaaaaagaaataaaaatgctgctatcaaaatcaagcccaaccagaggtagaagagccaagaagcctgggttctcatcctagctctgtctcttctgtctctatctttgtgatcttggactgtcaattccccttcctgtgatccattttactgcaaacataagggttgcagtaaagggttgtctcacgtcttctgctttaaaagcctataaatatatgacctgaaaactccagttacataaaggatctgcagctatctaaggcttggttttcttactgtcatatgatacctgggtctaatgaactctgctgagatcacctcaagtttctgcggttggtaaagagaacaagggaagaacaaacatcccttttattgctccaaatggtgatttaatccctacatggtgctgggtggacaatgtgtcactgtcacatgccttcactgtataaatccaaccttctgccagagagaatctgtggttctggccatggagggaggatagtggaaatgatatagttggactggtgcttgatgtcactaataaatgaaactgtcagctg

SEQ ID NO: 9726 - DNA, 1610 bp, Homo sapiens
aggaaccaaattaaaaaggagcagagctcccacaatgctgatgaaaactgtcaagctgctgaaactgtaattttcatgatataatagtcccgtatatatgtaatagtaggtctcctggcgttctgccagctggcctggggattctgagtggtgtctgcttagagtttactcctacccttccagggacccctatcctgatccccaactgaagcttcaaaaagccacttttccaaatggcgacagttgcttcttagctattgctctgagaaagtacaaacttctcctatgtctttcaccgggcaatccaagtacatgtggcttcatacccactccctgtcaatgcaggacaactctgtaatcaagaattttttgacttgaaggcagtacttatagaccttattaaaggtatgcattttatacatgtaacagagtagcagaaatttaaactctgaagccacaaagacccagagcaaacccactcccaaatgaaaaccccagtcatggcttcctttttcttggttaattaggaaagatgagaaattattaggtagaccttgaatacaggagccctctcctcatagtgctgaaaagatactgatgcattgacctcatttcaaatttgtgcagtgtcttagttgatgagtgcctctgttttccagaagatttcacaatccccggaaaactggtatggctattcttgaaggccaggttttaataaccacaaacaaaaaggcatgaacctgggtggcttatgagagagtagagaacaacatgaccctggatggctactaagaggatagagaacagttttacaatagacattgcaaactctcatgtttttggaaactagtggcaatatccaaataatgagtagtgtaaaacaaagagaattaatgatgaggttacatgctgcttgcctccaccagatgtccacaacaatatgaagtacagcagaagccccaagcaactttcctttcctggagcttcttccttgtagttctcaggacctgttcaagaaggtgtctcctaggggcagcctgaatgcctccctcaaaggacctgcaggcagagactgaaaattgcagacagaggggcacgtctgggcagaaaacctgttttgtttggctcagacatatagttttttttttttttacaaagtttcaaaaacttaaaaatcaggagattccttcataaaactctagcattctagtttcatttaaaaagttggaggatctgaacatacagagcccacatttccacaccagaactggaactacgtagctagtaagcatttgagtttgcaaactcttgtgaaggggtcaccccagcatgagtgctgagatatggactctctaaggaaggggccgaacgcttgtaattggaatacatggaaatatttgtcttctcaggcctatgtttgcggaatgcattgtcaatatttagcaaactgttttgacaaatgagcaccagtggtactaagcacagaaactcactatataagtcacataggaaacttgaaaggtctgaggatgatgtagattactgaaaaatgcaaattgcaatcatataaataagtgtttttgttgttcattaaatacctttaaatcatg

SEQ ID NO: 9727 - DNA, 536 bp, Homo sapiens
agctctgaatcctcagggatgccacctgcacattctcatactctgtccggggtcccagcctagcctttaccacgatactggtcctggtttggggggattctgaaacctcaaactaatagaactttcttctctttttttctagtaggtgtagtccttccttaatttcaactcattaaaaaatgctttatagtttagggcagtggaaggaaggctggcatcaaaatattttgatcaaaaaagatgacaatgtaaaggctcagttgtggcagacagttttttgaaagtaacttgtaaagcatttaccatatcctaaatttgcactctttgcagacttgtgcacatatattccgctttcagaatagttttgcaaattgtacacaaacaaacaaaaaggtggaagctttttaataaagaaattgcatttataaatgatctgtattagaatataataaatctccagttatagtcaattactacccatgttgtacaacagataccttctattttagttgctaataaagggctacacaactcaa

SEQ ID NO: 9728 - DNA, 281 bp, Homo sapiens
cttaatgggaagaacagaaaaatttagttgctactgtagatttacatgattaagaggcagctttaattgccatgatcattccctctttttggatgtataagaaccttccggacaacagaacctatttctggaattgcagaagataacatatttcccttattttgatttaatcaccataaaccatacctatttaatgagtgtattctgtgcaatttttttctcagattgtctttaactttgtttttaaaatgaccttcaaaataaactgtcaaaacaccatt

SEQ ID NO: 9729 - DNA, 22 bp, Homo sapiens
ataaagtgtactcgaagccagt

SEQ ID NO: 9730 - DNA, 1114 bp, Homo sapiens
ggctaccgaaccttacattttgctagagctcaagtaatagaaacttagtttcagaatcctgaattcagcacctattttgaattaatgtgagaccacaggtggcaggcagattcctgcttggcataagcatttgtaggtcttcattcaattctgttagatttttttattggacttacataatgccgtttatttgagaaacacataacatctctcctttctatgaaaaattttttaaaaggtggttaaaattgcctttaattgcccagtagactaattccacagtcagaacatgcaaacttttttgaagaaattacttgaataagtagttttcatgttttcaatatgcagttttgaaaatgaggattcacctagacttttttagatttactactaggaaaccttcctcatatgaataaccatttatatgtgttttgcttaaagtattccaatgcctattttccaagcacagttctgccccccggttgacttttatgccacgtgtgcttcatgatggaacttttaggtcagttcctattaaatgagctcttttgcagatagcacattcagtagccttattttgttgatggaatactgtatcatatgctcaactctgaaaaccttgaacacggccaaaatccataaagattataaaagcaaactaagttgtgaagctatagtacatgtaggcatttagttaagtatagcaattcaaactgacctgcatccatccaaaacaaattcctccttcaaccttatttttacttgaaatttgctagaagaaatagcaaaccgaaatttgttttatgcatgagttaataccactggctcagcaaatacaagttagtttgctttaagcaggtaactttttttgtaatggaagaaatgcactacaaagttaagacagatttttgctaagtgcaggaggccctttattattgctgcagaaaacaaaagcctggctgagttgatgttttacattctcccttactgaaatctacatgacatgatgcttcttgctgggtttttgtacatgtaaacattgtcaagctgtgaaagaaaatggctggaggtgtgctttgtgtgaaaggtgagcaataaagtatctgttaagttc

SEQ ID NO: 9731 - DNA, 900 bp, Homo sapiens
agcagcaactttatctgcggtgggctccaagctagatttccgacagcattattctgagagctggctaccattacccttcttgctattggaaactcagcacatttgaacttgggtttgattcagtattaacagatcttgactacactaattctttatattatagaaccaacggaaatatgggcactattttgaattctagagatggtttttgttaaatctactaataaactgttctcttagtagattaagagagagtaatattaattgtgcatgtgcagttgtatttctcattaactgacagtatgcccatttgtttttatggctttcttatctaaactgcactgatgaactagattaaagccttgggagatttatactataaattcagtgatggcaagaaccaacactgtttttttgtgagaattgtcagtgtaactattacctaccagtattgttcagagagattgaaacagaataaacgggctgttcttgaagaagcaaaaccagaatatgcattactttggtttaatacttagtgctaacattgaaactgttggtggtgatggattttgtagcttgctgcttgtttcaccactggtcaaattttaaccattaaattgccattcacttttagaatcttgtatttaagttttgattttcaaatgttctgcttcatgtgtctgtgaagaattgtactttaagtgtgtgtcctctgaggtgcttgagaaagtgtacactgcagaactgcccattctcattactgtgtcctattttattcatgcctgtgtgtttttcttaagtatgaattctagatacagctacttatggattcatcaatatcatgagcacttttgctggttccagtcaaatcaatggcatttaataaattttttaagaagt

SEQ ID NO: 9732 - DNA, 1126 bp, Homo sapiens
cgcaatgcatcatcttcaccttctagctgtttataagtaatcaactgcacacaagagatacagaagacgagggcaagaatcatctcgtcctgcccttttgttctgctgaaggagcacagagaacatttgttgaagtatagttttgcaattcatatactgttttctaaaactaaggtttgttcaggttgctgcaagctcagctgaatctgtgagcctgaggtctgtttcaaatttctccccaataggcgcctttatttctgaggtggttctaattcgctaggcaggcctgagcgaatacaagtttagcttgtccctgttgagtaagtagggcatgctacaatggataatttaaaagcttgatagctgggactgaatagaagaaaacgggaaacttagaccaagttctcccctgagaaatcttgttaaaacacattaagtagtcaaaatagtaatctttatcatatctgccatattaacccctttgtgtataatgaccaggcagtgttaaactgagtttttaatttgactctcctttcagctgttcacataaagcacctggcaaagcattttacctgttagggggagaaaaatgcaataatatgttaaatatattattattcagaaatgctagacaaatagtttgcaagcagatttctatattgtattacagttttgaaaacagatttggtatcattctaaagtttagctatcaagcactcaccattgtgaagaatagttgatcgactctgcttttactaacagatttaacttattcaggtttgaaattctgtttatttttaagggtaaacagggcatatctctttaataatttctattttaaaattcactttattcatgtgacatttatagtaccagagtgattatttcataccaatgaaatcttacttttcagtgactgaaaagatagaatttatttgctaataatcatttatcaacacccacctaatcatgcttcagatgatctgtgctctttcttctttgtcacgttcaagttatctgacatctaccaagaacagttcataattattaatagcccaaagagtatggttaacttcacgcagctgcttttgcagaagcactaataaaaacaaatattttgtaccct

SEQ ID NO: 9733 - DNA, 480 bp, Homo sapiens
tttgtaatttcatttatttgtatttatgttgtcaactagcccctaattagtgatggccactgtatcattccaggctacctatgggttctgttttatttgtatattggtattatagtgcttccaagtaggttaagtgaaataatgctcacaccacttattgatttttaaggagtgattttttttatcatgtggtgaatatgttttcattttcctcctaataatgtttctcttttgttaacttatttatttttcaaacactgagccatagtcttaaatttaaatgctaaaaacaattgtatcatgtagtcgggcagcctattgatactgtcaggggaaaaaaatgggtcagaactcagcatctgtcatgaaaaaaatcaattgaaaaacaagcagattttaaattttgaagtaatcaaaataatggaaagtgtctgttttgtggtgtatatactatgaataaaatcacagcattttctaagc

SEQ ID NO: 9734 - DNA, 717 bp, Homo sapiens
agcccttctgaaaaagtatcctgcttctgatatgcagttttccttaaattatctaaaatctgctagggaatatcaatagatatttaccttttattttaatgtttcctttaattttttactatttttactaatctttctgcagaaacagaaaggttttcttctttttgcttcaaaaacattcttacattttactttttcctggctcatctctttattctttttttttttttaaagacagagtctcgctctgttgcccaggctggagtgcaatgacacagtcttggctcactgcaacttctgcctcttgggttcaagtgattctcctgcctcagcctcctgagtagctggattacaggcatgtgccacccacccaactaatttttgtgtttttaataaagacagggtttcaccatgttggccaggctggtctcaaactcctgacctcaagtaatccacctgcctcggcctcccaaagtgctgggattacagggatgagccaccgcgcccagcctcatctctttgttctaaagatggaaaaaccacccccaaattttctttttatactattaatgaatcaatcaattcatatctatttattaaatttctaccgcttttaggccaaaaaaatgtaagatcgttctctgcctcacatagcttacaagccagctggagaaatatggtactcattaaaaaaaaaaaaaaaagtgatgtacaacc

SEQ ID NO: 9735 - DNA, 113 bp, Homo sapiens
ttccagtcaattcagcaggcctagatttattttccttaataataattaagtgtaaataattaaatgataattcaatcaaataatcaaataataattaaacaatattgaaatct

SEQ ID NO: 9736 - DNA, 126 bp, Homo sapiens
gttattaatgtaaattatagattaaaattctacttacatctaatttttgctgttcaaccatgttttttgatctagctctctgattccatacattccagacttctcagtggatttgtaataaactat

SEQ ID NO: 9737 - DNA, 2673 bp, Homo sapiens
tcactgagctaacctaaataaggaaggatttcattttatggactgatattttgctgtgtaacttgttctttgtagattgtcatctgcagtgctgcaaagatatgaagaaatatgataacgaataagtgacaccagtactgtagttcataatgagtaggtacaggcgggaaactgaataataagaagtcataatggaatcaaggtgaagctttttataaacttttttagcctaagcaataactggttttgtattttttcttaatccttcactttaatacaataggctcacttaatttgtcttcccatttctctttatatatatatatataaatataaatatatgtttgtttgtttttttaatgaaaaacaagtcaagctagcatccagttactatatagcttggctaaattatacaagacttacaagattgattactcgacaggcttgtatttaagaggtaactgtgaggttaccattatgtgatgttactataaggacttttaacattggtttaacaaaccatagaggcattgaagggtttttcttagatgcctagaaaaagcgcactgggctgttttacctttcttttttaggtcaatcaagactccaaaatagtgattcctaacctttttggagttgctctgctactctgaatatgttctatacagcataaggattgtcaccttctgtgtgttgcaacagcttctaagataattagggacaaatgatgttacaaaaggaagagtactgctggtctaagtgctgagttgtatgtctttgcatagctccactctgctgctaaatatgcatgttctgactgacaccatcttgatgccagtactggattccagcattcagcaggtgcagatctcggctttacacaatttatctttacctagggttcagtcagtaatttctgctttttagcagggccagtgcagggtcagttaatgctacagttactgtatagcaaacagtatccttttttctccttcccctagcctattgggctttgcagatatctggagtgttttaaagtcaattattttaagcagtttgaggggatgtgtaggagtggagcatgaaacagtttataaggctggggctgtattatcagcacagcaaattaaagaatgaaagaagtacttctttttacatttcagctccagcagccagctatttaaaaaatatttttaaatatcttccccaaagtttaagatgtgggaccatctacttgtaagaaacagtggcttatttcttcatttctcagtaatcattgtaaacctttttttttttcttctccactctaacaaaagtaaaagaacaaaacttttgctgaggtcttggactccactacttgttagttatgttggcctggacagatggcaggtctgtcggcagttcctcagtctgtaaaatgaagattatcattcttgcctctccctttgtcacagtgttgtcgtgaagatcagatatgtatgaatgcagtcaaataaactaaaaactaggaaagtgttaactatcgttgcccaccgaatttgaggtagcaaaaaaaaaaaagaatgttctggtacatgaacagactgagaaggcctttcgacatccctgaagctagtctcctgtctagactaaaaatatccttgaaagaatagtagcaaacagtatgcagtactcctgtgttctaagttcttttatgttttagtttaccctcacagcagccatagtgttaagtcattatgagcttcatcttaaagataagaaaactgaggcaaggggagattaacttactgccaaatttcaaacagttagtagtatttgagaccagtagtatggctctaatcttacccttagccctcccaaccattatgctgtactatctacccataaatacctccaggaaacattcccctcttggtaatttgtccttctatagaagcttcaaagattaaatcaaattaattttcaaaaaaaatttttttttagaaatgttattttccctgtgatagaggatgacttcccagtttcaccaaagtctgtttatatcaacacacacaaaatggaataattctgagtcactaggcaatcaatctactgtggttttactatgtaaggtgaaaattaactggaacgatgtttgtttgctatacttacatagtcaaactttacaagccatgaaattaattgcactctttgtatttgttgttaaatgcctaagaagttttctaaaaattttgtaaaggcactgtcagagaatctggagttgaatgattattccagatactgtataacctgcataactttttgtctttaagtcgtgtttgtaaaagaagtaattgctagaaacatttgataatgtacaaagtagtctataatgactgttcagtacatttttaatatttttttggttatatccaactttttgtaaatatactggaagcttgataataaaatgtatttcctatcaccatacttttccatgtgaaaacctgagcctatttctagtataagtatccaaagaaaagtttgacctggttgtgttattttaccagaccttggtaaaagaactattttggaaacagtatttgtaaatggaactaatgctatatttaaaaacactgatttttttttaacctgccaaaaataaaaaaaagctcattttataattttctacta

SEQ ID NO: 9738 - DNA, 2223 bp, Homo sapiens
caagatgccaacttttttcctttggggtaaaaggtacaaaaacaaactaaccacagttgaagagaagggcttccggagctgtatttgcagttttgtgttgggttttctaaaataatattcttacaaagtatttttttacctgttatgccctgtttgcaaaaacaatttagaaaaaaacaacaaagcaaaacctatcttggcaaaaaaaggaagtgagtcagagcccattttcaggaggcattggtgatgttcggctcacatattgtttgcagacacacaagaaatctggcttggccaggattggcactagctatgaagggctgagcgagtcacattaaggaacttcacggaactttatagcactccgacattttctgagcaagaggaagtcaaaatttatttaacacctaagcctttttgtagactcttttctatatattgcttaggctcaccatagcgaattctccagtgttaaaacttttctgttttcacatttgaactttatgggttttggggattttcttgtagttcttatatatccctatatattatatctatattgcaaaattttgactgtcagctacatgttggtaagacacaggcaaagtattactgtaactaagttatttttaaagttaaaatatatttttacgtgcctttggctttttattgcagagtctacattttatagattctacatcagatgttgtcacttatttccattgggattccattgtaagctgtgtatgtgcgtgtttggaaaagtgtattcatacttagtttttttttcttcatctgttatcatacttttaacagcaaccaataacggattgtaaagtgtaaaggcacaggttactcatgatgcttctgcagagactgtgggctacaccacatatgttatttggaaatataggtattttagtacagtacatacttgcattacataggtacttcaagcaacacaataaaaagtaaatgataaagtgaacttgcttgtttatagtaataaacaagaccataagagaataagtatagctagagaaattgcttctctgaaatgtacatgagcccttaaggtaagagatgatttccatctactctcattttgattacttccttatggtttgagaggctagaaactgagcctctctacttttggaaaaatgaacatgtgaggtcagatttttttttttttttttaagtcagcactgatgccaccctctcagtggtcatttctgagcatcttcctgacttgaacaccttctacagcaaactcttgcaagtccagtttcatccctgtaaggcaaatgtcttttcacgcagaaagtgccatatagacgagataaaggcagctaaaacgagggcagtagagagcacttacccgaccccaaggtgccagagatgccctgaggatggtggttaaggaaacaggagcaggaaatgtacacacagattcctgtccctttgccaactactccttccccatcaaagaaaaacacttgcacacagtaactaccagctccttctctcaaacttgtatttctcctggaaatgtatctcagaaatgacctcctctcccaaccacttcaacgattctttctttgggtttggggttcttgcagttctatcatctaaaataacctttggactgcaggtaaaatgcaattaggacaactaaccaagtagacgaaacaagttcccctaggcaggggtgtccaatattttagcttccctggaccgcattggaagaattttcttgggccacatgtaaaacacactaacactaaccatagttgatgagcttaaaaaaataaaaatagaaaattgcaaaaaaaaaaaaaaaaaaaaatctcagactgttttaagaaagtttaaaaatttgtgttggacttcatgcgggccacaggttggacaagcttgccctagggcattgtgtgctttccgtaacttctcagttgtatttcgttatccatgactctccagtgttttttctgttggaccacacccgtcacagttcacagttccaaagagaaatttcccagcctattctaaatcttgttaatgacgaagagtccaatgtatctcattatttgtagccaattttagactcttttcaatacctcccccccattttaattagtattgatcatattcagtctttcattttactcttcatctgtagcgtgacctcaaggtaaagatgaaactatttcatgaaaaggg

SEQ ID NO: 9739 - DNA, 3119 bp, Homo sapiens
gaagcaagaggcaagctgaaattttagaaatattcacatcttcggagatgaggagtaaaattcagtttttttccagttcctcttttgtgctgcttctcaattagcgtttaaggtgagcataaatcaactgtccatcaggtgaggtgtgctccatacccagcggttcttcatgagtagtgggctatgcaggagcttctgggagatttttttgagtcaaagacttaaagggcccaatgaattattatatacatactgcatcttggttatttctgaaggtagcattctttggagttaaaatgcacatatagacacatacacccaaacacttacaccaaactactgaatgaagcagtattttggtaaccaggccatttttggtgggaatccaagattggtctcccatatgcagaaatagacaaaaagtatattaaacaaagtttcagagtatattgttgaagagacagagacaagtaatttcagtgtaaagtgtgtgattgaaggtgataagggaaaagataaagaccagaaattcccttttcaccttttcaggaaaataacttagactctagtatttatgggtggatttatccttttgccttctggtatacttccttacttttaaggataaatcataaagtcagttgctcaaaaagaaatcaatagttgaattagtgagtatagtggggttccatgagttatcatgaattttaaagtatgcattattaaattgtaaaactccaaggtgatgttgtacctcttttgcttgccaaagtacagaatttgaattatcagcaaagaaaaaaaaaaaagccagccaagctttaaattatgtgaccataatgtactgatttcagtaagtctcataggttaaaaaaaaaagtcaccaaatagtgtgaaatatattacttaactgtccgtaagcagtatattagtattatcttgttcaggaaaaggttgaataatatatgccttgtataatattgaaaattgaaaagtacaactaacgcaaccaagtgtgctaaaaatgagcttgattaaatcaaccacctatttttgacatggaaatgaagcagggtttcttttcttcactcaaattttggcgaatctcaaaattagatcctaagatgtgttcttatttttataacatctttattgaaattctatttataatacagaatcttgttttgaaaataacctaattaatatattaaaattccaaattcatggcatgcttaaattttaactaaattttaaagccattctgattattgagttccagttgaagttagtggaaatctgaacattctcctgtggaaggcagagaaatctaagctgtgtctgcccaatgaataatggaaaatgccatgaattacctggatgttctttttacgaggtgacaagagttggggacagaactcccattacaactgaccaagtttctcttctagatgattttttgaaagttaacattaatgcctgctttttggaaagtcagaatcagaagatagtcttggaagctgtttggaaaagacagtggagatgaggtcagttgtgttttttaagatggcaattactttggtagctgggaaagcataaagctcaaatgaaatgtatgcattcacatttagaaaagtgaattgaagtttcaagttttaaagttcattgcaattaaacttccaaagaaagttctacagtgtcctaagtgctaagtgcttattacattttattaagctttttggaatctttgtaccaaaattttaaaaaagggagtttttgatagttgtgtgtatgtgtgtgtggggtggggggatggtaagagaaaagagagaaacactgaaaagaaggaaagatggttaaacattttcccactcattctgaattaattaatttggagcacaaaattcaaagcatggacatttagaagaaagatgtttggcgtagcagagttaaatctcaaataggctattaaaaaagtctacaacatagcagatctgttttgtggtttggaatattaaaaaacttcatgtaattttattttaaaatttcatagctgtacttcttgaatataaaaaatcatgccagtatttttaaaggcattagagtcaactacacaaagcaggcttgcccagtacatttaaattttttggcacttgccattccaaaatattatgccccaccaaggctgagacagtgaatttgggctgctgtagcctatttttttagattgagaaatgtgtagctgcaaaaataatcatgaaccaatctggatgcctcattatgtcaaccaggtccagatgtgctataatctgtttttacgtatgtaggcccagtcgtcatcagatgcttgcggcaaaaggaaagctgtgtttatatggaagaaagtaaggtgcttggagtttacctggcttatttaatatgcttataacctagttaaagaaaggaaaagaaaacaaaaaacgaatgaaaataactgaatttggaggctggagtaatcagattactgctttaatcagaaaccctcattgtgtttctaccggagagagaatgtatttgctgacaaccattaaagtcagaagttttactccaggttattgcaataaagtataatgtttattaaatgcttcatttgtatgtcaaagctttgactctataagcaaattgcttttttccaaaacaaaaagatgtctcaggtttgttttgtgaattttctaaaagctttcatgtcccagaacttagcctttacctgtgaagtgttactacagccttaatattttcctagtagatctatattagatcaaatagttgcatagcagtatatgttaatttgtgtgtttttagctgtgacacaactgtgtgattaaaaggtatactttagtagacatttataactcaaggataccttcttatttaatcttttcttatttttgtactttatcatgaatgcttttagtgtgtgcataatagctacagtgcatagttgtagacaaagtacattctggggaaacaacatttatatgtagcctttactgtttgatataccaaattaaaaaaaaattgtatctcattacttatactgggacaccattaccaaaataataaaaatcactttcataatcttg

SEQ ID NO: 9740 - DNA, 501 bp, Homo sapiens
acagtatttttaacctttttctctatctgaagtgttcacacttacacatgtaggacaataagcaggaccgtctgggccggtctgcataaatgctgtatacataccagatttgatgctgcatatagggtatggaattgcacatccatctcataggaattgtaaatggtttgaataagaggaaagtaatttttgttgcattataaaatgtctagtagcatcataagtttttttgagagaagcatctttttatttcccatattcctggttattttcatcattgctttgaattgaatttttatatctatttttatatgtaactctttttttacctcatgtttttgtttgttttgcacatttctcataccacaggtattgaagcccctgggtgataatttgatggaggaaaacataaggcagtctgtaacaaactctatcaaagcaggcctgactgaccaggtgtctcatcatgccagattaaagacagactgacagttcatctcc

SEQ ID NO: 9741 - DNA, 147 bp, Homo sapiens
gaagagaagagcatgttagaatttatgttcacctttattacaatttcaaagctacacttcattaaaaaaaaatctaaaatggttgatctcatgttgccttgcttactttaagatcctgttctgtaataaacatattttgccttgagt

SEQ ID NO: 9742 - DNA, 1530 bp, Homo sapiens
agctctcaagttcaccctttagggaaaagttattttgtttacattattataagggatttgtgatgtctgtaaagtgtaacctaggaaagataattcaaccatctaatcaaaatggatctggattactatgtaaattcacagcagtaagataatataaattttgttgaatgtattaacatcatatggtctgaaaatgtgggtttttatttggcacatttaaataaaatgtttctaactagatttttgatttgtgttcaatattaacacttcttaatttgatatatttgagagtcagacattataattgttaaccttattcatacatacctacattcagaattgaaaggtgttggttaagtcttgaacatcactattctatgcataaaacttggccaggatcttaagggactttgaaaattccatcttacccttgtagctctgggtaagatgacctgagtcccttatgatacagcctgaatgcatcatgacagatccttaagttagctaatccgtttgaagttggtgttagtaggtattgtatgatcagtggtgaagcaagtaggaccactgatgtgtctaaatgagcatgacaggaactaaacgaaactgattaaatgtatgagaaatagaaacatttctggatgatctttatactaattgcagctttcaggctactaggtggcatagtgttaattaggactccccaagatatggggagttctactctcaatggtcttgtttctttgctttctacattagttaaccagttttataccaaaaaatgcatgtttgaggaattgtctgaaattgggacaaaacaccttcatgtaaaccagctttgcaaaattttccagcccagatactcttcatctattcaaatggattgtcttattctgagcaaagacctgttgttaatcttcaagctaggttttgcagttcccaaccacaacattcttctattttgccaggctggtgcaaagtaattaaagatgtcaatcagaaatgtcaatgagactaaagtggttttgtaaatctcagctatatttagcaacactccatgtagctaatattttttggtagcatctggtagaccttagaatgttacatagccagtaggttctttattcaaattttaagtatcttaagaatagtagggcagtaacagttacttttgagagttttctggtcaagcttttaccaggcattctctagccttggtacaaaaaaaaaaaaacctgctggttgcgcagatacctaggcttgtccattttatgcatttcagcaaagtcattggatactattgcaacttgggaatactggtctgcatcaagtttattcggtagtttgaccgctagtatgttggaagttatttggattgtttttggaattttgactggctgaattatggttggtataaagttatgtgtataactggcaggcttatttatctgttgcacttggttagctttaattgttctgtattatttaaagataagtttactcaacaataaatctgcagagattgaacaa

SEQ ID NO: 9743 - DNA, 567 bp, Homo sapiens
aaagcagtcttagagagtgcttgctactcacctgcttctagctcacctgggaaataacagcagaacctctacctcgaactaaagacctattggggctggccctggtggaggagcccagggcatgaagcccaaggcagctgaggcagtgtatatacccttagggccatttctaacaaagccttggccactcccagcacaatttggagtgtcaagggtgagagcctaaaacccagcttgcctgtctttgtctctgtgattgttctggagtgaattaagttcacctgataactcaaaagtgaatgtataatacaattctgttttaatctgtgtattctttttctcctactttttactggggtgagaggggcatgaagagaaatacgccttttttttttttcttttcctgtcgccaaggctcgactgagagaagtcagaacagagaaggggaaaaaaaacccaaaattatgtgaacaagcaaaattaaaatttcattttaggctattggctactgagtaaacttgacttgtgaggggtttttatttttactcattaaaagtcaacttaaaa

SEQ ID NO: 9744 - DNA, 617 bp, Homo sapiens
agtgctataaaaataattccttttttgtttttgtttgtctgcctttcaaagtgagacaaggtggacaccaagacctttcatttgtactggtgtagttgtatttgtctagcttaataaatattggtaattgatgtaataaaaccatagaactatgaaaatatcaagattattgcaaaaatcttattccaaacacacctgaatcaaatcgttacgcaactctttggctgctctgattggatatcccacccacaagatcgtatacccataatataacaacttcatataataaaatgctgattccaacaggactgagttttgccagcattgcaaaggaatccaagtgcctttctgtagcctccagatgtgcaataacggtaacttgactcttccatcttttcacccacagcaggcacctaagtctgcctttcctaggctttttctcaaaaccaagatctgccaggtacaaaggaatgaaacccagacatctgggaaccaaattctacccaatgggccaatattgcagaacagtatggtgactgttatgacaaacattaattctgcagtttatcaggtgactgtccttcacttgctttcagaaaactttgaagttaaatcgt

SEQ ID NO: 9745 - DNA, 1336 bp, Homo sapiens
gaattgttgtgctttgacagttaactctagaaagaaagaacactaccactgcaacattaatggatgcttgaagctgtacaaaagctgcagtaacctgtcttcagttactttgtaatttattgtggcatgagataagatggggaaaattttgttttaagtggtatggatatatttagcatattgaaccacacaagtgcttaattcattgttatgtaatctttgtacatataggcagtattttttctgtgaaacttcatattgctgaagacatacactaagaatttatgtagataatgtacttttatgagatgtacaagtaagtgtcttatctgtacagatgtaaatgttgatgaaaatgcaattggggttaatattttaagaattctttagtatattcttgggtgtggctatattacaaaatgggatgctggcaatgaaacaatacatttaacactattgtatttttattatatgtaatttagtaatatgaatataaatcttgtaacttttaaaattgtaatggaggctgtaatcattttataatctttttaattttaatgcaagtacactggtgtttatatttgcacaaagtattgatatgtgatgtattaagtcacaaaagtaagctgtgacattgtctataagcatttggctccacaaatgtatttggattgttttctatgtgaagcaaaccaattataattaaccacatgttgtagtaactggtctttttatatttaagcagaatcctgtaagattgcttgtctttgcttaaaaacaatacctttgaacatttttgaatcacagaatagcggtaccatgatagaatactgcaattgtggtcagaattacagtatgcacaaagaattaattagcattattaaagagtcctcactaaacatttcatatgatcacactgaagaactgtaacattccatagagtgaagtggttcaaatttctcttggaatttttacttttgttggccttattttatgatccttttcatatttcttttgacttagagtattaatacatggccaaaataatttagttactacctcatacaaacaatataatggttactacacatcacaggaacttagttttggtttaagtcatttttgattgcttttttccaatggaatatgtatataccaggttttagcaaaatgcacacttttggctctttttggtatatgttctttatattttaatgtgagtatatacactaagaacaaactaaattgtgatttatgatcttcatttattttaatgataatggttttaaaatatgttcctgattgtacatattgtaaaataaacatgttttttaac

SEQ ID NO: 9746 - DNA, 430 bp, Homo sapiens
caggcttgctgccatcagccgggttcaggcccttgtaagttagctgtacagcagaagtttgctgtctctaggattcatatagcacccacagagctccaagtaaccaaattcccccaaagacaggaggtgtggctgatgggtacacatgcttggtaagagtttctgctttatattctaaagtacttaatgtttttgagaaaaaagttatcgaatattttttagacttaagttttatcttctgtcagaatgtgaaaagttctgcccagtttctgagcaaaaacttcaatttcaaaataaaggttttcaggggttcacttaagtgtatcacaatcaacaccagacgggatattttaactatcagattttcggaaatgtaaaaacctttatgtgtaacttcttttgatattaaacttgatttttgagcctgtaa

SEQ ID NO: 9747 - DNA, 3107 bp, Homo sapiens
aggaactatcagatatagtaaatttatatatatacatatatatacataaaaattatgtataatggacagaggaaactgacatttgtcatgttcacttacctgctgatggaatccagcttcaagagcatactctgtactagggccgaagtaaaaaaccatcacctcccattcccaggggcatcatcatgttcaacaaggcatggaggcagggccatctttgcagctcagtctagaagggctgcactctctccaggttgataaatccttaaggctttgatttgttttgtttttggttttgttttcagtggagctggggaggtagttaatgtttggctttatttttgttattttgttttgttttgtttttttgggagagtcagggttgttgcttttctttgtggaaagtgaaaccatccaaatgtaaatgggttttggtaaaaatttaaatcattagtattccccctcacctcccccaatcactttaaaacttattttggattaagaaaaaatctgggcatggaagaagaaagaagcatgtcttcatcgtattaccaaagttcatgcttatctccggaatgtgagtggaggtgaagctgcctccaagaagaagcataaaagtggaatggagccaggaaatccgatggttctagaaatagtctgatatttaaacatgtgatacctggcagtctcgtttaacaggtacaaggaaaacgtgcctagattcccaggaacgtgcaaaatcctttctttcttatctctttagctctggactgtgattggcaaggtccttcttccagcattcagcccagctaagcccccaggtgccccatcccaaccctgttcctcctgtccacctgccatcccctatgcaaacagtaagaataaccccattcaaaaagcacatcatcgttttccatttgcattaacatgtgtctcagtcccatgttgccgttgcttgggattgtctgtcagttttattttcaaaggcatccatggcttgcacaatcctgttccagtcatgactgaacatttgctccttcttcatgtgccgttcggaaatgttgttgtgatacctgttacacagtgcatggtgaaaaacaaataaaacaaaacaaagagtatctgtatatagtagagtatagtacatactgttctcccatttggcaatgttgattggacattgaagacataagtgagttttcttttcacctgagttgttacttttgtgctgttattgagtttgattaattactagggataaaaggagaaaatggattattgttcacggttctgcacattcatttctaagaagcaataactgtcatgtggggagaagttaaagctattgagaggatagcaggcaaactacaaagatcttcatggaaaattagccatgtggaacacatcagaggcctctaaaaatcacccattaattcaggaaggccaaggagaaaggccttatagagacgttgatatgttggatgtgcctaggctttcagagccaccctttccacaacacccctccctgcaaagtatttatttcacatctgcactgtctggcacagatggtagatagtgctggtttgttcattttatttttttacttaaaaggctattttgagccctgtttctttcactgtccagtctagtcctctttgattatatcagtagttgctgagtaagaaagaagccagggtgaccaacgggcctttaaaagtgttgtctcctctacttatgctgaaagagaaggcaattaaataagactagtacctcccaggaggattggactgggatatttttaaccctttaaaaagaatagctgtttctatgttaaaataccaaagaacatggataaacccaacattccaaagtagtgagtccactaatgagaaaaataatagaatgactttggtcacctctcggagacttctgtgtctataaggaatcccaggctggagacattcctagccctctgtattgattcaaaaatacttaataaattaaagctgttgagacttattttttcttctgtcactcagtaaccatgatccttcctcatttaataaacatttggtgactgaatgagtaattaaatgctggttacccacttaatgtgccaggtagtatgatactttctggggactaagccatgaacaaaacagtctagatccctgccctcagaagggttacagtttatgtgattactattttcatgagtaaaagtgaagaaagccatatggaaagatttttatcttgcaagaaaaaacaattatgaaactcttttaacataaacacactgaaactgtatcaaagcaattgtccaaattgtatttatacccaagaatttctttaactaagagagcataaggcatatgtttggaaaaccaccctctttatctttgaccgacttgcagataaatatatctctccattttaaaccaagaagggcaatcatgttggtgatccagatcactgagaaagcccagtgtatcccatcttttatctttgttggcaatggaacttttctatggcccacactttacaattctttgtcattctaacccatccttcccatccttattttttttttttttgagaattgctaaatggaaagctagcctagaagcaccaagtaaatatattcaaggaatataagttgtttaaacattagaaaaatttttgcactcattttttagctgtattaggaatgtcaataatcctgtagcaaattttcacagagaactttaagaaattcttgcattggtcgatttcaatttgaaagctttttggtttgtttgctttttaaattttcatgttctaggaaactatgattctggttgttcaggattgttattattatagttgtgtaaaattattttattttgtgtgtattgtgcacagcttggggggggggcgggaaatgcactaattgtgctcttccttataaatggtacatattactgacacagacaaataaagtttctaattgtttctgatttaatcactagtgatacagcatattctgtatgaaatgttttctcctttctcattgtcatctacttcattttttgttttcatgttttgaagaaataaaaaccaaaatggta

SEQ ID NO: 9748 - DNA, 712 bp, Homo sapiens
gttaggctgcagaggactggtttgttttttggcataaaccctttgaagttcctttttcattgttaaattaaaatttttttttttacttggatggcttaacatttttgcaagaaaaataggaagatatgaagatgatgttttggtttgtttatgaaatgcatatggcttgtcagagctcattcgacagttaaagccattgtttaaagaaatggtgctttgctctgtgtttgtgctcctgatttccctggaggttctggatgaaggctgaacacaggcttgttaatgtcagtctgtgctgaggacctcagggacttgaggttgcatttttgagcatggggtgcaggagcctttctggatttggatgtggctatggaaagaacacagaagccaaggtcatgtgcatgaaatgaggagtttgagttagtcacctcggggattttttccattttgcagtaaaatgttaaattaatgtagcctgcctctatttgttgggcaggtaatttcaaagggttatttgcctcatctcctatctttagtgaaatcttatgtgtaattattccaccgtgggaacagagaatacctgtttagtgttgcactttagactggtgtctgttttgttaatgcagctgtgccacaaattctcctttatcttttaaaaatgttatagctttaaattttgatttattttgactgtggaataaatacatgaatg

SEQ ID NO: 9749 - DNA, 1915 bp, Homo sapiens
tgcattgcaaatcaattcttgcatacacttcatagaaagactttgatgctgcttcatatttatgtgtttcttgctgggtgagcactgcagtggcattgtcatcatcttggtagggtaaaaattatccttcccagccgaagggataaaacagtttacttgttatggagtaaatagaattgagactgcaaaggaagaataatgactcctagagtaaactttaggacccggttttatttagacttgttttcccgtttccttgaatgattacacatttttaaaaaatacattatttgaacattttaaaacagaaaggtactattttccaaatgtttttccatcttatgaattcagaagaagcttggaacttatagtgttttttgtttgagagtaacattttcatttctaaatgttttataatttctcatatcaatgtcagaagtatcctggaaacatatgtcacatgcgggaactgtttaacaaatactttaaaaatttggccaaaatttaaactgtataatggagctagatacaagcaagaatagtatttgaaagacttttccagcatacttctcaattctttgctttatttttgtgccaattattcaccttatcgtgccgcttcatggaagcttgagtatgttctcccttttccattttggatttatctctttactgtaatgactcaaaaggtatttaagaattgacgagagcttgtgttgtttagcatcttactggataatatttgaattcattgctgttcctaggtgataactgtcctaatatttagatgtccaaacaagaatacttccaacataaaaattataataggaataatttgagatgactcaatattacaacctcttcttctcttaacctcctcccccaaacactagaggtttaataagacttatcagatgaaaggatatttatatagccttttagtagcaaagtcatacttacgtgttgtcactggattatcataaaagggagaaattaaatattactgtactcttagttgctgtgtagctaagtcaattttaagccagtaaaagcgatggatacataatgatttgatctgatctttaactattgtgaatcacagctacaccaaaactcttcttgtaagaatactgactaatatgccatgttaatctggctagattattaggactagataatgtaaaagtgatgattgtttagtaactaaattttagcaacagaaattagaattttgctttttcaaccagttaccataaagaagttagtgtatatataaacacaaataattagtgacagattcataaaaaattgaatgttgtacacagtaattttgtcagaggtagagaagacagggattgggaagtggtgggtgatggaggacctggatatatttatcaaataaagggttaccagaagtgttcattaaaggaattttagccatcatctagttcaaacctcaactattacaggtagaaaatcagggcaggagagaatataattgtgaaggagtcagggctaacacctggatctccagaaacctagcccagcaggttaatcttcacacatctctgggttctgagaaaagcctggaaaaatcacacttctttgtcattgtcatgctgaggtaataatagcaaaactgttttctttcccttaatttcctttcctaagcttatgtaatagtttggccattaaatatcttgccctattttccctattactgctagtatgctacttcttacatacccaaaagaaattcagttatttattgtatatttattgtattctaatataattgaaataaatggcatggatttattttttcttaactatttggattaaagctttgtggttcatgcaaacaatgtgcagatgatagcacctccatattactaataaaaatatgataaccatc

SEQ ID NO: 9750 - DNA, 406 bp, Homo sapiens
gggccagctgcagggctgcagcgctgtgggggtaagggctgccgcgctctggcctggagggacaaggccagcacacggtgcctcaaccaactggacaagggatggcggcagaccaggggccaggccaaagcactggcaggactcaggtgggtggcagggagagaaacccacctaggcctctcagtgtgtccaggatggcattcccagaatgcaggggagagcaggatgccgggtggaggagacaggcaaggtgccgttggcacaccagctcagacaggggcctgcgcagctgcaggggacagacgccaatcactgtcacagcagagtcaccttagaaattggacagctgcatgttctgtgctctccagtttgtcccttccaatattaataaacttcccttttaaat

SEQ ID NO: 9751 - DNA, 347 bp, Homo sapiens
ccctcttgccatggcctgaagcagccacaggtgtgccaagcaccctcgagtgccatccctgccaaacaactctcccagcccccactacctctctgtgtactgccgctgtgtcccccacagacctgcacattgttgtcacccaccctcctgcccttctcagcccagatgccatgcccctgggcgggcagcagctccccatcttctctggcagactcagcccactgccttgccagtcttgccaggtggtctacccccggccccgctcctgcccattcctctgtccctgcagactcagtgcagcacttccacaccaagaaggccctcaataaaggcttcctgaggaacgc

SEQ ID NO: 9752 - DNA, 751 bp, Homo sapiens
ggcaagagggcgccagtgaggaggaagggaaggcggttcagagatgttggaggacacccctcgccatctcgcccttgctgggggcacgggagtggggggggtgacatgggccctaggcagactgcaagcccgaccgagcacttggactcgaactctgtgccgggaggggcccccacccctcctttttcggtttcctcttgtctttttttttttatttttattacgaagtttcattctttttgagcaaaaaagtcgaactttttctgttgaacaaaatattcacaacagggcagttgtgatacgaatagaacaaaaaaaaaaaaaaaacacttaaactttgttaggactccgatgagtttgggacttcaggaaaaatcaacccagcaccagcagctaccaaccaccattccatctcttcacttgaacagcattagttaagtccagatgtgggaacccttctcttggaagaagttcctaattgtgtctcagaccggtgtaaacaaaccagccagccgccaccttgctaaacctataagctttttaaaatccaatatattctgccaagaatatgccttgatagttagccctcagcccataggtgttttttgttttttaacagaattatatatgtctgggggtgaaaaaacccttgcattccaaaggtccatactggttacttggtttcattgccaccacttagtggatgttcagtttagaaccattttgtctgctccctctggaagccttgcgc

SEQ ID NO: 9753 - DNA, 112 bp, Homo sapiens
agaaaatctgggggattgggatgggggtatgtgtggatttttcctccactaaatctgcaggaaacatgttgaacataaattcaaaaattttatcccattcatgcctccccta

SEQ ID NO: 9754 - DNA, 643 bp, Homo sapiens
tgaaagccatggctgggaaaatggaagtgaagctgccgactgtgcatgactgctctgaacgtctgaaatgagagtgccatgtatttctttcttgacaggacatctcaagtcttttaaccattaagactccatttgtgcctcttggatccaagcaggccttgaatgcaatggaagtggtttatagtcccttgctcttacaacttgcagggacatgtggttatttggaaattgtgactgagcggacccaagaatgtaaataatattcataaacctatgggagactcgtgtgactattttttttccttgttctaggcacagaaaaaaataggtcagcttaaaaatatgtttacattggataaaggattaggcaaaaataaaatgtttcaaggattcctgaccataagtgacagagaaagagagttgtgggtttagatgaagcaaggttatcatgcagaattgggtaagaatgcttctgttcctggaagacccagagttaaatgcagatgtccacacgaggggtcggagttacctgatcacatcgagagagtgctgggcagatggatggtgagcaccactgctacagagcacccagtgattttactgaggattaaaataaaaaaccgtaggaatgggctcaacagtg

SEQ ID NO: 9755 - DNA, 851 bp, Homo sapiens
aataaccaggcgatactttgttttgtatatatttgtgattctgtgtctacatgttattttgaagtatatctgagggaaaaataaatgaaaattttctttatgtacttatgtatgtgtgatgcatgttcaaagtcttattgaccataactctgtgcacttggttattggacatttttggagtttttttctctgggaaaaatcgatagtgttttcttcaatgctgctgctgtgtgaagccatactttttcaggattcttcccctaattggctctttggtttccctgctctgtttcatttatttcattaaaatgttattcctttatttaagattcacttattagtctgctgtttctctgaaaaattttagagctaggtatagtgaccgtgaactttctaacgcataatattctgtgatacagccattccgtacatgtgtgaagtcctgcataactttcgaactttgttaaatgttggcactaggagtcatcagatctaggcttcatcattttccagtgagaagcagagacccaaagggcctgttacttgtgcttggtcaggggactgtctgtcatgcctggaggctcttcggcacacttccccatctttcccttctgccactgtggcttcaagcacctctgttcatagagcgtctctgaaattgagtctcggtcatgacttatcccgaagtagagcaatgtgtttcctctcattgtagtttcaggactttgtcagtacaagctctgccctaggcttgttactttatactcatatcctgaaaagatgtgatttcatctatgaaggggtaaaatattggtttgtatttaattgtttgaaataaaagtgatccctat

SEQ ID NO: 9756 - DNA, 2592 bp, Homo sapiens
aacactgcattcaactgggaattggaaacacactgaaatatttcatagtcttacttccaattgagttagcaaaaaaaaaattaataacttgagacttttaagttattaattttttaaaatgtgcttctccatctaaattttgcttagtctacatctcacttgcttatactattctctccattgatgcacatgcccattaacctaggaaagtaattttcaaatcatgctccttagaaggatgtggagtagagggaagggaaggattggtgatagcagagctccaggcctcccttccagtcagaacagttgagcagtttacaaattagtgtcctgcctctttgctagcaaatgcttttagacactgtggcagtgagtcatcctctaatttctatgactgcattttaagggaaaagataaaattcttccccttaaaattcgttaaagtttttgaataatctggggtcctaatgtgttctggtcatccctgattgatgctatctgaataaagttataagctcctataagccataatttacttttaaacattttatttttttcaaaacatttgagaacctttcttaaagcagttacattcaagctacagaaatatcgaagaattaatgattgttcaccaagcagcatgctgtacatgaagctattacaaatgcttacaatcccactgaaatgccagtgtcttcatctcttcataaaggtgcctaacacgaggtatacagtatgttcagtacactggaatagcatgctcgattggaaacaaagcatctatctctgaaagctgtttggcgatgaaggagattcttcgtgttgtgttcaaagatgagtccctctcccttgtccagaaaaatgccacttgtatcaactttactgcctttgtcggcagaattggtacttaaccttattctcattttagcgggaaggcccgaaatcatattatgtagatttaacagtgttgattctccaaaattcagaaccacgataaagattctgtcgatgccatccagctctcttgtgtacacaacatagtggctgtcattcctcaaatggcaaaaccagcccctgttgaggagtagctcattggcatgaagtagacttaaatcttgatataacttcaaagccgatctgggctgagtcttttggacctatttttttaaaaaagtatttacgtaagtgtttgattctaagaattgtttgtaagtatttttaatatattgtaaggagttatttacccaaaacacttgctccaattttgccccttataattgccaaattgtaagcatcaataagtaggtaagaacaatttatataaaaactgatagaaatgacaaattcggggtttcggcttgtctgggagtcaataagtacgcacagtgctctgctacattgtagagtttctgtagagatcaaatttgactccactttaggagtcccaaagcaaatgtccatgtctaagatgaatatttaacttgcatagtcattctgtgctatattgtaactgccagatggccagaaagaaggcaacagtggactcagacttctgaggaatttgggtttgttcccctttgtagactaatgtgtaggttgctgttgtgcgaagatcgtgtaactttagcagacatgtatttcttgcacagctaatagaagacaaagttgaaaaaaaggatgcaaaataaaaagctgcctaaggtgaaagttagaaattgtagacttttttttaccataatagtatgtgttcattaaagatgatttgggtttattttacagctatataaaacataatttgatgatgtacttctaacctttcaagcattttctgttattgactatataatatagcctccataaatgtttttaatgacaatattctgttgaacggttgtaccatactcagccatgccctttcattttgacgatagtgtttctaatattttgtatttttattcccctccccccatttttgtattacttaagatagattatcagaaagacagttactttgtcaaagagtatgggcacttgatacataatgccaaattattcttcataagagctgttgccaaatcagtgataatgttcatttaattgtattcttgccagccatgtttactggggtgatagttgttattgtggttgttattgttctttaggggtaggttcccaatatgtggtctttaaataattatctaatggtgtttaaaaagatgtttattctgtttgtcaggtacaaagatatttatgatacatgtatgacttgtctaagttattaacattttctctagccttaggtaatgcatgaaagcacatgtttcagtgccactcacataagaagtgcccggtaagtgttagctattattgtctacttgagttactactttctaaaagtatgttgaagtctttttctgtaattgcagatttgttgattttgcatttgagtattttctatattttgaagctgttagatgcgtagtcatgatttttggtggaatgttttatcaatttttgaaaattgcctttgtctcatataatgcttttcatattgaactatattttgtctgctattaaatacttccaagcctg

SEQ ID NO: 9757 - DNA, 961 bp, Homo sapiens
aacccatttgccttgatgagcttgccttttgtgacttgacactggggacgtggagtggcggtgtccaggggcgccccgcccctgcggccccaccaggtactgaaagacccgcaggctgagcgggtagaacagccgggtagggcagatagctgtctatgttggttcttgtttgggatttattttcaacaagttacttttaggatccttttggggctggagactgagtcttgaaccacagaagggaataaattatacaccactgtcattctctctctccctctgtctcttccttttaccctctcttgtcttgccttttccccctttcctcttcctttcccttccttctcttttcttttttctgctttctgtctttctccctctccttgtattgctttccttctagatttctagcttgccaccgttcattctctccttctgtctctccctttctctctccttctctgtttctcctctcttctctcctgccagtctcttgtactctgtgtcctggtccctccgtatgtacccctgtctttctcctcctgactggtggtctatctgcccctacctctggccctcgctttaccggagtagggggtgggagagggaagaggagagaaaatacagggactttgaacctaggccatctcctgaggccttttccctcgcccatgtgggtcagtgggagctgcaggtgtcagcttttcgtctagtaacttaagtgagagagaaagggcagcgccacagaagcccctaaacgccgcctcgtcatacgcccctcctccttctctcttggcgaggccccgccacaccgcgctcttcctcccgggactgtgactacagcgctcccggctgagcgcgccccccgagccgccgacttgccgtctccccgtaatgccctcatgtgaatgttcttcgggaaatatttctgcttttattttataataaaattagaaatcat

SEQ ID NO: 9758 - DNA, 629 bp, Homo sapiens
gtatcccacgaaggccagacgctgattttattttctcatttccacagattgacaaggataagtcagttgtttgtaaactctaggtagcagatgagaaataattcacttaatatcagaaatattttccaaacactttcctttattttttcttctgaataaatagaaaaccaacagtttgatttccttttcccttaaaggaaacaactaatacacattcttatatggctttatgtagtaatagttttctgactaaaattttgttttttattttttgtaatttatctttaactccttttgcattttgtataacagattgcttaacttctacttgccaacatctgccttgctggacttgtatgggattgtcttcttgatttgaattgtaccgtctttgttgacacagtagggctgggcagtgtttaatccttccattttatagatttttttttaatcaggccttttggacttcattcataattttgcaataatctcttttcccttgtcatgcaagccaaaaatataccagtaaaacagattctgacgtgtttgtagttatcaaatgaatggctcgaaacacttctcaaaaggatatacgtattgaccccaacaataaatgtttgtggctagtg

SEQ ID NO: 9759 - DNA, 183 bp, Homo sapiens
gcctctgggaagtgaagctagtgttgaaccactaaaccataaaagtttaagttttttggggaaaggaaactagtagtgtttcctcctctttgatgctctgatactgttctgtttttcttcacgaaataccctttggatagctaaagtgttaactttgaaataaagcccaaattaatgctcaga

SEQ ID NO: 9760 - DNA, 317 bp, Homo sapiens
gtatggcccatctcctgtacgcttggagcgacctttggctacgtggctggccttgttatttcaccactctggatatactggaatagaaagcaacttacatacaagaacaattaactggagcaaagggagatatttctttgtgcagattctgtaagggctgggcagaaatgtgtatggtcaaagccaagcagttccatttacagctctgttttttacgtagttacaacatgatgtgattgtagctttttaaactatgaaacccctgagagattgtaccttctagttgaaataaagtatttataatagattgtggcttc

SEQ ID NO: 9761 - DNA, 3588 bp, Homo sapiens
atgttatttggccatctcctggttatatacaaatgtgacccgtgataatgtgattgaacactttagtaatgcaaaataactcatttccaactactgctgcagcattttggtaaaaacctgtagcgattcgttacactggggtgagaagagataagagaaatgaaagagaagagaaatgggacatctaatagtccctaagtgctattaaataccttattggacaagggcttgcttcaagcatctgtattagtctgtattaatgctgctgataaagacgtacccgagactgggaagaaaaagaggtttacttggacttacagttccacatggctggggaggcctcagaatcatggcgggaggtgaaaggcacttcttacatggcagcaagagaaaatgaggaagaagcaaaagtggaaacccctgataagccatcagatcttgtgaaacttattcactatcacaagaatagcatgggaaagactggcccccatgattcaattacctccccttgggtctctcccacaacacgtgggaattctggtagatacaatttcaagttgagatttgggtggggacatagccaaaccatatcattctacccctggcccctccaaatctcatgtcctcactattcaaaaccaatcatgccttcctaacagtcccccaaagtcttaactcttttcagcattaacgcaaaaatccacagtccaaagtctcatctgagacaaggcaagtcccttccacctatgagcctgtaaaatcaaaagcaagctagttacttcctagataccaacaggggtacaggtattgattaaagacggctgttccaaatgggagaaattggccaaaataaaggggttacagggcccatgcaagtccgaaatccagcagggctgtcaaattttaaagttccagaataatctcctttgactccaggtctcacatccaggtcatactgatgcaagaagtgggttcccatggtcttgggcagctctgcccctgtggctttgtagggtacagcctccctcctggctgctttcacggctgttgttcagtgcctgcggcttttccaggtgcacggtgcaagctgttggtggatctaccattctggggtctggaggacggtggccctcttctcacagctccactaggcagtgccccagtagggactctgtgtgggggctcccacaccacatttcccttctgcactgccctagcagaggttctctcccctgccgctgagagggcctctcccctgcagcaaacgtttgcctgggcattgaggcatttccatacatcttctgaaaactaggcggaggtttccaaatctcaattcttgacttctgtgcacctgcaggcttaacagcacatagaagctgccaaggcttggggcttccactctgaagccacagcccgagctgtatgttggcccctttcagccatggctggagtggctgggacacaagacaccaagtccctaggctgcacacacatgtcaggggctgccctgacatggcctggagacattttccccatggtgttggggattaacattaggctccttgctacttatgcaaatttctgcagctggcttgaatttctccccagaaaatgggtttttcttttctattgcatagtcaggctgcaaatttccaaacttttatgctttgcttcccttatttataagggaatgcctttaaaagcacccaagtcacctgttgaacactttgctgcttagaaatttcttccgctagttaacctaaatcatctctctcaagttcaaagttccacaaatccctatggaaggggcaaaatgctgccagtctctttgctaaaacataacaagagtcacctttactccagttcccaacaagttcctcatcttcatctgaggccacctcagcctggactttgttgtccatattgctatcagcatttggggcaaagccattcaacaagtctgtaggaagttccaaactttcccacattttcctgttttcttctgagccctccaaactgttccagcctctgcctgttacccagttccaaagtcacttccacattttgggtatttcttcagcaggtcccaatctactggtaccaatttactgtattagtccgttttcacgctgctgataaagacatacccgagactgggaagaaaaagtggtttaattggacttaaagttccacatggctggggaggcctcagaatcatggtgggaggcaaaagacacttcttacattgtggcaagaaaaaatgaggaagaagcaaaagcagaaacccctgataaactgatcagatctcatgagacttattcactgtcacgagaatagcacgggaaagactggcccccatgattcaattacctccccctgggtctgtcccacaacacgtgggaattctgggagatacaattcaagttgagatttgtggggggacacaaccaaaccatatcagcatcctttcaagaatattagataattggagctgagtactcaggaacttgactgtagtagaatactgctagtttcttaattttaattcacatcacctgaaaagtaaaacaacaggctttgccaagtggatgcttttcagtaacagtgaagtggagtgaataccaaatgtttgccctggtggttcctatctcttcaggcaaacatggtcagtattctgtaaagttcccctggcctaaatgattacttgctctgggcaagtggatatttattaggctatttcaaagccacagcataagaatgtcagcctagccacagagtctgagattctgagttcagcctagccacagagtctaagattctgtatcctctgacattttggaaatgatacactactggcttaagtgatgactctttcagattttcagtattttatacaactactgccacatccttatactttattgcttttctgtcttcttcaacctgggagagaccctgaatttgagtgtgttctctaatcaatagtggtttagctttcttttctatttcactcgtttctagggttttttatttgcagtttaggaactattaggaatgtcaggactttatcagcaggggtaaaactaccacctggcctagcctaagtaggaagtgaaaagataattcaccaaacaatgattaatcagatagaagttctagtcaagagggatattgttgaagttacctcttttagcctagatacatggattcttttcaaatcaggaaagattagaaaaggaacccaaaaaaccctttaacagtgtgaatctttatagtatttgaaaatgagaagaagcagcagattgtaatttggtttattggatgtgatggacgttctgtaatagaaaacctgaaacgatgattgaatgggaaaaagagactacaaaatttgtcgtaggatgtatacagacttattttctttattacagtattataagaaaacatatgtatttgtaaaaatggtttcctgtgtcaagtatttgtgcagtcagagctgacttgtaaactattcttgtaatagctcattattttgaaagatttatatatgatgaattctggatatatgaccaataaaactgatgaagcaaa

SEQ ID NO: 9762 - DNA, 1478 bp, Homo sapiens
acagttaactcatgatgaatttgatgtttaaaatacgctgtgctttctggagtggagcaaggtggccacatagaaccctccagtgatcgttccccctagcaggaacaccattatccacacaattatccacacaagaaaacacctctgtaagaaccaaaaagcaagtgtgggatcgcaataccaggttttaacattgtatcaaggaaagaggcactgaagagggtagggtagaaaagacagtcttgaattactgacactaccctcccccatcccctggcagcagccacgtggcatgaagagagaatctgcccttggggaagagggaatgccgtgacggggggactttgcacgggaacaccgtgctgcctgtaacagggaaagcaacacaggacagaattcagctagtgcccatggagggagcatttagaccagcactagccagccaggaattgcccatcccagccgttcgatactgagttccagctctccctaccactgtgggctgaagtgctctgaggtcctaaataagcttgaaaggcagtctcggccacaaggactgcagttcctgggcaagttcaggtgctctgctgggctcagaggcagtggacttagggtacacaagacctagtgagacaccagctggggcagccaaaggagtgcttgtagcagccatcccccagccccaggcagcacagcttgcagcttcaagagagaggccttccttttgcttgagaggaggagaggggagagtaaagaggacttgtcttgaatctggataccagctcagccacagcagaatagggcacctcaggcagagtcctgaggcccccataccaggccctagctcccagacaacatttctagacacatctctggctggaagagaatccactgccttaaagagaaggacccagttctggcaagattcatcacctactgactaaagagcccttgggcttcgaataaacaccagcagtggccagacaacactcactgcaggccttagccagtgctgtgctgcttcaggtgtgatccagcactttcccagctacagtggtcacagagagagactcctgcttgaggaaaggagagggaggagtaaaggggattttgtcttgcagcttgggtaccagttcggccacagtgaagtggagcaccaagcaggctcctggggttcccaattccaggcattggctcctggatgtcatttctggactcccactgggccagaggggagcccactgccctgaagggagagacccaggcctggcagccttcctcacaagctgactgaagagccttgagtgaacattagtggtatccaggcagtacttgctacaggcctgagtggcatagagagattctttctgcttgaggagaggggagggacgagtggaaaaactttgtcttctggcttgggtgccagcttagctgcagtagtatagagtacccaataaattcctaagtttcctgactcc

SEQ ID NO: 9763 - DNA, 610 bp, Homo sapiens
agaccttgtacagaatgtgttaaatttcttgtacaaaattgtttatttgccttttctttgtttgtaacttatctgtaaaaggtttctccctactgtcaaaaaaatatgcatgtatagtaattaggacttcattcctccatgttttcttcccttatcttactgtcattgtcctaaaaccttattttagaaaattgatcaagtaacatgttgcatgtggcttactctggatatatctaagcccttctgcacatctaaacttagatggagttggtcaaatgagggaacatctgggttatgccttttttaaagtagttttctttaggaactgtcagcatgttgttgttgaagtgtggagttgtaactctgcgtggactatggacagtcaacaatatgtacttaaaagttgcactattgcaaaacgggtgtattatccaggtactcgtacactatttttttgtactgctggtcctgtaccagaaacattttcttttattgttacttgctttttaaactttgtttagccacttaaaatctgcttatggcacaatttgcctcaaaatccattccaagttgtatatttgttttccaataaaaaaattacaatttaccc

SEQ ID NO: 9764 - DNA, 129 bp, Homo sapiens
accgcccgtccgcccgcgccggggaccctctccaggccgcggggccgccgggcgtggtttgcttctctcagtcactgctggcgctttcttaatctttatccaataaaatgaaacaaaaaaaattttttt

SEQ ID NO: 9765 - DNA, 1196 bp, Homo sapiens
attccttccctaaagaaaaagtcctgccattgtaacatcataacttaaaacacttttttggaagaagatttaaaatatttgcccatgctacaggaagagactgtattaaaaatggatacacaaggtcagttgacactatgaagctcaagctaccaaaaagaaagtggcaatatattgactcaggatctcaaagctgggtgttttagcattactgtgtaaagacttgaagggacagaagtgaagaaaataagctgcaattttgtacagataccaacttctgaaaagctggtgtttttacaactagcattgaatgcagtccaatttgcagtagtaatcttcaatagacaagcagctttgttgctgcctttatggacatgggtaccaattgcttttgtaatatggtaaaaatgtgagctagcacttctgcgttccttttgattttttttttttaacatgtattcagattgagaaatatgattttaatgctttaatctcatgtagtttgtttttaatttcaagcaaaatcttactgtacttgaatgtgccctgttttgttagcacacctagacttgctgtaactgtactcatgtcccagtatgtacgttctttctatgaaagagaaaacactaatcttaaattatatccagcaatgtttctggtatcctttaagaaaagttaagactattatttccttcccttccctgtgcagcattcaaaatcacccctagaaaaagtgagtgttttaatgagacttcctaggaagggatgcactgtaaaacaaaagtattcttgtaactcagttttgtgaaaggtaaaaaactactatgttttaagtacactttagaaagtctcttcaaaacaaacagtcctgtatttgaactctgttcatagtttttttttgaacagtttagacaaaactgctggaaattaaaccaatttcctgcattaagctgagacaagtatatatacagccctatacagtttcatagcttttcctcccccatttatgtgtattggtgacagtgggtataaaacagcctgaaagtgtatgcatgtaccataacatctagacttaatatattgtggagtattcaataaccattatgtagaaggtagataagaattaaaagggtttaatttcctagaaagaaaatggaaaaatggtcatttttaaaaaataaagtttattagatcat

SEQ ID NO: 9766 - DNA, 297 bp, Homo sapiens
gttataaatgagtgaatctcaagtctttttccttatcaagttgaactggtttaggagattagtgcctagagttaagagacaaatgtttacaatacttttccttttgtagccactttgagtctgcagttgtcagtaagcctttttaaagatagaatttgtttacattctctggaccttttaaaattcagaatagtaatatgattataataaacttcaaagtcaagttatagaaatagatgtgagaaattgatctgtaaatatctgaaaatgtctttagtaaacgggtattgcttttgt

SEQ ID NO: 9767 - DNA, 189 bp, Homo sapiens
atgttttcatatttggctatcttttgggagggagttaggagtatgtggggtgtgtaaaagaaatttgcttattgtttaatgcccaatctttatccccctattgtatatatattcacattcttaaaataatcttgacttaaattgtcagaatgtagctttccttggtctaggtgaggacagaagccactg

SEQ ID NO: 9768 - DNA, 915 bp, Homo sapiens
ctgttacatcagtaactgcattattgaattgttcttaaacctgtaaaaaaaaattacctgtaccagtaattttaacataaagggttggatttaggaaattatttatttttaggtacattaggcaagagacctctacctagtagaaagtgtagtctatgaccactgccacactaaaaactatttgtcattgttacatggcataaatactgaagttgagagtgtttagaaatttttatagaaattttgacacagtaattttgtttgatgaatcttttaaaaaactgaggaggtattttgcatatcttttttttcattttcgtaatttgtattgcattctataaaaatattagttcataacagatcagaaatttaaaataactggcctttttcctcaggtagtttgaaaaacacactctagagatgcactgtccaatccggtagccactagccacatgtggctaaattaaaattaaataaaatgagaaatgtagtttctcagttgcactagccacgtttcaagttctcaatggctacgtgtgactagtgcttaccatactggacagcacagacacagaatattttcatcaccacagaaagttctatctgttctattatagagacttttatctatgccctatctggattctacttatttataatttaaggtaaacatctgaaagcacatttcagcctatttgcttagtgaaacattaagctgtagactgtaaactcctcgtgagtaggaaccctgtctcagtgcattttgttttcctgcttcctacctcaagatcttggcaatggtacactacaaatgtgctgagttagaattactctgaagttatgaaacatataatgaaaacaattttttctagagcttatatttttatttgaatgaaataaaatgtttaaatattt

SEQ ID NO: 9769 - DNA, 219 bp, Homo sapiens
aacacaatgtgaaaatgtatctgagtattgaatgataattcagtcttgcctttgaagggtatgtcacaaagagctgacagtgcttctacacatttcatctaatttaatattcctggcatacctttaaggtaaattggtcaggaactattaattccatgtgatacattaggaagctgaattattagtaacaacaataataattaaagaatgcaatactgt

SEQ ID NO: 9770 - DNA, 1594 bp, Homo sapiens
tcccaagatcttaaatggacacttgtatagaaatagtcttcattttatctgagacataatataaacttatttactttcctttttatgaagcacatacaaaagaagacagggaatgcaatcaggaaggaaagactttttaaaaaataaaaacaagtatctcatgctcttgtttctcaaaaaagaaaaacaaaaaacaaaaaacaggggccaataaattccctaacatccacagtgttttcatttactctgcttgtctttatgttgctggaacatttctaaaagacagtgatgaccgcacgcattcataaagcaaaggagtactacagcatcaaggcacaacacaaaaaccaacacaaaacataacacaaaaaagaagctacctatgatcctggatttagccaaagtgctagcgctttcctgagaagtcagtccaattgccagagaagactgtccttttgagtgactcaacctgcaaacctttaagagtttgccgcctggtgcaactggagcagtggttggaacttgcatttgaaacaaagtgctggcttttttgaagacttgtgtaggaacacattcaaaaagcccctttctggttgtgagagaggaaaaaaaagtatggaggccttattttcaaaaatgtgaaatataaggcacgttttcacacaaaatttcaaaacaaaaacaagagggcatagatgcaatcattgggaaattttcatgcacgcttattatgttattacatatgtttatataaaatccatctctgtgtgctttctggactgtgataagtgacgttttatagcctgttgtatagaaaatgcaaaatatatctctgctcttcagccatttttggtaaattcaatgttataagtgttgctaagtatagggagttttatgacatcagagcaacaattatttcagttgggtttttctttttttttgccaccattataaattgccacaattacttttattttttaaagaaattacagtgtagtgtttattctaaggaagatatgtatgaatgtatatacaaagactcagctacttcttttcttatatgtacagccttcattctgttgcaattaagttttagtacttgtatgaaaggtgtgaattagaaagtcacatatatacatatgtatcttataatcttttctccctgaaatactcacattcccacatacattcactattttcacacacacacacacacacacacacacacacacacacacacacacacgaatccacagcaatccatcagatatgctggaagatccaaacgtgcatacagtagcaaatatttattgacaaattgaaaagcaggaaggaagagggttgtgccaaggtattgatgacaaatggggtgatttgcttcattgagatcttgctcccaggtaaccttaagaagattttagtccctaaagaaatgaacctttccttatcaaatagaatatcactgatatactgctgcatgaataagaaccattatgtgggcaggttatggaagcaaaattggttaatctacaccttaactctggctgctgcaattgaaaactttctttctaataaaataatatatatatctctg

SEQ ID NO: 9771 - DNA, 522 bp, Homo sapiens
atcagtgaaactacttaacacagctaatttttttctctgaaaaatcatcgagacaaaagagccacagagtacaagtttttatgattttatagtcaaaagatgattattgattgtgagataggttaggttttggggggccagtagttcagtgagaatgtttatgtttacaactagccttcccagtaaaaaaaaaaaaaaaaaaaaaaaaaattgtaaacatcacttatattactttattgcagcttcatcaccagtacattatatgttgtaatatttatttacctgatcattttgatcattttctgctttattttgctaataaactgtgatgttacttctagtgctaaacatggcatatttccacctatgattcgtgtttacctggtattaggagctcagaatggaatgcataaagcttcactggaagtgtatacaactgtggtgtagaatctgttattattatcattattattttatttagacttgactatctcttatgtttattaaagaacatgttttcct

SEQ ID NO: 9772 - DNA, 221 bp, Homo sapiens
agtcatggaggctataggatcttatgtaaacagtttttgtttctgatagtaatggactttattctaacttgagatcagtggcggatcaaaacctacaagattcaactgaaaagttggcagttatggttttctttcatctgatgtgtcagtatctgttgatttgctttgtagtttgttgacatcttaagatttgatgtgaaagttttagattttttaccctg

SEQ ID NO: 9773 - DNA, 1140 bp, Homo sapiens
atgactagtcctcacttcaggctcttttcatcaaaaattccacaccctcaggtaccatctgtggtggctctctgcaagttttaaaactgcctctgctgagctctcatcattttggtggtttctgtgttagatctcgttagtctgcattccacagcttctcagttgccatttgatttcccaacttgtccggaagtgtttccagaatactgatcactttttttttttgaggcatctgacaaagtcacaaagtctcagactagaaataattacccagtatgatcatggcatccaagaccagagtctcagaactcattaagaaacagtttacttggaatggagaatacccatctgtaatacaggtcctgtcatttcattcatctcaaattattttgaattcttcccaaatggctgctggatttaggtggtaataggggctgtgggccataaatctgaagccttgagaaccttgggtctggagagccatgaagagggaaggaaaagagggcaagtcctgaacctaaccaatgacctgatggattgctcgaccaagacacagaagtgaagtctgtgtctgtgcacttcccacagactggagtttttggtgctgaatagagccagttgctaaaaaattgggggtttggtgaagaaatctgattgttgtgtgtattcaatgtgtgattttaaaaataaacagcaacaacaataaaaaccctgactggctgttttttccctgtattctttacaactattttttgaccctctgaaaattattatacttcacctaaatggaagactgctgtgtttgtggaaattttgtaattttttaatttattttattctctctccctttttattttgcctgcagaatcgttgagagactaataaggcttaatatttaattgatttgtttaatatgttatataaatgtaaaagagtgtataaactgtagagatagcattggcaagacattgtacagatgcaaccttttacacaacatcattgtgtaatttgtaaagattcacgtgtagttctttattatagtgattttgggctttgtacccactgaatgccattttttgtgtttttaaattattttctttatcttgttacaaaaactgagatgtggggtttttttttttt

SEQ ID NO: 9774 - DNA, 1741 bp, Homo sapiens
cctttgcctttggaattactcctgcagaaggttgcctgccaccaccagctggacctgagcttgggcaacagcattaggtatgccctttactttttttgttctgactttcctgtaccctctgtttaaactttccgttctctcaacctgaagattgagaccttggtggctgtgctgctcccctttcacctggtcgtcttgctattctgcattaacatcacatgctcccagccgatgggtcacatccttctaagcgaagcgaatgatgctgtaggttacactgtatttacctttgtttggactcggtttgttcccaggacctctggtctggctcctcctacttggatttctagctgtgtctaagaacctattcagctcaccctgctctgcatctgacagtacaggtgcatggcctgtggacaattgctgggcattaatgaagtcaagggagaacagcagggggcaagttggtctgtgtgaattatgggaccccattacttttcctgagactggtcacctattgctgcctgctactggctattcccaagtactgctacttgggcagctccctgctgagtgaacatatcccagaccattgccagctccactctctggtttctaataaacagggatctccagaacactggtggtggacacagctttcctgtcagcacacaaaagacctgttcctcttccaaaagacctctctttaccaccaccaccctcatcactcagaaaccctactgtttgttagacaggtggttgaggggacatgtcagaccctatcctcatggcaaggttaatatgttggtgttcttgacaagtaccaggctttctcagccacaaccagtggattcattcaaaatctaggtacctttatttgcctcccttcctgaacctaatgaagtgccagagtgagtgtacactttcttttctctcatctctcataaatctcttctgtcttcctttaaaaaaaacaaaagtagtagttcagaaacatccgcagaagcaggctttttagtttcttggctctctttgtcatgtccagaggcaggctgttctgtaaaatagactgccagacctcttattgcccattctcctttcttctcagcccctcacccctctttagcaattcctagagggtttaaaggactacagagctgtatggaatgaaaggtgatttctagttcagagtggatagaagaactaaagagattgtgatgggtgctctaggcagggaaaactgaacaaaaaggcagaaatgattcaggggaaaatcgggcctagaatttacactgggttgactagttatgatgggaagagaagtacttttttttagtatgcacgtagaagaatagaagatggttggagtgttaaatatgttccctagagaagggttctttgaagaaacactgcaattttgggtgttctctttcttgtttgcatatggccttacttatgtggaagattaatactgtgttataatattttctctttctgtttactgggaagattcagctgtacagattttcttttactttcaaatagaaatatttggaataatatcagtctttcttttttgtacattatgtggatatggatattcatggcagttttcagcctgttcttgtttctgttaaaaccgtatctttaacattttaatttgaataacttggtcttatctgatgcggaagactggaaactattgtgttcatgggtaaataaactacaaaatatttatggc

SEQ ID NO: 9775 - DNA, 963 bp, Homo sapiens
aaacgcccaaaataattagtaggagttcatctttaaaggggatattcatttgattatacgggggagggtcagggaagaacgaaccttgacgttgcagtgcagtttcacagatcgttgttagatctttatttttagccatgcactgttgtgaggaaaaattacctgtcttgactgccatgtgttcatcatcttaagtattgtaagctgctatgtatggatttaaaccgtaatcatatctttttcctatctatctgaggcactggtggaataaaaaacctgtatattttactttgttgcagatagtcttgccgcatcttggcaagttgcagagatggtggagctagaaaaaaaaaaaaaaaagcccttttcagtttgtgcactgtgtatggtccgtgtagattgatgcagattttctgaaatgaaatgtttgtttagacgagatcataccggtaaagcaggaatgacaaagcttgcttttctggtatgttctaggtgtattgtgacttttactgttatattaattgccaatataagtaaatatagattatatatgtatagtgtttcacaaagcttagacctttaccttccagccaccccacagtgcttgatatttcagagtcagtcattggttatacatgtgtagttccaaagcacataagctagaagaagaaatatttctaggagcactaccatctgttttcaacatgaaatgccacacacatagaactccaacatcaatttcattgcacagactgactgtagttaattttgtcacagaatctatggactgaatctaatgcttccaaaaatgttgtttgtttgcaaatatcaaacattgttatgcaagaaattattaattacaaaatgaagatttataccattgtggtttaagctgtactgaactaaatctgtggaatgcattgtgaactgtaaaagcaaagtatcaataaagcttatagactt

SEQ ID NO: 9776 - DNA, 141 bp, Homo sapiens
ttctatatcttaaccagctgagggagcttgtacaacaccttatgtatgctggttgggaaaaactgattttaacgtaactaacttataaataaatctagagtaagaagatctcagaaataaatcacacttttgttatgatga

SEQ ID NO: 9777 - DNA, 26 bp, Homo sapiens
aattacattaaaaatgtaaataactc

SEQ ID NO: 9778 - DNA, 3321 bp, Homo sapiens
agagaaaagtgtccttcagtttctcagtatgaagcctttatttctgaagtaacaagacacctagcaactataggaatcatttttaaaaatctttaaggagacttttaacagtccttcgtgaatagagcaggcaagaaatacaaaccttcattccttgaatcaaggagcactactggattcaactgccaaaattttttaaaggttttaggacttactataccttgtactgttaagatctactgaataaaggacgttctctcactaaggaccaggtgttttaaggttaagtgtttaaagaagtactccaagaacaatctgcttttttcatcatttgttttatgaatttatccatgtttgcttaatgcttctgctaagtgttagccaaaatctagccatttatatttagttgtgtaaacctaaattaaatgctgtagtattttgtggaatgtactatatagcaagatacagagaaaattgttttggcatgtcagagccttatttggttagcagactgcatgtgttgatactttttttttcttaaagccaattattttgatgcaaaagaaattcagtttataagataaatctgaaaaatccataatgaaataggagttataaaaaatttatagtgatattaatctttccatatttcccattaagcaacactaagcattcataagttaacccatggtaaagagtgtttttctgaaacttttttttagtaagatggtttttcagcaaatggcattcccaagataaagctgttgtgctttaactcatttcttttctttggtattgggttatgtatgcgtgtgcatttttttaacttgagagctgactgttgcttaagaagttttcttatggcaaaaataatgtaaataagttactatgatctgcattttgccagaaactcatttataattaaggctatcatttattaatgatttttttctcctttatgatattacattaaagttgataactgttattggtacttttgaaatatttgtatgcatttgttacctttaaacatttggaagaagcacaaaaaaatagatttagttaacccagggaaacatcaatttttttagtagttccaattttatatcacagttttattttcttatgaaatcaaaaaatgcattgatactcattaatgcaaattcattatttaacatcaatatcagagtaatcttcaaggtctgaaatgagaaacatactgactttttaaaattttaacagtgtacttcttaggctttcattaccagctctgaagaactttttggaataattccatattccatagtgtgtggtttatgagttgtgggtttcatcactaacccagtaaccataagaaaagtctctctctctctctctctctctctctctttctctctccctctttctctctctctttcgtaggccagtagcaatgttgtgttcacagtctaatttccaaaagaccatcaataaaaaagagagcatgtttaaattgaaatggaacttagagaacttgagcttacttacgtacttcaatgccaccggtaacttaggttttaccaccaaatgctgttaacgttaaatcattttgaaaatcttggatgaaaggtgctatgtaaatggaaatacaaaggattcttactaacatacaaaaataatgcacaacagaaatatctaaaaccttttccgtagactttgaaacatctctctctctcataactccctggattcaagtagcacattggtaataggtatcagagcagtctagagacaattgcatgtcaaaaaatgtacattcatttttaggtggataaaagtaaacatagaaattatgttatggctaaatacagttagtgggtaacttagatttatattagctagcatctaatttgcacaactagaacacatcccagaacaattactgaaaagctgaaatttaatgggtggtgatgtagcccaatgagggcgaatgacattacagcttgacctctccagaacactaatatcctaaaatacagaacatgctgggttaagtgcattagtgcttcaagcagaaaatgctgaaaacaacgtgtaaagtactgaatctgagtaggctgaccctgagaagggacaattaaagagacaaccaagggaacacattgagactacaaaaatatgaataatctcaattatattcatcacacttttttcataccatttcaagaaacgactagacagtagtaaccacatgaatattttactttctccagtataccttgagaagcaaactttgtaggaagccactcttctcccctaaacaacttctgccaaacaataataaagccaactggaaacgaatcggagccattttcattttcctaaccggggcctgacatgctttaaattatctggctgtattctaaatcaacacctaacccctcaaggaaactgaagaatcaatatacagggtaatagctttggctcagagctccaataatgtgcttcagatctgtccatgtggaaatgctttcatccaaatttttaaattggtggttaccaaagagttcacaaaacaggtttgtatgtagcacctttcatgcaaggcatgcaaaaagcctattttaaaatcactgtgcatattatagagttgtagccacctcacaatgaagtactacagcctgtgctgtcttaatggtttatgtcaggaaatgaaaaagatactgtaccaaatctggaattacaatggggagtaataatgtatactaaatgacttttgtattttaagttactttttgtgagtggtgaatttttgtgtttttcttttcagctacacttagtcctgagatgtattttttctttaagtcttgaatgaatacaaaaggagcccattttataatataaaccttgatgtacatgttgagatatttggacaatgaaaatgccttaaaaggaatgcatatggataaagttgcacttataacacccttcaacaaaatctaattttaaattgtctttttcttttctattaagggttttctttttcagtgtctaccattgtacttataactgttattaaataccaaatcaaataatataaaagctgtaacatttcctttaaaactaatgctaataagggatttagagttgaatggcaaaatgtttattacttggcaatacctgatgtcagtcacaggcatccaactcatgacaagagataccactgtttgttttttaaaaaacatttttcattttgtttctccttcaaaaattaagttggactaacattcacgtatcaaactaatataaaaagaaataaaaccaagaggtgatttttgtaac

SEQ ID NO: 9779 - DNA, 1532 bp, Homo sapiens
aatatttattaggggaccctcaacatgtggtcttacaatgctgcaactgttcagtgagctgaaaatctgaatcagaaagctttctcaattgaacttataaaatatacaaggagtagcaaaagacagtatatcagctaagagagtttagttctaataaaaatcaggcttcccaggaacttgattgcttgctagtaattaaggggtttgccttttaggctgtcaaaacaaacattagtaaccagaacctgggagacagcttctcagcaaggaaaagtcacaggtttggggacggtttaggggaggggaaaaggttgatataataatgcagggttgctcctcggggtgtcgatctagaaacaattttacagaacttcagttgtaaactcaataacattacttgtataatggtgctggccatgttgttgttttaatcagttgcctctttttaaaagaaatttttatggaaaacacattcaactatcattaaaaaaatgaagttaagctgttgggaccatttctttaagatttaacaaaagttcagccttttaggtagttgaagggaagtacaccccgtattcagcacatgttgagttttctacaccaggaattttcaatatgtatattgatgaaaacaagctcaattcaaactggacagttttaagataatgttaaaatcagcacttttagagacaacgaaggccaagaatcagtacagtagtattccaaaatgattttctctagaaatttgaaagtagatcgaacagaatgttgtcaaccgcctaccagtacaatcttttgtggaagatactttgaaatcactttctactttgttagtaaagttctgtctttccagagctgcaagttttaaagtgttacttatacagaccaaccaagaatagtgctgaattaagtggcatttagtatctagaagccattttgatccaagaagctacttaagtgtcaaagtcagcatgcagcacatgtagcttttctgtaaacaagggtgtgatatgaaagctgcttttttaagaagagtaaaagcacattccatatacgtaagtgaattttaaaaataaattgaggcaaacagttaagttttatttttagagcaacaagttaactgtaaatattttaatgttagtttgctcatctatgatctgagatcatgccgaagtgagaaaaatctccccaaaatacaatttaatgcattgggaaaaaaaaactttaacagtaattccagccacaatctttagatcacccttgtaatgtgttacgggtccatttttcctggaatcgtttaatctaaagcagtttcccctgttttggagattttgtagttaattttaattttggctattgtttggaaaagatgagctgtctgtgtagatatgaagtatagttttttccataaaacagatgtttattttgtattaaaaaataccactgtacttgttttacaccatttgtatacatgtggtgatattaatgctaaactgtaaaattcaggaattaaaatgtgaccctgtaattcc

SEQ ID NO: 9780 - DNA, 905 bp, Homo sapiens
tttttttttttaaagagaattctagaattctattttgtctagggtgatgtgctgtagagcaacattttagtagtatcttccattgtgtagatttctatataatataaatacattttaattatttgtactaaaatgctcatttacatgtgccatttttttaattcgagtaacccatatttgtttaattgtatttacattataaatcaagaaatatttattattaaaagtaagtcatttatacatcttagaaaaaattacatagttttgtttttacaattctgaaatatatgaaaaacttagatagaatatgtcatatgttattataacagatctcttcctacatcttatttttcttctttgtatacagtagtgacagtttaccttcagtcatcctacaggtcacctctgtgcccaacaactttacttgcctacaacggttcacaaactggaacaggccatattcaaagccagtgcctatttcttcagaactgttaacagatatagtgagttgagggagctaatctgatacacttttgataatataatgcctttcaaattagttaccaaatcataaacagagtggaataaatataaatgagattctaactaggatgaatgtggtagtaatgatgtatatttttcaaatttacctaaacagaaagattattggctaaggcaggcggatcatgagatcaggagatcgagaccatcctggctaacacggtgaaaccccgtctctactaaaagtgcaaaaattagccgggcgtggtggcgcatgcctgtaatcctagctactcaggaggctgaggcagaagaatcacttcaacccaggaggtggaggttgtagtgagccgagattgcgccattgcactccagctcaggcaacaagagcaaaactccgtctc

SEQ ID NO: 9781 - DNA, 1105 bp, Homo sapiens
tcttttctaagagtcaaccacaggcatttaagtcagccaaagaatattgttaccttaaagcactattttatttatagatatatctagtgcatctacatctctatactgtacactcacccataattcaaacaattacaccatggtataaagtgggcatttaatatgtaaagattcaaagtttgtctttattactatatgtaaattagacattaatccactaaactggtcttcttcaagagagctaagtatacactatctggtgaaacttggattctttcctataaaagtgggaccaagcaatgatgatcttctgtggtgcttaaggaaacttactagagctccactaacagtctcataaggaggcagccatcataaccattgaatagcatgcaagggtaagaatgagtttttaactgctttgtaagaaaatggaaaaggtcaataaagatatatttctttagaaaatggggatctgccatatttgtgttggtttttattttcatatccagcctaaaggtggttgtttattatatagtaataaatcattgctgtacaatatgctggtttctgtagggtatttttaattttgtcagaaattttagattgtgaatattttgtaaaaaacagtaagcaaaattttccagaattcccaaaatgaaccagatatcccctagaaaattatactattgagaaatctatggggaggatatgagaaaataaattccttctaaaccacattggaactgacctgaagaagcaaactcggaaaatataataacatccctgaattcaggacttccacaagatgcagaacaaaatggataaaaggtatttcactggagaagttttaatttctaagtaaaatttaaatcctaacacttcactaatttataactaaaatttctcatcttcgtacttgatgctcacagaggaagaaaatgatgatggtttttattcctggcatccagagtgacagtgaacttaagcaaattaccctcctacccaattctatggaatattttatacgtctccttgtttaaaatgtcactgctttactttgatgtatcatatttttaaataaaaataaatattcctttagaagatc

SEQ ID NO: 9782 - DNA, 520 bp, Homo sapiens
aataagaatacaacatttcggtgaagagctggaaacttaaaaaattatcaaaaggaattttggtatcatcttcagagaaaaaataaagcaagaaatactaacatcaaaaggacaggtatgatgatgcgataataataaacatctgcgtttgtctcttcactaagagtaaactgggaaattgtaggccaaagtccagttgaactttctaagtctgtgatccccgtgctgactgtggaagtgtatttataccaagatggagatcttgacttcttgaatatatctggactggtaaaatcttgatgaggctcataaaatgagtttgggaattgtgtatagctgattttttgtgggaaactgtttacttcattcaaaggttcttgagactcttgatatttctgtcttctccttgtgctttcctatggaaaaaatacatatatagtttagtttgttagacgtgagttatccaagtatttattttgtgtagtgtgtaagaatgctaaataaaatgttatacaagatc

SEQ ID NO: 9783 - DNA, 3210 bp, Homo sapiens
aggtatattaatacccctccctcactcccacctgacaccccctttttcaccactccccttccccatcgccctccagccccactccctgtaggatttttttctagtcccatgtgatttaaacaaacaaacaaacaaacagaagtaacgaagctaagaatatgagagtgcttgtcaccagcacacctgttttttttctttttctttttcttttttctttttccttttttttttttttcctttatgttctcaccgtttgaatgcatgatctgtatggggcaatactattgcattttacgcaaactttgagcctttctcttgtgcaataatttacatgttgtgtatgtttttttttaaacttagacagcatgtatggtatgttatggctattttaaattgtccctaattcgttgctgagcaaacatgttgctgtttccagttccgttctgagagaaaaagagagagagagagaaaaagaccatgctgcatacattctgtaatacatatcatgtacagttttattttataacgtgaggaggaaaaacagtctttggattaaccctctatagacagaatagatagcactgaaaaaaaatctctatgagctaaatgtctgtctctaaagggttaaatgtatcaattggaaaggaagaaaaaaggccttgaattgacaaattaacagaaaaacagaacaagtttattctatcatttggttttaaaatatgagtgccttggatctattaaaaccacatcgatggttctttctacttgttataaacttgtagcttaattcagcattgggtgaggtaataaaccttaggaactagcatataattctatattgtatttctcacaacaatggctacctaaaaagatgacccattatgtcctagttaatcatcatttttcctttagtttaattttataaacaaaactgattataccagtataaaagctactttgctcctggtgagagcttaaaagaaatgggctgttttgcccaaagttttattttttttaaacaatgattaaattgaatgtgtaatgtgcaaaagccctggaacgcaattaaatacactagtaaggagttcattttatgaagatatttgctttaataatgtctttttaaaaatactggcaccaaaagaaatagatccagatctacttggttgtcaagtggacaatcaaatgataaactttaagaccttgtataccatattgaaaggaagaggctgacaataaggtttgacagaggggaacagaagaaaataatatgatttattagcacaacgtggtactatttgccatttaaaactagaacaggtatataagctaatattgatacaatgatgattaactatgaattcttaagacttgcatttaaatgtgacattcttaaaaaaagaagagaaagaattttaagagtagcagtatatatgtctgtgctccctaaaagttgtacttcatttcttttccatacactgtgtgctatttgtgttaacatggaagaggattcattgtttttatttttatttttttaattttttcttttttattaagctagcatctgccccagttggtgttcaaatagcacttgactctgcctgtgatatctgtatcttttctctaatcagagatacagaggttgagtataaaataaacctgctcagataggacaattaagtgcactgtacaattttcccagtttacaggtctatacttaagggaaaagttgcaagaatgctgaaaaaaaattgaacacaatctcattgaggagcattttttaaaaactaaaaaaaaaaaaactttgccagccatttacttgactattgagcttacttacttggacgcaacattgcaagcgctgtgaatggaaacagaatacacttaacatagaaatgaatgattgctttcgcttctacagtgcaaggatttttttgtacaaaacttttttaaatataaatgttaagaaaaattttttttaaaaaacacttcattatgtttaggggggaactgcattttagggttccattgtcttggtggtgttacaagacttgttatccatttaaaaatggtagtggaaattctatgccttggatacacaccgctcttcaggttgtaaaaaaaaaaaacatacattggggaaaggtttaagattatatagtacttaaatataggaaaatgcacactcatgttgattcctatgctaaaatacatttatggtcttttttctgtatttctagaatggtatttgaattaaatgttcatctagtgttaggcactatagtatttatattgaagcttgtatttttaactgttgcttgttctcttaaaaggtatcaatgtaccttttttggtagtggaaaaaaaaaagacaggctgccacagtatatttttttaatttggcaggataatatagtgcaaattatttgtatgcttcaaaaaaaaaaaaaagagagaaacaaaaaagtgtgacattacagatgagaagccatataatggcggtttgggggagcctgctagaatgtcacatggatggctgtcataggggttgtacatatccttttttgttcctttttcctgctgccatactgtatgcagtactgcaagctaataacgttggtttgttatgtagtgtgctttttgtccctttccttctatcaccctacattccagcatcttaccttcatatgcagtaaaagaaagaaagaaaaaaaaaggaaaaaaaaaaaaaaaccaatgttttgcagtttttttcattgccaaaaactaaatggtgctttatatttagattggaaagaatttcatatgcaaagcatattaaagagaaagcccgctttagtcaatacttttttgtaaatggcaatgcagaatattttgttattggccttttctattcctgtaatgaaagctgtttgtcgtaacttgaaattttatcttttactatgggagtcactatttattattgcttatgtgccctgttcaaaacagaggcacttaatttgatcttttatttttctttgtttttatttttttttttatttagatgaccaaaggtcattacaacctggctttttattgtatttgtttctggtctttgttaagttctattggaaaaaccactgtctgtgtttttttggcagttgtctgcattaacctgttcatacacccattttgtccctttattgaaaaaataaaaaaaattaaagtaca

SEQ ID NO: 9784 - DNA, 1408 bp, Homo sapiens
gaaaatttgaagcccccaggggtggggtggacgcgtgccgcccagtcgacgtcagcgtggtctgtcatcctgctagtttgtgatgttttctgacagtagcctccaagaagccgttgtgcgaagacagagtcctgcagagtccttccagcctaggcctgcagcgccattttatttatattttttaataaaaagtaaaaacaaaaaaacagacccacattggaacagtgaatcagtcccatagagagggcccgtggaccatcgctgtcatgagtgatgccctggcccttctgaaaccagccaacctaattacctgtattgtggaaatgcgcatgagtccccaaccccttgtttctatacattctatgttgtcttttaaaaagtgtgcttaacattgacacaataaatgttggagctttaggtggtgtttgcttgttctttaatttttaatgcttataagacaatgaggctgcttatgattttgtacttctgtacctgtttcctacagacacccatcgggtgggtaggaggaacagatttgagaaatgggcaggagatgtaggaggggaactaggttaccgcttatcagatggcataaattttcaaggagaatcaaaatgcaaaacttgggaataaatcatagcaatatcataattaatgtagtagtaatattgctgtttattaatgctgaagtgtggttttcctaactgtctgacttataatttgcataccattaaataatgcataatatggcacgccgaatcctgtttttcaaatatatgcttttggtggctaccatgcaggatttgaatttgtcttttaatttagcttaggaaagaacatcactgggcgagcggtaaatcctaaagaaggtgataaatgtcagtagtttcttattaaatattctaattttaggttcccaaaccttcaggaaatatatcttaatgcagacaaacaaacataaaacttctttagtacttacatcaggaaatttggggcagattttagaggggggaaattataggaggaaagaagttcacatcagaacagacaatcacagcaatgctctattccttagaaattagtgccacaaataagttacatctacaaacaggtggtaaaaattctttctggcccagttaatttgcacagaacttttctcagtttggtattttttactgcttggagatccagaagagaattagaaacaacatagcaaattaaaataggtttgtcaataatagagctcagacacctgtgtgctgtagattcacatacaggccgtgaacctaagtggggaaaatcctacctatccaccttctggctagattacctagcttagtgaaaagatagccaaataattggcatgtgaattatttcctgcttattcataataaataatgactgtcta

SEQ ID NO: 9785 - DNA, 426 bp, Homo sapiens
ctttcaaatttggagacaaagagtatggttttcctggcatgatgtggacatccatggagcacatgccgtaaaatggctgtttacccaccataacggtgtcttgaaaactatttggatcatgttgatctatataattgttaatttgttgtaacatctcaggatctatatatgtgtatattttgtgttaaattgttccaaggatgtcttaggatttttctcattccctctttcacccccacaaaccaaactatgaataatgaaataattctccttaattctttcatttagagaggtgcacaaacaggacacattctctgttaacctaagaagctgtaatttcagcaagatttccctccacaagagatataccacctttaaaatcatgttctaatttttgtaaattatctgaataaaagttatatctag

SEQ ID NO: 9786 - DNA, 646 bp, Homo sapiens
cattaggtgtagcatgtctacttttaagtccctcacccccaacccccatgctgtttgtataagttttgcttatttgtttttgtgcttcagtttgtccagtgctctctgcttgaatggcaagatagatttataggcttaattcttggtcaggcagaactccagatgaaaaaaacttgcatcttcagtatacttcctaaagggcaatcagataatggatatgttttatgtaattaagagttcactttagtggctttcatttaatatggctgtctgggaagaacagggttgcctagccctgtacaatgtaatttaaacttacagcatttttactgtgtatgatatggtgtcctctgtgccagttttgtaccttatagaggcagattgcctccgatcgctgtggttcttattatcaaaattaagtttacttgtatacggaacaaccacaagaaatttgattctgtaaagaatcctctttagctgtggcctggcagtatataaatggtgctttatttaacagaatacctgtggaggaaataaagcacacttgatgtaaaaataattgttttatttttattgacatgactgattgattgattgctattctgtgcacttaattaaactgattgtgatgacttttcatttgttt

SEQ ID NO: 9787 - DNA, 72 bp, Homo sapiens
atcatcaaggtctcctctctatgcccttgctgttgtttgcagcgtcagggtgtcagcagccgcatttgtgtt

SEQ ID NO: 9788 - DNA, 885 bp, Homo sapiens
aatccaaattcatgctgttttttttctctgcaactcgttagcagaggaaaacagcatgtgggtatttgtcgaccaaaatgatgccaatttgtaaattaaaatgtcacctagtggccctttttcttatgtgtttttttgtataagaaattttctgtgaaatatccttccattgtttaagcttttgttttggtcatctttatttagtttgcatgaagttgaaaattaaggcatttttaaaaattttacttcatgcccatttttgtggctgggctggggggaggaggcaaattcgatttgaacatatacttgtaattctaatgcaaaattatacaatttttcctgtaaacaataccaatttttaattagggagcattttccttctagtctatttcagcctagaagaaaagataatgagtaaaacaaattgcgttgtttaaaggattatagtgctgcattgtctgaagttagcacctcttggactgaatcgtttgtctagactacatgtattacaaagtctctttggcaagattgcagcaagatcatgtgcatatcatcccattgtaaagcgacttcaaaaatatgggaacacagttagttatttttacacagttctttttgtttttgtgtgtgtgtgctgtcgcttgtcgacaacagctttttgttttcctcaatgaggagtgttgctcatttgtgagccttcattaactcgaagtgaaatggttaaaaatatttatcctgttagaataggctgcatctttttaacaactcattaaaaaacaaaacaactctggcttttgagatgacttatactaatttacattgtttaccaagctgtagtgctttaagaacactacttaaaaagcaaaataaacttggtttacattt

SEQ ID NO: 9789 - DNA, 565 bp, Homo sapiens
tctggataactgactagcaccattatgatcaccagtattgtggctggaatggaagaagatcaccttggtgttccttgtttggaagattatttcctctgaatttctgggcttggtcttccagttggcatttgcctgaagttgtattgaaacaatttaatgaaaatattaaatatttggtttcaaaaggcagatttatcttctcccaacattctgttatttctgatacttttgaaaaactaataaaaactaataaaagaagcgtaaaaagtgagtttacatgttgaggaaaaaaatggcccaatatgctcatcactgataaatgctccctggccttaaaaactaccaacatataatatatatgctgtcttaaaagttaatgatccaagtggcacctctctgaacctactttggcttgggaggctgcccagttaaaacaaaaataagttaatggtacagaaagagaatgaaaaatgaaagcctccttttatcctatcatcctaattccttttcccagtaataatgactgctgtgttggattccttctgcaaataaaagtgtatacata

SEQ ID NO: 9790 - DNA, 574 bp, Homo sapiens
tccagtgttgttgagtgaaaatctgacagatcattctagagactgtaagagttaggaaaatatcagagctctgagaaaagggacaaagcaagtgttttgaattgtatatgctctcactctgaaattccaaggttgggggcaatgatgaaactttgtacagtatatgaaacagtatattaaccctaaaacctagatgttgtccacctgatgccaaatttcttaattttttttgatgttgttgtctttttcaggagtgtagaaatctatgtattggtggttgtcatttgccagctctctcgtagcatttctggttagaatctttaactagagatgtatacatttctttaaaacttgttggttatccatgtcttgtctgtacatatgaccatgtttcttgacatggaaataccagtcagtgttcctatgtatttgtctatatttgtaaaccaagagaccggctgggtgtggtggctcacgcctgtaatcccagcactttgggaggccgaggtgggcagatcatgaggtcagaagatcgagaccatcctggctaacacggtgaaacccagcctctact

SEQ ID NO: 9791 - DNA, 604 bp, Homo sapiens
acattaagaaaaaaagaaaactgccttcttcatatctaaacttttcatggcctgatacagacttaaaatcccccgtgtggatttttaacaagagacagtatgaatcatataaattagttaagagttttgagttgagtgtttgttttcaaaataaagttttattatttcaaaaacatgcagcataacagcaaagtgatcgtaagtaaaagtcttcaacctacttattttcaataatgtaaaattttgaaagtgtcttaaattgtatgttaattaggtgctacaaaaatagaatatttaaactttgttctcccaggtactttaaaaaaggggcagtagggggcaggcatagtgctcatgcctgtagtcccagtgctttaggaggccaaggctgaaggatcacttgagcccaggagttcaagactagcctgtgcaacatagtgaaacgctgtctctagaaaaaattttaaaaattagccaggcatggtggtacatgcttgtgaagctgaggcagaagaattgcttgagcccaggagttcaaggctacagtgagctgtgatcgcgccactgcactctaacctgggcaacagagagtgaccctgtctcc

SEQ ID NO: 9792 - DNA, 896 bp, Homo sapiens
tgtcatcctggaaaactgggtagttcatctgaccatgggatgtgtttgttatgaagaaaatctggatgcctgtgattcgagaattgaacctgaaacccaaagtgaactggggtgggggaagggaaaaaggaaagtatcaagtgttgggaaactggattcagtgggatctacaaggaatgtcatttttgtgcatcctacagtgaggagtaactgatcaggtgtctataacatttttcattctctctggaaacagactcaggtttctttggaccaaatccaaaagaacacatagctgtaacacagctgtagttgactagaatgctctgtatactttatattaaaaaatgctttgcatttcttccagtgcaatgaaattcatatggtgtcccaccttatttaatgatggtacaatttaaaatcttagtcaacttctgtagaaagttttctctatgaaagtaaagctgtttgaaaaattattatttttttacagatctttctataaaaaataaacatcttttgattgcttggatttaggaattcaatttttgtttcagtgaccaatgtcaagttgcaggctttgtgtgttgcatatttaatatttctactaccaccgtatgtcaactgggtaaagccttccagagctctctaaatacctgaaagacttaagcctttttttaagtaattaatacttaaaaaaaaagatcctggcatctatttatgcaactaaatacttttcagaaatggtatataaaaggctacagtttaatatctgtatttttataaaagtatgatgaagggtttggggtgtttttatttgtagcagaggtaagaatatgtattcatataatctgcctacttttgagttctcatattaacatttagataacatatgaagt

SEQ ID NO: 9793 - DNA, 1840 bp, Homo sapiens
cagaccattgtcttgcaggactacattataaatttataagctaagtgagttgggttttcgaacctgttgtccacgtcacagtttttctgctctggtcatttgcattaagatgaagaattttttaaaacatttataataaatagtagcaatttctgagcaaaaatctgggaaactcaagcaaaggaatttctgaaagtatcagtcttctgaattctgagttttgaaaatatattttgaggagaaaaagacatagtctaatttgatgccttccttttagtgtttttgaatcacctatcctcagtgctgaaattgttttgtataactgagggtactgttggttcaaactatgttagtttacagtttgttgcaaacattgtaaaatacagcgacatgtatattaacttttttctatttatctttattatagaaaataccttagaatgttcttgatagagtagcatggtaacgatggtgtcacacccttggtgtgaatggtagcttagtgagcaacctagctcaaggatttgcaaagttaggaagaaggacgagagagcctctctccccaccccaatctaaatatggaatttggtaaattagaatactttgtaatttgtaagaccaaattcatactaattacccgcgtgaaaggtgtttgtttttaacaacattgaagataatcaggaaagattttttcttaatgtttctctcgagcgtagtactataacaaaaacttaatgctaagaaacattttatatgctcctttggatatgcaatttaatctagattatctatttttctcccatgataactaatctgtttttagtatcagcagcatttggcaagtttattttttggatataaactgtggttcatctgttcactgtttctagaaaaaaatcattgccataagaaaaagtataaattagcaagaaaggagagtgacttgatttgcttttggaaaaagaaatgcttaattaattattctgtatttggccttattcgggcattaggaaatctagagatctaaagggttgaatgacaatagtgcccccgtttttagcagaccagccttaactctgggtttgaatcctaaggagattgccacagtgagacttaaggaaatgtttggttggcagatgagcaccaatgactgcagcgtggagtgacgcactgcatggtctgtttattctctaattccaatatgtcttttgcttccagaagcaagaaaagtttcttctctcccctccttcccacccttttttcaaaggcaccacaagtatagacagttgcactacatcaaatctttttttgacacttgtagaaaccagtacacttttagattagacagtatcttcttttaatattttgatttgttttcctttagtttgaaaagttgtataatacttaactgactgtagcaaagttttatatgtggtagcatacctttaatttatcctattacaaaactgttctgaattttcttttggtttttaaaaaacaaaacttgttgcttagaagccatgaattattttattttacttcaactgtcgaaacttccttgttttaaaaaatgatcatttgggttcactcaggaaatgcatgtcaggaaacttgtattataagtttattagttgtgatgtatcagtaactgctgttacccctttttcaaagaaatgtaattgattttgaagttttctagattgtcacatgctttgtgactaatgcaagaaagcaagtcctgtgttgtatttgttctagtcatttttattcaggctatatattgtagcttaatttttatttgcaattaatttatttaaactaagtaaatacttttcaaaat

SEQ ID NO: 9794 - DNA, 4305 bp, Homo sapiens
gacccagggacccagcgactatgcccacccagaccccagagcgttcccataaccctgacagttctccacactgtgcatgcacccttgcttgcctttttcagagaaaaagaaaattttacaacaggatcacactagtttttgctttgagcagagttggagtgccttcatccaagtatgaccacttttaatacacttttttgagtggttcctcagagacctactaccctggtataggaaagaatccatttgaagacaatgttgcaatgttgaatgacaaaaataaacagttcaagtgaagcacaaggattaagttggaaaagctgtaaattgcatgtgcatatttgtctattttttctataagttttattgcaagaggtaaagaagaaaactatatatatatatcttatttagataatctcagtaccttttctggcatttttgccctgtataggttgacttggcaattcggcctttttagaggcattaactactcctcgtaagtgttgcatttacatggctgtttagaaaactgctgcccaaatttattttatatttttgtacagattctgcagtttatgatattgtttttctaaaaacaaatgctgtttatacatatgagatagctattttgataggatttgctcacatagttcctgcaaacttcagatgtacaagttgcacttgtacttttatagagttgtaatgttttatatgtgtatggtgcaagagaaaattggatcaaatcaatctgcagttgatgtccccaaatgcaaacacaggcacacacatgcacacacccataaacacacacacagtgctttaagaaagggccaggtgatatcacacccaaatttcacaagcactgaccccctggcaccaacacccgccagtactgtgacttccaaagccagagccacatgtgctcatcaaacttgcattaagcagttggcgggagatggctgtggagctgggggtttaagtgatggttctcttttgctccctcttttgagggtaaagctactgtctttcttaagagtgtatttatgccaagtttgcgcttttaattgtttttattttgttttttaatgaaaacccagatctttcctttttggcataatttttatgatgacctgaaattttacatccgaacaaaattttacatccgaaaagcaaccaacttcttcatggaactcagccctgttgcaatgcttagggcccttaaagaagaaaatctccccagaaggcatccatcatgttgcttaattgtcttctgcagcttcctttccctagagctttccctgtgttgctaagagctgaaaatggcatcttcgtgatcaccacagtgagcttggctcgcctcggccggcccgggatgcactcttacaacatgtgtgactcttgaacctggagttcatcacattacgtcacagcttcccatctggttgctttcctgagtcagctacttcacacttgtcaaggctgttttaccccaaaactcagacaggactttctatgcatgttttccctcctccccccaattcccccccccatcaccttatctcccaggacacacttgagaagtagctttttattcctagtggtgtacatttaattttaaaaaggttgcaatgtatcatgcttgttgccgaaactgtttatggccttcttgtttcagttttttcttttcttccaatggtactttagctgttgagtgcaggttacaacctatattgttatgcagatggcttctttaggaataacttttatatttatttaaaaatttttaaattatgggatgttttgttgttgttgttgtctttgttgttggtcatttgtcaatattcagtcaccaattctgctcacttcttgccatggataaaattgggtctttctggctaattaaaaaagacaactttataaaatggcactttaagcaagccatagttagttttatttttgtaatgcacatggcaaagcaaagacgtttgtgatgaaggaactgctcatctaagcaaaagatttgagtatgatatgataaaggctttctacattctaatttactttttccccccacttgaatgtgttttaaaggctaattatcagctcagtagagcagtgagaaactgatcaaattgcacttgttctcctacaagcaacctccacgcagacacctcgtactgctacaggtgtgtcatttcctttaataggaccagggaccatgtaactgaggtgagggttgtagtagatgcttccagtgtcagtatgcctgttaattttaagagcttccctttcttgcagagaacaagtctgcccagattccatgctttctataactggaggacctggcaaacctgccgcatgctgcacacatctacctacgtacacatatacaatagtattgatgattctgaacaataacagggtaaaacagttggtttgccattgttaaaaactgatttacagtaacttacaacaactgtacttttgttggattagcaaatcatgtgtttaaacaaatcccatatgttgggcaacagttcaaataagcacggagaagtgttgcccaaacttggttctctgactcttatgtatttgtaaggctgggcttcaaaatcaaaacaaaaaccccaaaaacagcaggcaaatgctttttaactctgacaccgttgccataaatccctgatactcaaagtctaacaagaaagacatggaaaattagcagcccattttcagaaagatcaaaatgatctagggttctaattgcttttgcatcctattcttacaaagtgatgtcccaacagggaacagtaggagctggagtgggatctccaagtcccagtttgagtgtgggatgtgcttccagcagtgccttccctttatgaaagacatcacatggcatccagggccaggcaggcagcttgaggtgcctttacgagaaaaccgagctggggctgggagaggacagttattgacactgatgtgcaatgaagtgacaagatgagagcagaatcgtaagagctttgaatttgaagtgagtttttttccccccataagttatttattccttttttctgtgtaaatatatttattttactgtggagcgctaacatctggatcgtaacatgtgcagaatgtatggtaggaatgtattctcttgtaggaatgtaaatctgtattaaaagggggtccaagccaggcccccaggtcttctcattgtatgcacagtccgcattcatttttactcttctctaatatgggtctatttgaaatatgcaaaaggtatgaggaatgttttaatacctccaaatttttaagaaaagcatcaaagggttgatattttttaaagtttttttagtagcactttctctggatgacagaaggagcaaccacatgggcacccttgttcataccaaagggtgagcagtggccagagcctcctctgcacctctcgagtgtctttaccaattgagctttttatcgccatagccccttggagtgccccagctgccctgaggtcaatcaaggaaaatttcttaatgaaataagctccaaagagccaaagtatcaacttacagatcgtttttaaagcttaaatttatgaaccacctttgtggtaaacaatgaattatgaataccgcagggcagccttcttaaatgacaaatgtaaaaaaaaaaaaaaaaaagactctacttcgtgcagcaattgctactctatacgaattgtcttaatttgaaaaccttgctgttacaaattggacctttatacattttctgaaaacaatgaaaagagtatatttaaccttttctggctgtaaatggttaccttcctgtaactgccccgcacctggaggcatggagttgtgtgcatcctgcttatgtacaattgttttcagtgtttctaagaatgagtctgaatggttcttgaaaattagccaggatcaaatgctattgcagacaaagccaataaaaagttggacttcttttggggataacaagttttggaagagaaatgcaggccatatgtgcgcatgaccgagattttgaaaaaagatgtacatagtgacatgtttggtgcatggtttttgaggagggcttttgtcaaaaaggaggtataacctttcccccacagacctgagagctgtgccttttctatgcaatattacagacgttacatcggaacccagatggctgtattcacatgtaggtttgggctgtaatctaaacaattggacagattaaatgtacatggaaatgagcagtcttacttttgtagttttatattatacaataaacagttaaaagatg

SEQ ID NO: 9795 - DNA, 1638 bp, Homo sapiens
aatttgcctccatccttttctcacagcaatgaatttgcaatctgaacccaagtgaaaaaacaaaattgcctgaattgtactgtatgtagctgcactacaacagattcttaccgtctccacaaaggtcagagattgtaaatggtcaatactgactttttttttattcccttgactcaagacagctaacttcattttcagaactgttttaaacctttgtgtgctggtttataaaataatgtgtgtaatccttgttgctttcctgataccagactgtttcccgtggttggttagaatatattttgttttgatgtttatattggcatgtttagatgtcaggtttagtcttctgaagatgaagttcagccattttgtatcaaacagcacaagcagtgtctgtcactttccatgcataaagtttagtgagatgttatatgtaagatctgatttgctagttcttccttgtagagttataaatggaaagattacactatctgattaatagtttcttcatactctgcatataatttgtggctgcagaatattgtaatttgttgcacactatgtaacaaaacaactgaagatatgtttaataaatattgtacttattggaagtaatatcaaactgtatggtgataagtattgttttgattcttatggttaaagggaaatagagccttgcattatattcaacacagccatttgtgtgtgcacaatgcaaactaaggtattctagacctatcttagagcagcatccagtatttgctttctagataatatgcccaataacatgacctagaggggcttctgtgctgtgtagggatttaaccaacttcagtggttcagggagctcaaactatatgtaaaacaagtttagaatgtatgctatctagcccgttatctctgatccttctctaaaaccatttgaaatagcttcattgatcaacatttcataaatgcatctgtggtagaggtagaaagcagcacctttcctaattggcaaatgatcagactaatgtgtgctaatgtttttcttccatgctttcagtcagattcaactattttatcctccacagttgcttaacttggtgttggaggagggtttaagcattaagataggaagcaggaaatttgattgctctaaatttagaaattatatccctaaaaattaaaacatgaatactgggtggtaatgataattgaggcaaatgtatttattttggtgacattttgcatatatgaagattttctgaaataggaccttcaagatcctagggggttttgtttggtttttaattgtgaggaataaaaaatcttctgcccacactggcattttaaggtgactgaggtcaaacgttgtttccttaggttgaaatagcagccaaaacattcttcacgcaggggcttgggatatggctgctggcaacacattttgttgtgggctccttaatttaatgataaaatttaagctaaacacaagccaaaaatgaataggtttttttaatttttatttttcactaaacaggcaattgaaatacatggtacaaaaataagtggtaagataattgtaaaatgaaatggacagaatattcaattttccatctatgaaaatttcacaataaaaatcatagtttactttgt

SEQ ID NO: 9796 - DNA, 2649 bp, Homo sapiens
ctcagtttccctcccttctccctccatccgcagccacaggggaactcgtctcttacatactctcatcttctcccccgctcccttccactccaaggagcgaggagggcaagcggcctcccagctccctggtacctcgaggcaccattccagccagggacgctgccgggtagactctccactccccctgccgcccacactgcagcagccacatccatacacacacgctcgcacagtgttctgaggaaggaaccttcgccacagactcctgtactattaacaatctgtaaccaagctaactgtctcatccatgtgttgatttcctgtttcctcctcccccgcctcttccagttcaaaggagtctgcaattggaactgctgattttcggtgggttttgtagttgatttttccaagagcgtcgaagactctctttctcttggttcaccttgcctgtcgctagcaagcatctggttcagcggaaatgggatgtgagaatgatgaaacccgacagaagtatctcagcctgcagtcagttattatgtataggaggtgagctagttaacaaacttgtaccacaaaacaatatcgctttaacttttctaaagccaaatttcccatgtaagctgcagtttctatctttagcccatcatcattttctgcccccccaaaatctgttgaaatgattcactgatgcaaaacattcacccgtaatagactgagaattgagccttaacttcagattaacttgtgagaatcaggaaaattccttcaactgcattgcatcctcttggaccagggctagaatggggatttcaggtttctatgagcctccccattacccctaaagtagaacattttttaaattgtgttgccaccacttctaaaaatttagcaatattagaataggatactagtgaagtaagaaattttgcttgttgttttgcaaaccaaatagtttcctcaaacacaaatcagtgttcccacgaacaagttccagttgagaaacactaaggttatggtgaataaaaccatagggagcttcttccccccaacccctggctattttatattaatggggagaggggatttttaaatgtcataaatttgaagagtggtgggttgcattttcttcatgggtttatgttttcgtttcattttggactcaatttcacatcaccaaattcctcatttatacttggggaaaaaacaaggccatatgtaaaaacccttccaatgcctaagtgtctttctcctgcaactccaaacccagactcgccactttgggtgcacaggtggttaggtcagccaactggttctgcctgtcgccttgccacggaggaggcttctaattagctggaaaagagtatttttctaatacgttgcaaggattagccaaatcttcttattgaagaaagaagaaaagtgaagagtggttacctatacctagcatagtacaatcagaacctcgtggagaccaccggggacaggcttgcggacgccggctgttcttcccgccacgatctttctgtggtagcggccagcagaagacatggcctgctccccactccctttccccactccttctttattgcacacaggacaccagtcttcaaggaaagggacttttttccagtctgccaatcatattgggaaagtgctagctgtgctcaccttcatggggctgtttccagctcgtccacaagctcatcgattttctttagtagattaccggtgtaaatacccagtgtgcttatgagtcagttagtagacgtcttcattcattggagtaactggtttaggctttccagtttggaaaaggagcagagagctgtccatctggattgatggaagaaaagagaacctcatccatgcctggagaacatctagaaaaccttcagccagcctccagtgctgtcgagagaccaccttcccccgacccggaggcacttccttggggtctttctctagggtctcttctctacaaagcacaacactaatgttcgtttccttagacctcagttcaagtgcccctatttatttcaataagaacgcacatatcccagctgttttttgtttgtcacctctatttagttgttacctgtttctctcttctttcaccccttgtccttttccacccttttaagagttacgctagcagatcttactccacgtatactttttggtttgtgaaggcatcggttaagggcacaaagacagccatggggacatttatgtaaatacgtctctaattgccacactgcagctgaacagtgtgtagtattttcccagtcagctttgccatactgacgtcaatcatttgagagaaattattcagattttatttttgtatctgtggtaacaaaacattaaccaaaagattttctgtccagaagcctccccgaccccccaagctatttgctcacattaacaaattaaagtgcctgaagcataattcattctttacctgtatactaaaaaccctgttgtattgatttttttataataagcctttttacctctgtgtaaaaaatatatatacaagtgtatgatgtacattttagttcttaacttttttttatggtttctaatatgtatgaccaatgtagccattgctttaaaatgtaccgtgtaaatataaacacatcctatcag

SEQ ID NO: 9797 - DNA, 683 bp, Homo sapiens
ctttttggttttgatgtacacatattcaaaaagtacatcttcccccccccccccccccccgcaaaataattctgtggcagggcaaggtttaaatgtgtttcttattaatatgtaaattcacagtaaatatgtaaagctaaatactttcctctccaaagatcattatctttattgattagcactgaggattttaacattgtgatatattatatatttataatttaccatctcttgatgagactcttatttctttatataggtcagtcttgcaagtaccattttataagcagctgtgaaatttaagtgaaatgttctttgtaaacatttgtactattttaaatgaataatgaccttatgaagtatgctatctgtaggctgaaattataggtacatctgttttcactatatgatattaagaaagcgtgaaatgacttaaatgttcatttttttctgtatagatactttatcatgttttcatgattttaggaattactgctttgttgatattcaaagtgtgaaactaaaactttatggttgtactttaattcttggcatgttgcctctatgtcccatttaaaataaaatacattctcattaactttagatgggaaataaggttgtatgttgatggatgaattttggcatgatgactgtactctcaataaaggctgaaaatgttgtat

SEQ ID NO: 9798 - DNA, 1089 bp, Homo sapiens
cttcaagactttggacttgaggctgggcacggtggctcactcctgtaatcccagcactttgggaggccgaggcgggtggatcagaaggtcaggagatcgagaccatcctggctaacatggtgaaaccccgtctctactaaaaatataaaaaaaaatttgctgggtgtcatggcgggcatctgtagtcctagctacttgggaggctgaggcaggagaatggcgtgaacccgggaggcggaggttgcagtgagccgagattgtgccactgcactccagcctgggcaactgagcaagactgtctcaaaaaaaaaaaaaaaaaaaaagactttggacttgaaaccttccagaggaacactcacacaatttaagataggttctggagtcctctgaccctcattgaacaaagctggatttggctgatgataaaagaccccagccacaagcctctgggccagcctccagcctctctcggggcttgtttgctgacttgctgctgcacgtgggtatcagaagcaccaagtaaactatctccagggccagttcttttctctcccttccatttctaagtcaatagttgtctataattaaacatatttcagatttgttctgtgtccctgaagttccatattttatctttatgcttgtgttatgttttagtgtctataatgttgtggtgggaatcatttcatttggtttaaaagagtttgccttggaaaaactgaattaaccttcataaatacattttgagagatttcagtgtgagtaattttctggacataatattattgtataaaatatcaaaatggtgggccaggcgtggtagctcacgcctgtaattccagcactttgggaggctgaggcgggtgaatcacgaggtcaggaattcgagaccagcctggccaacatggtcaaaacccgtctctactaaaaatacaaaaaattagctgggcttagtggcgggcgcctgtaatcacagctacttgggaggctgaggcaggagaatcacttgaacccaggaggtggagattgcagtgagctgagattgcgccactgcactccagccctggcgacagagtgagactccgtctc

SEQ ID NO: 9799 - DNA, 2106 bp, Homo sapiens
ctcttatcagagagtaccacccaacacttttgctttcttctccatctctgaagatctgctcaagacgtccagcaatgctctctgtgtatttaaatggaagtatttttctctgtgaagccacattttccaacatgagcctcatgaagccaactaagtgttattgaactgtaattctctcaataactcagtgtagcactttaaagtctgaaggacagcaacatgaaaagagcatatcaatgtggtggagaaagggaaggggttggctttttaatttatttttcttcatcttttataacaagaaagtatctatatatacatatgtaaatatttatatatagatatatgtagctttctatatatgtagtaggttggctttaatttaatatacttgattcagaaacaaaacaatagagtacaaaagtgccaagcagaacataaaacatccttacttttatttcacacagttttatatatagatagaagactgtacaatttgagccgggtgttaggccagctattttccttttcctgtgctttctcctttgagagattgacaaagcatttgttaacgtcctattatttaccttaattacatttttgtaacaaaggagtctgtaactttatttatacttatgaatatatccagggactacttctcattgctgagcagcttttaatacacctctgcttgaggagaaagtctagttcattgctactgccaagagctagttcttgtgttcatatagtaactgcacagggcttatagctgcttcattctgctactttgtaactaggagccattgcatttattaaatgtccctcagtaacgttaagtgctagttgtgattttatacataaaggccagaagctgtctgaggcaatcatgattgattgtatgtatcacttactgaagaatacctgaagtgatcatgtaactacttataagggatatccatttgtttgattacatgggtaaataatttgtcattaaacttgtgtttgaatcatgaattcccttgtttcaaaagacttgcagctaatctaaaaaactggtgatatttaatatgcatgtatgtatctaaacacccacatatatttgtggtttaagtgtgagaaatcttgctaatctatatgccacagaagagcaaaattgtatccaaatttatgccacttaaatttctttaccacgagggatagagcatgcatactggtttttttttcttgatttgcccatataattggtaatggataacttaataaatttgtgtgatataaaagtagtgtatcatgttctactgtttgatcttatcccttcccatttctgcaaaggtactgttagctggaagaaaaacattttggttagctttgtatgacagtagtctttccctttatagtttctctataaaaactggttttaaaatcagtggaaaagggcaggttgaatcaaggtgaatcaatctgaaattgagcacacctgcctgccatcgctgttccttcaactgagtgctgcacatcatgggctctgtctgtgagagaaaaatcccggtgcttggtgtccttgcatgacatggagttttgcatgtagatcaatttaaaatgtacctcttgtttacataatttgcataattttaaaagataatgttgccaaactttggaaatgttaatgttcagactgaaaatctccactacatgtaactttcttcctctggatcagtggcatggcttataatcccagccagtggtttgaactgttccagtgtcaactgccatgtgctctgcttcaagggggaactagccttttgtgaattttttgtacataagtatttgttacaaatattttagcaaatgctttctatttctcttgcttgtgcatatcttggctggcgttacagaaaaatagtgtaaacattatttccttaccggggaatgagggttttttctttttctttttttttttttttttttttagtttgtgtgtgggggtgggtaagggaggggatggtttatgttgaatgtttagtttttcttctgcatgatacgtcatgttgtgggatctttagaaaacttcatactgtatgaataagaaaataaaatatttgaaacttg

SEQ ID NO: 9800 - DNA, 850 bp, Homo sapiens
aagtggctctttctgatgctactggacaatcttttcagaaatctacttttagataaaccagcgcaggccttaaacaaggcatgccacaccattgctgttccccatctggtactaatgacctactagccctggttattttgaaagtgtaattcccctctgacacaatatccctcacatacaagatggtgatgtaccactcccgagaatattcccatctgtattttgtgctgatgttcctgcatccagttgttctcggtcatacttttgaccacttgtgactggagttcagtggccctggcaggcttgtcctgctcttgaccattccactgactaactttggtgttttgtttccaagttaagtgattcctccttttttttgttcaatgttaaatttaaaaataacaatgtgtatgggtcctcccatgtgtaatatggtaacatgtaacttgcagtgtttgccagctttcaaagcaggctttgtgaaaatgtaatacaaacagcagtgaatgggactcaaatgttgtgcttcctataaacagctccgctctttcagggaaggatggtaacaaactagaaggacaaatatgtacgtatttataacgtattaaaactcttttaagtagcttaaggtattgtgcaatggcctagcctagtagaaatgggggaaaagcattgctgtggaccattgttaaagtgacaggagttgtagggttacccctttgacaagcttccatagtcttcagacacgcacattgatggcatccctacagtcttcttcacttgaactttgtaaaactgcatatggacctgtaatcaacttttgatatttcttaataaaggcgttgaaaat

SEQ ID NO: 9801 - DNA, 1834 bp, Homo sapiens
ggggaaaaaaaatcacaaatctcaggtctttgaaagtttaaaacttaaatgactcttaggttgcaaaagcgatatctttattcgttcattttgttgttcacctttttaaaagaaaatgaaatggaactattataaaagtaaagctttatttttgttttgcactttagtaaaatttttctggttttattgtaatgtggaaaaatcatgaaatgttatttttataagaaataatatactgatagagtgatttccaaatacaatgtttcatgtatttgtgttaatatatttgcaatactaaatgtaagagtgatttgtatgttcagcttaatgataattcaaaatttcaggaagccactttaaactgacttaaagattcattaagtggtggttataactaggctcatgggaagactagctaagtgaaattaatagcaatacatttaaattaatacattgacattttaatgactttaacatttctatttcagtggaatcagattgaaatgtcaaatagtgaaactatttttaatgtgttaagcctgtggtttagttttaagttaatgtcatctcagggctaaagtttgtccaattgagattcccattaattttatataaacctggaacggctctcaggagctgaaagtaagtggaaagtttccagaacactttaccatcagaatgccacactagcctggtaaaactctctttctgacagccttatagcaccatctagtgtgctattcttagatagcaagacaaaggactttcagctcctttttgttttctccatattaaaaagaaaactgttattctaaagaatccttaacacttgtctttgttaaagtttataactttttaggaacctttattttaacttttaaaaacttttgtttctcttttttcataaaaacagattatatgctactcactataacaaattgtttattctgaatctgtggttaccaccatagtaaaaaagtgtctacaaactgctttagttagtgtggggttttcttcttaaaaactgttctctatagcattaaatataagaatccaggaaaccaatatttaacaaataggcaaatattagaaagatgccccactatatgcaaattctgtatgttgaatcaagcagtagataattaattgtctcctactatcttcttagagttggaagagtccttgaaaatcaggcagtcaagtgtccaggactattcagtaattttctcaataggaacactgtcagtcagccagcccaagctgaaatcctgtacttctactaatagcatctctgttatgtcacagaacagtccagttgtagtctaggcttgcactgaagaccacctctctgtaacgtttgccttctagccccacttccaccctctagaaccaggctgattcagtccttcctgtctatgattgccagatatttgaagactgatagcctgtctcttcctatgtcttctctccaattccactgatgatcatagagtataatttctagacccaacaacattctcttctgcccatttactcttaacaaaagaaaggggctgtgcgccatggctcacgcctgtaatcccagcactttgggagaccaaggtgggtggatcacctcaggtcagaagttcaagaccagcctggtcaacatggtgaaaccctgtctctactaaatatacaaaaattagccgggcgtggtggcaggtgcctgtaatcccagctacttgggaggctgaggcaggagaatcgcttaaacctggcaggcagaggttgcagtgagcagagatcacgccactgcgctccagcctgggcaacaagagtgaaacttcgtctc

SEQ ID NO: 9802 - DNA, 150 bp, Homo sapiens
aagaagagtcctatggcttatttaataactgtaaatgtgtatatttggtgttcctatttaatgagattatttaataagggtgtacagtaatagaggcttgctgccttcaggaaatggacaggtcagtttgttgtaggaaatgcatatttt

SEQ ID NO: 9803 - DNA, 135 bp, Homo sapiens
gatgattagccctcttgttttatcttttcaaagaaatacatccttggtttacactcaaaagtcaaattaaattctttcccaatgccccaactaattttgagattcagtcagaaaatataaatgctgtatttatag

SEQ ID NO: 9804 - DNA, 914 bp, Homo sapiens
ggaatatctatacaaaatgtacgaaactgtatgattaagcaacacaagacaccttttgtatttaaaaccttgatttaaaatatcaccccttgaagcctttttttagtaaatccttatttatatatcagttataattattccactcaatatgtgatttttgtgaagttacctcttacattttcccagtaatttgtggaggactttgaataatggaatctatattggaatctgtatcagaaagattctagctattattttctttaaagaatgctgggtgttgcatttctggaccctccacttcaatctgagaagacaatatgtttctaaaaattggtacttgtttcaccatacttcattcagaccagtgaaagagtagtgcatttaattggagtatctaaagccagtggcagtgtatgctcatacttggacagttagggaagggtttgccaagttttaagagaagatgtgatttattttgaaatttgtttctgttttgtttttaaatcaaactgtaaaacttaaaactgaaaaattttattggtaggatttatatctaagtttggttagccttagtttctcagacttgttgtctattatctgtaggtggaagaaatttaggaagcgaaatattacagtagtgcattggtgggtctcaatccttaacatatttgcacaattttatagcacaaactttaaattcaagctgctttggacaactgacaatatgattttaaatttgaagatgggatgtgtacatgttgggtatcctactactttgtgttttcatctcctaaaagtggtttttatttccttgtatctgtagtcttttattttttaaatgactgctgaatgacatattttatcttgttctttaaaatcacaacacagagctgctattaaattaatattgatat

SEQ ID NO: 9805 - DNA, 123 bp, Homo sapiens
aataatctggattttctttgggcataacagtcagacttgttgataatatatatcaagtttttattattaatatgctgaggaacttgaagattaataaaatatgctcttcagagaatgatatat

SEQ ID NO: 9806 - DNA, 17874 bp, Homo sapiens
ccgtgacccagtagcagatgcagttctgtaaccttcataccgtaaaatacattttcattacggagttatgaaaaaaatgatttttttaaaaaaatctgcaaataaggggccctccagcccttttctcctaccccttgccttctcctgtagaaatgataaggaaagaaaatcactttggccctccagatattccttggccagttcctccttgttagtttgctgtgttttctcattacccttcttcaatagcattatcttaaatcaagcactagatgccatgagcttcacctctgctggaatcaactccaccaaaagcttaactgtaactgaaactagtgaattgacacttttgtctcgttcttgctaggaatggcctcccagatcaattctcccaacccccgtctcctttggccagatgctgatgaatgtatttccctgtttttgctttttatcctgatgcattatcatgaggacatggctacttcagttggtcttaactctaggcagtagcctggagatgggtgtgtggtttaagaaagggtaaaacttactgactggtagtatatatttgagaagagaaattgagcccagctctagccaaccaactttgaccttgtttgatcatagacttagccaagggattttacaccccatgcaacctgcccagcattcgtccagctttctggcttccattgaaccgtgatttctcagatctggagacgtgactgcaagtatttgagatccttggatacaatgtgtacgttatataaatcccaagtattgccattccttttcatgttaactgttccaagtgggatctcagaattagaccaaaacaagacggtggtaatatgataccttttattagaagacttttcactggggcgggggtggggggaggatggggaggggaaggaattgtagcagaaacagatgtatttttcttgtgatttttattttgaatcaaatattgtaaattgtgtataaatgaagatgctgaatagttctgtttccacttggcatttcaagtctgatatcaggtgtctgtacagggttttgatttctttcccttgtataactacacaacaatcctacagtgtaacatatggaatcattttgaatagacttgtgtgctataagctttcagcaggtcctctgtctctagaataagcatgttgtttattttcagataatcagaaataagtgtgctgacaagctggacacaatctgggtgtgcccagcttacctttctttctgatgtttaaattgaaggctgcagccaatggaatatgttcagctggttttccttggcttcctagattaaaaaaaaataataaagcatagttctttattaactttaggatattgttcataaaataaataaaggcccctgcactaacatgacaacatgcctcatggtcaccctctctatatgtacttactcattaaagtgtattttatttccttatgtggaaagcacttttataaaatcacccttttgaaaagaagtgggcacagagaaccccactcctgttcttttcctctagtgccattgtccatcatcaaaagggaaactcttagttaatcagatctgtacaaataaaattccaagtccatttgcttgttttgctatctagtacttttgtttcttcttcctcacatttgcactttatgggggaaaaaagtttaacagcaacaacagcctataaaacactgcattctggagggcaaggtttgaccctaggaatgtgcgagtagcctttgaaaggcattggaggaaaagtctgaatcttccagccttccttctgtctttaaatacttcccgtgctggctgaaacaagatgagctaggtaaaggcctctagttgaataacagaccatttccaaaactgagagaggcacaagcttcctgccgaggattaaaaagcaaaagatatccacgaagggctctctgtggttggatagcagtgaaaataggacttggtttacccctttatggacaggaaaattgctgcaggtcagaattgtattctctttcctggacatagaaagaatgtataaattaatgaaggaaatgtttatttttaaataagaataatgtttgagttctatgttttcatatttgatttttttcgtatatacatgttagaaatataatgaaatatctagtttctcaatttaattgaaactatgaagagtacagtttagaaattaggtatctctaaattgttcttttcatatattacccataattacattgaaatatattatctagtcatttggctcagtaaagcttaatggaggcagttaatgaaaatgagcagactagaagccagagacggcagtagaagcctaagggagataatgacaagaaattgtcttgggcttatttagagtaaggcctcctcaaaggggagaactatttttctgttaaggaacacatatgagtgctttggtaaacggagccttccttggtttagagcatcatccctgagctgaaagagtttatttgagttgagcatagtgtcctggtacctgtggaatcatagcctgagctacaaagggacctttgagaccatcctctagtccaccatcctcttcattttacaggtgtgggacctgagctggattgaacagggtcgggggagaagaggcctgggcaggacaggccacctgggatctcatcctggcccttgccagccactggctgagtgaccttcagcaggcacttcacctctcagagttgctgttccttagagttatacgatgggtttggactagatggtctttaagattatagaagtatagggtcctaagtatatattattatattgagaagggctatgaaggatttatataatcctgatgttcttcagttatcttctgtagttcctgctattacggtagcagtgtttacattttaaagaattataatgggcttttactaacttgctctttcttgattatctgaatagaagcctaaatcataatcttagagattttcctttttaagtattacagaaacacatgcgtggacacacacctacctattctaataaaatggtatcagaagatttctttttaaatgtataatcaggcatctaccagtttaaaacgggcaaatactataagcatatgtttctgatttgcttttattccagctatgtaagaggagtaactatagcagaaaacatgacaaattgatttttccctttacaacattcaaatgagtcccaatgttttcaaaaatacatacctcagaggagataaggcttaagtggacacttctaagtatgattataattattataattaatgatttctttagcagacatatcagaattttgacatctaattaagtgttgttcccctcaatgtcatctagttttacttaagaagttaatacttattctaatgatgctgccatccttaaagttatttttgaaactcctctccttagaaataatatcaaggaaggtaataaggtataagaaaatcagctatattatttaattagtatcactttgagaaagcacctggaagtatattctttctttgtctactttttctactactcttggttctgagtaacatttagccatttccagaaagcaaattcaaccctgtaagatgaagagtggttactgttgaagacagtaaaaaggataatccacaaaaaattctcagagaggaccttataatagaaagtgaacatgattaagacttaatttctgtaattttctgaataaggaaacttctgtgattccttagtctttagaatggtttaaaacattgaaagatatgggtattaaaacacctctgaaagaagttgtcactttgttcagtgttatttgatattggacttcgctcttcctgaattagaattacacaacttggattgctaatacttgtggaaaaacaaacccaagaaacgaactactttctcaagatgtaatatttgttttattattaatacttttggttgttttgattacttatttcctactctcctgacagataattgatcaaccaatataaccttccccaggttaggaacagttctgccttcagcagtgctgtgggaatgaagggatctttggggctgacagcctatgatgtggagggatctgcactcagctaaataaatacatgctatagataccttgggccaaaataaagtctctcttgataaggtttttctgtgatttcccagagtccttaaccttctctgtctgcaagattatcaggctcccatagccactaactttgagctttgggatgaaaatgacaggattgcccagtgtgccgggttaagcaaattagaggctgcctggcagaacagaaaaactatcacatgaatatttagaatggaagctttcctgaaacactccagatactgcaaagctatctttattcctctctaaaggctataattttatcaacacaaagtcagccttttctttttccacattagtaatgtttctgaagttggatgtgcttagatttcttaaatcagaatgagtgctaggaaatctataacaagaaacctcttttgcttctcccagatttcctttcactaatacgggatagggaggctccttgggtaatgctaacctatgcaaagaagttaccaaatggtggtagttgctagaattaaagacacgttcttggttcacactttgatgtagtgacctgaatttactcttttcctgtgagtattctactctgccctattgcactctcctttgtcatgtggatgtgtgtttatcataggtctttaacgcgtccttcccaagaagacaaagcatacagttgtacatgaagatatcttatgcagtaaaaacgtgaaatttgaacattgctgcacaagtattgtataaaaaaaagtctgtaaagaactttcttatgtaaacatacaggggaataaagacttttatctgttcaaatgggagcatgatgtttagagatgtaaataacttaaaataagttgctcttttcctgagctgaaaacccacttttttgcagaaaggatttaatcacagtattgagtgacaataagtacctgggcacaagaaaagtatagctacacactgaggacatattaatgaatcatggctacctgagagagtaaaacccctgttttagtctcaaggagaataagacgcctgccagcctacactggatatgaccagactcagggttgtaaaatggagcgcaggtttgcagcttccctcctctaacttaatccctaatatacccaggccaacttaattaaacattttgtgttggcaagaataattttatccccagtgagaaaactcactcatttaattgcctcattggcctgagaggcacagctggccatttttggcttccatgaggtccctcatttcccagtcgtgggttttaatgcagctacctaatatatggtggaaccaaatgcttaattttgttatgtgagctagaaggtcatggtaattattagtttgatgtacgtctcttgatttccccagtttggttctaaaattttacgtttcaattgctgctgcatttccaagttcttgtgaagggatattttgctttctgtttactaactatatgtgagaaggcttcttctcaatgctccaagtcttcgttttctgtttttggcaagaatcatatctttgatactccctgtaaccgttctttcagtttttggtatgaggaaaagtaaacttctggtgttgtgtgatgtatttcattaaggaatatccagcctgacatttaagtcttcagattttaattctgtagggagcattctgatggccctcactatgtcaatcagatggagtttccaggggaaacccatcctaaatgattcagcactttgggttgctttggaagtgaatagggagctggtgaggatagttgccaagttgtcaggtattttaggaactccttctcttccctgaagcatgtgagttcttgctgaaatctacataatttggagcctcaaaatagactaatatggagttacccatattgaaagtgtcaacgtgcctaacctggcacacagtcctacatcagagcaagaaaaagaagtatgttttgacttcttgcttaattttatgtgtgaaaccaaaataaaaagaggcatgatccagtttgagggaattataacaaaaccctacgttaggctctatgataagtaagaccctgtgcagactatgaagccaggccctgggctttagcccctgaggtacaacaggcagtgtttactgagctctatggccacagggtatctgctatgacgtgccattggttaccaaaggaactgggtcaaggcatgtggttaggttagtataaatccttcaatgctagtaaagagactgcttcaaacacgttttcttgttgacacaatgctaccttcatataaaggaactgttcaccctgaaaacacattttccctgtaagaacacattcacatactcaaaaaaagacttttatctgccaacaagatttaatggttaccttctgtttctagtatatttggaatttatccttctctcgactaccttgtttctggtgctgccaccaccagaattccttaagggaatgtggaggtctgggcttcccccatattctctggcatttctttgcccttcagagtgccaggcctggagagttgcaaagtgtggttgctctccgcctcagccacactgtacctcctctaacaagaatagaaaggttaagggacttggccttctcaggacaaccctttaaatgtacttttccattcctacaaagcctgttgatgctgaaagaaagataggaaatagctcttgtccttgttttgaaggacaggagactaattttcccttcaaacttgatattctggtgtttttgtgactgtttttgtaaattattcaaagttgttggaattttaagtctgattttcccagtactcatcatgaaggtcatagaatatgctctgagttggaaggttttccaaatgggttctcgaccaaaaacccactttttaacaaataattttgatgggttagacatgttcttccatcctctccaaccctgaatatgggcacatacacacaccccttggtacttcctagttctcaaaatgtaatctagcacttcaggcatccaaagtgcccctggttcaatagatagctgcttttttgccagtctctgtgcacaaattgttttaactgaattcagtttaaatttccaaaaaacactgactctgttcaaactagtgttcattggattattgacctgtatgatgccagagttggtcactggcttgactaagttttccattttttttccctaagagatattttgctctcctgcagaacaagcttaataacatcaactttcaaggtagttttggaagatgagaaattgtgcttttgttttggcaactgaaaactttgtccaactgatactatgtgaggaaggtggttcaaggagttttagggccctcttgtccttctttaaggctctgcaaaccttattttggaaaacttatttttctcccttttatttgaatttcctcccagaaattatcatcttggtatcactgagacaaatctaatatcaatttacttgcctgagaaattaggattatgtctgtccacataaatcgcaaggaagaaggtattctgtttatttcctgtccactgactgatgctttcgtatcaccatgtagctgcacatactaaaattataatacaaggaaaaatttattcttttcaaaatcttattcttcaaatactattctgaaagccatttggcaccagtacagaatttaacttaacgccccaatctggaattcactgaacgcattcaaactgttagaaaggaaaataaaaatggaggacaaacacatttttgttctgtttctgaaaacaatatttaaggtcagaactgtttaaaaagaagcactgctaaaaagttataggattcagagaaacatagtatttttgtacagtatcttataaaatgttcagacctctctctacattctctttacaatgtaatgtctctaagtgactggtttcccaataaactgattttaatgcctcttctgctgtggtctgtgtgcttaattcatgcagaaactttagcaggggataatttttggcagaaatttctgctagctaatggtttgcataggaggggagagggtcagtatgggaaggggatcattgagttccatctctacagaggttctgggtcatctatggctccaaatcattgtatctaatattcttatcctggtgggttgggaaactccagtagtatctctttactgagcccatgatgaaatgatacctttacccccaaccaccctttctctggattcttcttgcttagttacatatgcctttttcctgccctcttgctaacatgtgcccaatgacatacttctaacctgctaatatttcttggaaggtaagctctcttgcattctgataattgtctatttgattttaaaagccagagcaccctgaggcacctctacctagatagaaatagactagtatattggagtttgctaatgcttctgtaatggcccatgcattttactccttctgcttaaagaactttatggcagattcatttaagcagaggagatctttatgaacttagaagactgaaaacaaaattctggggcaactccagctgaaggtgatttatttggtctgattttgatgctgtatgctcccctcagaaggtaccttcagtatttatattttgggcactcgtatgctctttgagtagtgcttgtgatgtaagtcatcaagtaaacttgcatttatcaagcagccacattctgcttcttttcagagagtttgtccctctgcatgtggcgcggatgaccacatgccagattctgaattgagtcatccccagacagtgtttctacataatccaaaactgtcatggtatatgtggagatgaatgactgggtttgttttcattccataatgagccagtgccaggtagagcaggtgtccgtgcctggccctgtgtgtaggagcattgcatagttacgctgaatgtctgtgtgcctaacatcttcatctcctttcctgtacgtcgtgcctatcatgttccaaaacgtgagacagtggttgattgtgttccagtttgtgtgcagtttccttgcctgacttttatttttatgtttttcctgttgcattttcaacatctattatttggtcccacaatgtttttgccgcgggttgaccattaaatgttccaaatagagttgaattgacctacacattaattctgcattttatgcttttctagatctccagagggagtccaatccctgtcctgtaataactgtagagcactttaaagaatcactgggtgttaaaggccttccgctgtatccagacccctccagagtacctggcacaaagactcagaacaacttagaatctgactacttggccagagatggcccttcaagcaacagctcattccacagcagcgaagaggaagggactgaccttgaaggagacatgctggactgcagtgggtctcggcctctccttatggagtctgaagaagaagatgagagctgcagaccccccccggggaagctgggaggagccgttccattcgctccaccagaagtctctcctgagcaagcaaagacagtgcaaggtggaagaaagaaccagtttcaagccttcacacagccagccactgatgggctcagtgagccagatgtttttgccatagctcccttcaggagctcaagggttccaaatgatgacatggacattttctccaaagccccatttgtctccaagagcagtatggctccttcccagccagaggagtcagacgtgtttttgagagctcctttcactaagaagaaaagcatggaggagttaacagttatccaatgcacctcccaggagctgcctgcacagaccggtctcctcagtcagacaggtgatgtccccctgcccgcgggccgtgagagagctgtgtacacctctgtccaagctcagtattccacagctggttttgtgcaacagtctaacctcctgtcccattctgtacaagcagcagaccatctggacagcatctctcccaggggatcctgcctggaatctgggggtcattctaatgacagaaacaaaggacctcagctccagaaagaagctgtctcaggccccatggctggcaaaccattccgcccccagtccttatccaagtattcccgtcactatagcccagaagacgagccaagtccagaagcccagcccattgctgcctacaaaattgtttcacaaaccaacaagcagtcgatagctgggtctgtttctatcacatccctttcctccaggactacggagctgccagctgctgatccatttgctctagcacccttcccttcaaaatcaggcaagaaaccctaggagcaaaacctgagcctcaagcctcttgtctctatcccaccctcaatacccgccatggcactcccagcttagccttctgaagaagaaatattatcagttcttatatttcaattccctgcgtcagagcagaatttcttgagtcaacaaactcagttgcagtgatatttagttgaagcccctttaagttatgttcatttttgtttgtttgtttgtttgtttatattgatttctggacttggaggcattttcatctccttcacagaggtcatccacttccaccaagaactctgctttccccccgccccacccacagaaactgtttaaatcctgaaatacttcttcaccccaatcccaaaggggccctattgttgctagttttaattcctgtagctcctgttctaagtcatgcccatcgaagaatcaagattagtccctccactaaatcaagatttagtactcttgaaaaggggagatgtctggaaagaagagcaagataaaaaccctgcacatcaacaggaagtataatcctgcagttactaataattcctgtagaagcagcagctctaggagtctccagatctgattctcagtctgtgtgcaagccaggctggctctcgtgcatgactgtctatgggtgtggaatgtacgtcagagcctgtgtagagatacaggcagatgggctaactcctcatgtctagtcatgctggcagggctttccccacatccatgcttttgaaattagtgtgagtgtacaggtttgtgtgtgcatgtatacgtgtgtgtgcacaggaagcatttccacttgagggaaatcctgccccatcatgcctacctccacaatgaaatcactcgttttttggtgtttgctcgcctaactgacttgaaccccattttatttatttagtttttttctcatggcaaagtagaatacgttggaaggtgtagggaaatcctgctggaactggtgtttcagagtaaatcttttttctctccggaatttcttgttttgctattaacaaattatatttacctgattatgaaaaattaattttccttatacattttccccttacaacactagaaaagagcaccttgttacagttccggcctctcagtatgtgggctaaatgccagcattagggaattcattaatcatgagactaggctacaaactaggcttgcttgttttggggtggttttgttgttgttgttgttgttgttgttgttgtttccaaatctctactgccttttgaggaaatgtaaatctgagacatggaaataagtgtttgggagaatggaaaagagctgaatcaggtaggcatgaaaacttttacattctctatcctctttagatgttgaaataggccagacaggttaactgatgttttttaaaattgtcttttatttctggaaagatctgacttattcctagcttttttcataccctttattattagtgccttaaaataaagctggccaggtgcagtgccacacacctgtaataccagcattttggaaggctgaggcaggaggatcagttgagcccaggaagttcaagaccaactctggcaacacagcgagaccctgtcccttcaaaaaataaataaaaaaataggctgggcatggtggctcacacctgtaatcccagcactttgggaggccaaggtgggcagatcacaaggtcaggagtttgagaccagcctggccaacatggtgaaaccccatctctactaaaaatacaaaaaattagctggacgtggtggtgcacacctgtagtcccagctactcaggaggctgaggcaggagaatcgcttgaacccgggaggcagaggttgcagtgagcagagattgcgccactgcactctggcctgggcgacagagcgagtctaaaaaataaaattaaataaaataatgaaaaaaattagctgggtatggtgacatatgcctgtagctactcaggaggctgagctggaaggatcacttgagcccaggagtttgaggctgcagtgagttgtgagtccagcctgggtgacagagtgagacactgtctccaaaaatataataataaaaataaagcctgtatctcaatgggaagatttctgctaaggcagttcaactcactggaaagaactgctgcattaggtttcaactttaatgctttctgttacttctagtaaaggttaagtgatttttccattagctgtagaagtttggagagctatttaccaagccagatcaatgatttaaaaattattggaaattcatctaagaatcaagtctgaatgcccaattctattgcggttgattaggtgtgatattctttaaagttcaggaatattggcagtaaaaaatgagcagctacttttcaatactttgtccttttttggtggtctctgcctatttcaaatgtcctgatcaaaagataaataattggcactgtgccaaggtttggttttccaactaaggtttcaactgtgccagaaacctatgtccttcactttggtggatgctaaatgttattctaagaatatgctttttcccaattctcctttctgatttttatgtattagtggatgcaaaattgtctttctagttgaatgaataatttcggctaatgcacgtggaactttgcaccccagattcttcccatggtcattatcaagtgaagccctcaaaaacatgagcgaagagcctagaaatactcagggagatttctcaccccaactcagaaattttttttttttttttcaagacggcgtcttgctctgtcgctcaggcgggagtgcagtggtgtgatctcggctcactgcaacctccattttccgagttcaagcgattctgcctcagcctcccgagtagctgggattataggcacacaccaccgcgcctggctaatttttgtattcttagtagagatggggtttcaccatgttggccaggttggtcttgaactcttgaccttgtgatccacccaccttggcttcccaaagtgctaggattacaggcgtgagccaccgcacctggcccagaaattctttttttttttttaaattattattatactttaagttttagggtacatgtgcacaatgtgcaggttagttacatatgtatacatgtgccatgctcgtgtgctgcacccactaactcgtcatttagcattaggtatatctcctaatgctatcccgcccccctccccccaccccacaacagtccccagagtgtgatgttccccttactgtgtccatgtgttctctttgttcaattcccacctatgagtgagaacatgcggtgtttggttcagaaattcttaaagtaagagatcattctaattcccctttccaaatattcaggattatctctgtaacagcccagcaaaatgtttttcctttggttatttgataattcccttctaatcaagtgactattttaattctcaaggtgcaaatcaggataaaatcatggtgattttactacatagttgaatacttcgtcaagtatgagcttgtatcctttttaaatttttcactggaggccaggcgcggtggctcacgcttgtaatcccagcactttgggaggccgaggtgggtggatcacttgagggtaggagtttgagaccagcctggccaacatggtgaaaccctgtctctaccaaaaatacaaaaagtagctgggcgtgatggcacgcacctgtagtcccagttactagggaggctgaggcagaattgcttgacccagggaggcagactttgcagtgagccaagattgtgtcattgcactccagcctgggcgagaagagcaaaactccgcctcaaaaaaaaaaaaaaaattgtcactggagacatgatgggtggagactctacataccttctttgaatacagaaacggatgcaaacacatgcaaattacttttttttttttttttggtgatgcatgaaaaaactttgacttgtggattacattaattattagtaacagttagattctgccgacttgtattacagtagggtcttatttccttaaagagaaaaaaaaatacagtcatgccccacttaatgatgagggagacattcagagaaatgcatccttaggtgattttgtcattgtgtgaacatcacagagtgtacttaacacaaacctagatggcacggcctactacctacctaggctatatggtccagcctgttgctcctgggctacaaacctgtacagcatgttactgtactgaatactgtaggcagttgtaacacaatggtaagtatttctgtatccaaacattttagacatagaaaaggtacagtaaaaatatggtataatcttatgggaccatcatggtatatgtggtccatcattgatggaatcgtttttatgcagcacatgactgtatataatcaacaaacaactctactttcttgttttcgtttgttgtgtttttgctttacacatttgatagggaacatagaagttgtgacctttcatttcagtggaaagcattgagccagaatatatttattcctaaaccatcgagccacacatgcattgatgaaccctgaaagaatccacagtaattgactaacaggcagtactgaatgaaagatgtcatatgtggtgaaaaatatttaatatatcagtttcttgggctcacatacagccctttagttccaagtgcttggttagattagaaaatgggatgaacacaatttgatgctgaagcagctgctgagcagcacccagggagtctaggtcatacgccctatattgttttcggcccacttattgttgagttgaaaagtctcatatttgtagactagagtgtatgtgtttagaggctcatgttgtatctgagttttctctggcaactaagatctctttctaaacgttctagaaagatactggtatcttactggcccattatttagtaagttttagaatacatgtacatcagtgttttcaactgcttggtggacatttcactgatgcataatcaaagtagcagattataatcatcagagtgatctgacaaggaaattctgtatttgcttccataaagaaaaataatcaaaacatatatcagatataatatatatgcagtatatcacataggaaattttattgtaggaaattagagaaggatgctactcaattcattctctagcaggaagaatacagcttaaaaatcacttgggtccctttaataaagaaaagtgtgattctgtgttgtgtgtttggaactgaaattggagaacacgtgccagtcgactgtgaaatggttgctggataaaaccacagatgtggttttatccgagaaatgtgggactgaaattattttgatgagaggtacataagagagctgcagaaaagactgtagcttctgaggaggcaggagtaccttgttaatatccaaaccacccctgagttctaatgttccaactccacctaaacgaggaattggaaactttaaatggaattatctaatttaaattcttagttttttctttgtctttctcagctgatacttgtagttttgttttgttttttaaccaccaagaacacttgcaagtttgttactgaaaacatcactaaaggaaaagaagagtttcaaaatgcttgaaaagtagtatgtggttgggaattgtttttgttcaagtccctggaagtcctcttggcttagctcccttgttcctgttcccacttcatttccttacttaacattcccctattttgagcatgtcaataagtgcatgatgaatggcacagttgaatgatcatgttaactttaattgcttcctttgttgctgtaaacagtttcttgttaagtttcagccaagtctgtgacaatctcaccaaataagaatgaaatgggcggggtgtggtggctcacacttggaatcccagcactctgggaggctgtgttgggccgatcgcttgagctcatgagttcaagaccaacctgggcaacatggcaaaaccttgtctctacaaaaaatacaaaaattagccaggcatggtggtgcacacctgtagtcccagctacttgggaggcttaggtgggaggatggcttgagcacgggaggcagaggttgcactaagccaagatcgtgtcactgcactccagcccaggcaatagagccagaccctgtctcaaaaaaacaaaacaaacaaaacatgaatgaatgaaatggctcaccttccctattatgaactagaagaaaggatgaaggaaggttggcaggaccccagccttactctgtagtgacaacccagaggtacttttcccggaatgcagggtcaagtttatgtgtgaagggactctagaatagctggtaaaaatggctacatggtaaccattcttgacttagtccagtattcccataatttgtaattccataaatttattctcagctgtcccccagccatttctaatagaaggatgtgtaccccagttttgacaatgttcttgaaatcaagttagtgttacctgcattgcattataatggaactatatgtacatgttaaagggatccgtttgattcctttcggcaaggaattgcaaaaatagtttttaccaataccagttaaaataggataggttagactttgggggcagggtgagacagtgcagccttttcactctgaaatggcaaatcagctgtactctttgagtctaccagagattcctatttgagtgtgaatggggtgtgtgtgtgtgtgtgtgtgctcattcatcttcatgctttcttccatggtgttaattcaagctctcctaataaaggtatccaaagagtactgagaagtgaccataggtatttggcatgagtaaatgtagttccttttgccaaaaaaactctcaaaagttacaactggagttcttcgcgataaaaggttggggaaatcagccatggctttagccttgttcccaagtacacatcttcttatccacaaggatgaaactctgtagggctcaccctgagggctcatgtgtggcattgagagggtagcagtgaccagaacaccacaaggcccacaagatgttttgaatgagggaacatttaatgtcatttgttaggagatagaaaccaaataataaaggacaaggaccacgctcattccgtggagaagaggtgaactccctctgctgactatttggaatggactgaatgaggaggtctctccagccagaaggagtattgaggtcatcaggcctcagaaaacaatgtacacataatctcgggctgtgaacaagagaaaggagggggggaaacatgaaagtcaatcttaacaatttttgcaatacctcttatttgcagaccattggatttatgttattgcactctcggtgtgatttatcgtatgtatctgataggttttatgaattgttttgagttgtaaactcctataccctttattaaaatggacctaattaagtgatt

SEQ ID NO: 9807 - DNA, 563 bp, Homo sapiens
gaagccaccttttctttaacctcctaaatattggtgggaagacccaccgctgtggggggggttgcatatcctcatgggggtcactgggcttggccagtctgcttatcaactcttgctcttctctcccctttgcctccctctgcaggggccttaatctgcccctggtaggggaggcttccactgaacaggcacaggtgagggagagcaggctggcttagagggacagggtccccatggtcatcaagctgctgttgatgacaaagactcaaaggctggaagagctcccaaggaagctagaaatgcttgtctttgaaagaactgtgggaccccttcagattccctgaggtatggcttggtcactctcaggtcctcaaagcctgtcttagttgggctgggtcctagctgcagggtctttgtgagggtcacagttgctctgggacacctccctgaagagcctttccacctgtacaatcgtattttctttctgtcatttgctttgaagcccattgtgccttatgccaataattcaattgctgcaaacaccaataaagattgattcatgg

SEQ ID NO: 9808 - DNA, 469 bp, Homo sapiens
agcaaaacaagataataatcttttgctgcttaatttgcacatccccaccccttgacaactttaaatgctagttaggcacttagatggccctgttccttggtaaactgctcttagctaagatgcaaattctcagtgctttcaagtggattctgttgaagaaaatctcttgtaaatagcctttttgatgctgctgtgtacagtcttcattatgcattgggcagtatttctggctagagttttaaaaggaacagaaagaaaaccagcttattttccttcttacggactcatctttagcgtttatttcaaccttttgctaattctctgagaaatctgcagcactcagccatacaccaacagtgttggaaagttaacaccctggttagggcagaatgttaaagaccatcttggcagagttccagccacgctctttattctgttctcaaataaagcagtgtcactagtttttcct

SEQ ID NO: 9809 - DNA, 1035 bp, Homo sapiens
ataaggactccagaatctaaagccagtggcttgaggctacagggagtgtagtaaagccgttgtttacttaaagatttatcaaatcagtcagtgcaaatgtcagatacaatgtatttatttaaaagattcatttttaatcatgaaattacttatcatccacattgttttaaaaagaaacaagatgctggatgtctgccaatttttgccttcattaccttttttgataaagtttctcagatccttgtttcaaacacaaatgcagggattgctgccactttttaactattaagaggcagaaaattgcacaatattgaacttttttccactgaagtagtgtgcagttctagtttgcattcctgatatgatttaaaacatgtaatataaagatgttaaaaaaaaaaaccaaaactgtgcagagtctagaagttgtttgtcatcttcagcttgtgcacaattctgttttaggttaaaaaaaggcattgtttgagctgtcccatctccactgttatccctttggggttttttaatataaattattagtttacatcatttttgtatctacatcttttttcacaaatttgtcttgccttattaaagttctgtaaaatatacttaaatggaaaaaatgatgttcatttagattgaaaacttttctcagatggattgataattgcattcatcttgtgttttatatgagaaggtgcctcaagaatttcctgttggatttgtttaaaaggatttttatctttcgtgataaactttgctgtgtaccaggaactataaaaacaaaaacttgttactaaagaaaatatctgaaatgtgataagttcttatgccatgttaatttcatgtgtcaacttcaacatttacatgtattatttcattatgtaaaatgttttagcaatttaatattttgcacagttagcaaactttgtatgtcatttccttcaaggcatcatgcagagttgacatgagatttataaggttttaagttgtttgcatgtgaaaatcaaatacatactttggtagtctttg

SEQ ID NO: 9810 - DNA, 256 bp, Homo sapiens
ataatggctgttcagcagagaaacccatgtcctctctccatagggcctgttttactatgatgtaaaaattaggtcatgtacattttcatattagactttttgttaaataaacttttgtaatagtcaaaaatgctttctcagatgttctgaatatagaatatcagctctcattccagttttttctaacatgaattttcctggttgacattgatttcaaagggttttatgcattaaagtgaaagaatcttattaaatg

SEQ ID NO: 9811 - DNA, 1312 bp, Homo sapiens
aagtatttgccagtggccatcagggctgagggcaagaatatattttttataaggaattgggaattttagtcttttaagcaaagtttacgaatgaagaaatgaaggatggccacaagcgtaaggcatatgtcacttgcctctggacactggttattttatgtttcagtccctaaaaaatgaaatggaaaaaagtggtgctaaatcgagtcagagatattacaggagagttttagagcttattatttcctgtggccagtgcttgtcctggcagtaaggctttcccctgtaacaagccagagccctccaaggtaccagactcttcttactacacaggtactaacaggctggcaggttagagttggtggagtctgaggagagatattttctctttgttgccaacatcctgtttaccaaaagtgtcaccccaccatcttccataagctgtgaaacaaaatcaatgaggtcactaacttagaagggaaagaaagttttctgggtctttgttttcttgatttggggtaatttatacaagggcatacaagttgattttaagatgtggaactgggaggtagactagtttggataagaactttgaaatgttccttgtggatccccatttctggtcatcaagatgtggatgtacatttcttaaaattattacatgctgcatctttcagcctggagactgtgcagaaacatgagaggtgatgacacactaattatgggaagcagaattactggctgatggcccctgaggctgtgtgtaacaaaatgacaggacaatcttgcagtaacactttccccttgaagagaagggggttttgattgtgatatatactagtatctaggaatgaacagtaaaagaggagcagttggctacttgattacaacagagtaaatgaagtactggatttgggaaaacctggttttattagaacatatggaatgaaagcctacacctagcattgcctacttagccccctgaattaacagagcccaattgagacaaacccctggcaacaggaaattcaagggagaaaaagtaagcaacttgggctaggatgagctgactcccttagagcaaaggagagacagcccccattaccaaataccatttttgcctggggcttgtgcagctggcagtgttcctgccccagcatggcaccttattgttttgatagcaacttcgttgaattttcaccaacttattacttgaaattataatatagcctgtccgtttgctgtttccaggctgtgatatattttcctagtggtttgactttaaaaataaataaggtttaattttctcccc

SEQ ID NO: 9812 - DNA, 3574 bp, Homo sapiens
agagcccagaggaggagtttggccaggtggactgtggcagatcaataaagaaaggcttcttcaggacagcactgccagagatgcctgggtgtgccacagaccttcctacttggcctgtaatcacctgtgcagccttttgtgggccttcaaaactctgtcaagaactccgtctgcttggggttattcagtgtgacctagagaagaaatcagcggaccacgatttcaagacttgttaaaaaagaactgcaaagagacggactcctgttcacctaggtgaggtgtgtgcagcagttggtgtctgagtccacatgtgtgcagttgtcttctgccagccatggattccaggctatatatttctttttaatgggccacctccccacaacagaattctgcccaacacaggagatttctatagttattgttttctgtcatttgcctactggggaagaaagtgaaggaggggaaactgtttaatatcacatgaagaccctagctttaagagaagctgtatcctctaaccacgagaccctcaaccagcccaacatcttccatggacacatgacattgaagaccatcccaagctatcgccacccttggagatgatgtcttatttattagatggataatggttttatttttaatctcttaagtcaatgtaaaaagtataaaaccccttcagacttctacattaatgatgtatgtgttgctgactgaaaagctatactgattagaaatgtctggcctcttcaagacagctaaggcttgggaaaagtcttccagggtgcggagatggaaccagaggctgggttactggtaggaataaaggtaggggttcagaaatggtgccattgaagccacaaagccggtaaatgcctcaatacgttctgggagaaaacttagcaaatccatcagcagggatctgtcccctctgttggggagagaggaagagtgtgtgtgtctacacaggataaacccaatacatattgtactgctcagtgattaaatgggttcacttcctcgtgagccctcggtaagtatgtttagaaatagaacattagccacgagccataggcatttcaggccaaatccatgaaagggggaccagtcatttattttccattttgttgcttggttggtttgttgctttatttttaaaaggagaagtttaactttgctatttattttcgagcactaggaaaactattccagtaatttttttttcctcatttccattcaggatgccggctttattaacaaaaactctaacaagtcacctccactatgtgggtcttcctttcccctcaagagaaggagcaattgttcccctgagcatctgggtccatctgacccatggggcctgcctgtgagaaacagtgggtcccttcaaatacatagtggatagctcatccctaggaattttcattaaaatttggaaacagagtaatgaagaaataatatataaactccttatgtgaggaaatgctactaatatctgaaaagtgaaagatttctatgtattaactcttaagtgcacctagcttattacatcgtgaaaggtacatttaaaatatgttaaattggcttgaaattttcagagaattttgtcttcccctaattcttcttccttggtctggaagaacaatttctatgaattttctctttatttttttttataattcagacaattctatgacccgtgtcttcatttttggcactcttatttaacaatgccacacctgaagcacttggatctgttcagagctgaccccctagcaacgtagttgacacagctccaggtttttaaattactaaaataagttcaagtttacatcccttgggccagatatgtgggttgaggcttgactgtagcatcctgcttagagaccaatcaacggacactggtttttagacctctatcaatcagtagttagcatccaagagactttgcagaggcgtaggaatgaggctggacagatggcggaagcagaggttccctgcgaagacttgagatttagtgtctgtgaatgttctagttcctaggtccagcaagtcacacctgccagtgccctcatccttatgcctgtaacacacatgcagtgagaggcctcacatatacgcctccctagaagtgccttccaagtcagtcctttggaaaccagcaggtctgaaaaagaggctgcatcaatgcaagcctggttggaccattgtccatgcctcaggatagaacagcctggcttatttggggatttttcttctagaaatcaaatgactgataagcattggatccctctgccatttaatggcaatggtagtctttggttagctgcaaaaatactccatttcaagttaaaaatgcatcttctaatccatctctgcaagctccctgtgtttccttgccctttagaaaatgaattgttcactacaattagagaatcatttaacatcctgacctggtaagctgccacacacctggcagtggggagcatcgctgtttccaatggctcaggagacaatgaaaagcccccatttaaaaaaataacaaacattttttaaaaggcctccaatactcttatggagcctggatttttcccactgctctacaggctgtgactttttttaagcatcctgacaggaaatgttttcttctacatggaaagatagacagcagccaaccctgatctggaagacagggccccggctggacacacgtggaaccaagccagggatgggctggccattgtgtccccgcaggagagatgggcagaatggccctagagttcttttccctgagaaaggagaaaaagatgggattgccactcacccacccacactggtaagggaggagaatttgtgcttctggagcttctcaagggattgtgttttgcaggtacagaaaactgcctgttatcttcaagccaggttttcgagggcacatgggtcaccagttgctttttcagtcaatttggccgggatggactaatgaggctctaacactgctcaggagacccctgccctctagttggttctgggctttgatctcttccaacctgcccagtcacagaaggaggaatgactcaaatgcccaaaaccaagaacacattgcagaagtaagacaaacatgtatatttttaaatgttctaacataagacctgttctctctagccattgatttaccaggctttctgaaagatctagtggttcacacagagagagagagagtactgaaaaagcaactcctcttcttagtcttaataatttactaaaatggtcaacttttcattatctttattataataaacctgatgcttttttttagaactccttactctgatgtctgtatatgttgcactgaaaaggttaatatttaatgttttaatttattttgtgtggtaagttaattttgatttctgtaatgtgttaatgtgattagcagttattttccttaatatctgaattatacttaaagagtagtgagcaatataagacgcaattgtgtttttcagtaatgtgcattgttattgagttgtactgtaccttatttggaaggatgaaggaatgaatctttttttcctaa

SEQ ID NO: 9813 - DNA, 1618 bp, Homo sapiens
gtcctcatacccaccttcccctgtgatcttgggtgccggtgctcttgctgcaaaatggaggccaacctcacaggggtgctgtgaggaccagggaggacaatgtctgatggcccctgtgggcactgggctggagaacagcagcccagcctgcctgcaggagtgatgcggccggcttccgtacctcctgccatggaactccactctgtcctcccttactaccccgtgaagtggggactcataggcttggggctggagactcccaggtgccccaggtgtgcccagccctgagagtctctgacctctgagcctggtatgacatcatccaaccagagctctggaaagatgatcatgtacccatagagaaggggtatatagacaggacccatgctcctacaggatgggaagggacaatattacccacacaaacccacattgagttagaaagtattgtaattgtttttgtgcttgagatagaacagtgttttgtctagtgcttagcaaaaggggtgaagttcagaattctggcatgtgtttgaaatcactgctgctccttgcaaggtagcaatgggcatgacattttccttagcagtaaaaattggggaaatacaggaaatgttcctctctgcagggcaaattgtgatgatgcaatgatttcaggtcaagactgcagcccacagggtgggtgcccattggcaggagaagtgtgaaagttgtatcatcacacttacctccccccaaccccaactcagccaagatggggaacactgaatatcccgcagggtcaagtatagaaatagccatgttctggcgggaggtgagagttcattacaatgagcaacactgttaaaaaaacaaacaaaaatctcccctgccatttataccaagtgctcttctcggagtccctcttcttgggtttttggtcttggattctcggttgactccatgattccctacattaggcctactgtggcctcccttttggaaggggcccaggggcagaagacctggcgggccagggcagggaggactggcagcctccaggctcacctccctttggcttcactctctttgctcctcagcttcagagcactgcatcctcaaaggccaagatgaggatgctgaattaggaaaaaaggctgtggagtctgaattttagttcctatcttgggctagaggggtcaaagaattcctgaagcttatgtaagggccggctggtcagctccctagaaccacgggctccacagaggtggcaaaacccagtgattttgccagtatccctgcagggacctgcggtacaggcaggttgaagatctgagactcaggaaccttggcccctttgtcacttacaactgtgtgtgaaacaggactaacagtttggactgagagcactgaagctgctgtgtgttgtgcatataacttaatgctgtgtgttgtggcttgcactgctgtgggggcggggagggcagtggtggggaatggctggcatgaagcttgcttgagccaatgctatgcttgctgggctttggctgactggctttgggccaccaactgtatttgcatagtgatggcttggaagtgtccatagaagggattgcaataaaggtgtgtcttccttctg

SEQ ID NO: 9814 - DNA, 1605 bp, Homo sapiens
aaggtactaagaagacagaaacaagcaaagccgccaccacagagcccgaaacaacccagccggaaggggtggtggtcaacgggagggaggaggagcagacggcagaggaaatcctcagcaaaggcctgagccagatgaccaccagtgctgacacggatgttgatacctctaaggacaaaaccgagtcggtcaccagcggccccatgtccccagagggctcaccttccaagtctccctcaaagaagaaaaagaaattccgaaccccctccttcctgaaaaagagcaaaaagaaggagaaagtggagtcctgattcatgacacccttgggctccctcctgcctcctctctctcctccccttcccttctcccatctctgtccctgcaagcacagggctaaggagggatagagtaggaccctggaccacattcggaaggggaacttagagatcacccgaccaacccttcgttttacagttgcccaagagaaatcaggtgacttgcccaaggtcacacagctagttagcggcagagcctgcactcgaattcaggtctcctgacttccagtccagtgctccttctactacacaacactgcctagttgtgggctgcctttgtttggatgctgtccaccaatctgagcctagggcaagaaggccagaaatgggccgtgagctctcacaggctcagactaaatcagaggtcaaggcttcccctgagtaaggtccatttcttcccaggaatccaatctcctgtggatggagctatctctacatttaaaaatctcttctcttttccactttgggtccctgccctgctgctcaaagtgactagccaaattgacccctccaacagaaagtaatctttgttcccaagggctgatggcttagcttgtactaccccaaacattaaccctgagctttcttcatggaacctcttgaatgatggatggaagagctataagaggtggtaggcataggggcaagccatgtaagctgaggattggggatggtttcatcaacataagaggccaggaacttgacccctttgaattgtgcatctcaggcacttcaaaactaaaaccaaatttagcataggaaaaagttgtttaatgctcagggcagaaatttggggaagttgaaatcctctgttggctttgggttgtataaggaggatcaaaacaacagaggaaatgctgactttctagctttgcatgacacctggagcaatgcactgtacctgcctcactcctgtccagtggtcaggtttcccctgaccttccctcacccccagaaacacttgcttacagaccgaaactggcatcttactcttggcaccttgacttgcaccctctgaggttccaactcagtcattctttgtccagcagaggagaatcagaaatgagcccttcaggattaatcctcttgcaccagctctcagagaaatgctgggtatccctgtccttgtccctatctgtccatcctggggcctggtaatggccacagttattgttttaaatgccaacactgtcttctcatgttcttccgtggggcattgattaatgagcatttgttggctcctaaaaattagacaatccattctcttgaa

SEQ ID NO: 9815 - DNA, 57 bp, Homo sapiens
aaaatgaaaaggcccagggttaccttctagagacaaataaatgcagtcttgaaagtt

SEQ ID NO: 9816 - DNA, 624 bp, Homo sapiens
gagcaacctgagcacagacaccctcagggtactccttctcccagccctgtcctcatcctagggccactaggggatgaaggacccatctcaagtcagctccctagactcatcccatgtcagctccctaggagccacagcaccaggaagggatgctgccttcatctaacagtataaagccctgttgtcttcgggttttgggaaaagaatcagtctgacaactggcggcacaagaatgggcagactgaagactgtgtccaaattcagcagaagtggaatgacatgacctgtgacaccccctatcagtgggtgtgcaagaagcccatgggccagggtgtggcctgagggcaggccagagctgaggggctgctcctgcttgccaatactgaccctcctcctcgatgccttcggagcctctgagctctgcttgttctctgggaccttccgttggccttgtggacttcctgccttgttctttgattcagccctttcaaacatgcttacctcgagtgacccagtgacatcagtggcttctcaagggaagagccttgctgtgcccctgtagcctcagcacccagcacaggcctgtcagacagcaggtcctcaataaatactcgctggatcaac

SEQ ID NO: 9817 - DNA, 833 bp, Homo sapiens
caggacaggctcccaagctcactctttgagctccaacgcttgttaaacatgaggaaatgcctctttcttccccagactccaggatgactttgcacgttaatttttcttgcttcaaaattgtcccacagtggcattctggagtccgtctgtcttggctggaaattctctgacgtcttggaggcagctggaatggaaaggagaattcaggttaaagtgggaggggtgggtagagaggatttagaagttccaattgccctgctaaggaggatcaagacccgtaatccggcataacaccctggggttttccactctttcagagaaacctcagcttcatcacatcaaagttactccagagcaaccaagcaattctcctgatattgtcatccagggcttttcttggccaaaccccctagaatttccatgtctctgcttagctgtgctggcagctagcagctggctgtgtttgcagtgcaaatagctctgttcttggaaatcctgctcatggtatgtccccagtggtttcttcatccacatcatctaaagcctgaacccgttcttctctggttcaagtcagtggctgacacggacttgtatctccttcagagctcggctggcacccagcctcccttctccttccactcccttagtacactggagtgccgagccctgccttccacccagcgtccatccagcccctgtcctcacctctccggcacctcctcctccttctgcatttcctatcttcctgtgtcttgtgcatgggaagcagccttcagtgccttcatgaattcaccttccagcttcctcagaataaaatgctgcctgggtcaagg

SEQ ID NO: 9818 - DNA, 2660 bp, Homo sapiens
cccccatgcaggcaggatgtggggggcaagatcaggagagtcaggcccctgggcctctatgccaggtggggaccagaagtcgggaaggcacctaccacctgccctggctttcttcccctcaactctggagccccatccccaccctccttggggggctcagcttggctcagatctgatgcttcaagaggctgtaacctcagagggcaccaaggagggtggcagagcctgcttagccaggaggccgaggtccctcagtcctcccctgtcccttccaaggtgggtcaggaggttctggccccgctggggcaggcagggcagggtctgtgaagcttaagagcagatggtgacaagttctctgggcaggtggccatggggaggggccatggcttggcatgtccaacagaaatagtttttgctgttgaacggtgatttctgtccaagtgcagatttccgtttgaataaagcttcgcttctaggtggcactgtttgccttaataccctgacagttcatcttcctttcttcctgctaaccttctgctctggactggactcacttttctgctccagggactccttttctgggtttgggtcttgcccttcccaagggactgttcttgtggcccttaatgggaagggggcaggggtgaggagctgagcctgctcaaggagtgggaagtggggctataggcagcctctctgatgcactctcttccatctctttccccaaggctccgtgactgtcaaactgggagtaggagaggggacaatttaggactgggctagattttcagaagaacatctacaatatcctatttataaatcttcctctgggaaaaggagtggtttctggctgaatactatcttaggctcaaggagaaacaaaataaaaattagcttccaggcagcctgtttttaaagaaatgggactaatgggagaagctgtttgtcactctaagagcatccaagccctggcccgtctgtgcactcttggctcctggggagatatatctgccttctaagaaggcaggccaggtcttgggcacagacctgcatttgttgaccttgcactccaactatagtgccttgcaagtgctcaacagtacatattggaatgaagtccctatgagagccatttctggccatgttctatacctcaaagtgaggctggcaggtacagagatgaactgtacacatgtgatacatttaagccactggaaaaacccctgtgcttgaaaatatttcctctatatcatgcctggagttccatcatagcccttcatttccttggctttagcatttaccttctcttaagaataccagctttcccctttccctgagaggaagagcacatgttggtctcctcttagtgtgaacgagattgccaggcccttttctcctatgcacaccaggatagacaaggcaggggatactggcagcctgcatcatcctcccattgggctgacagctggccctactttcctccctctgctgcttggtccctcaccttgatgatgtggcttcgccccctccactctactgccagtgttctcccagggcttgctaaatccagcagacccctttcctgtcttactagatctgggcagcatttgacatggctgatcaccccttgcttcttggatggcacttccctggcacctctgtggctagttgtcctacctccctggctgttcctttcaggcttccgtgcaggcttctccacttgcccatgcacagtagggtctttcagggttctgctgtgggctccctagggaagcccatccatctggatggtttcaaggatggtgaggaatttagagttgacctccagccccaacatccttcctgatcacctgaaccacagttttgctgccctctaggtgcacagacaattcaggtccatggcccagatggtacttgctgtcttctgcaaacctgccccttctgggtacttcccttgaccccgagatcactcaggagccagacaggaaacttattctattcctgttttctctttctgcccaccacatccaatctctcaaaacggtcaggtctaccttaacatctcttgatttgagccactcccactgtcatcagctttcacctggattatcgtgacagcctcctactgcttctctatcatgtggccagagctatcttcctaaaatgcattgcatagttgatcaagtcactctctggcctaaaaccttccttggctccctgctgccctcaggataaagtctggacccctcagcatggcttgtgagactcatggtgtccttgtccctgctcacctctctggtctcatcacttgccttcttgcattctgggtcccagcctcctgtatccagagatgcagtggctctccattgccactctgattcctcctttcttttggtcacagagaaagggtactttctctgtcaaatctcaacttagacttgacttcctccaaggagctttggctatactctctcctcccgacccccaccctggcatactacacagatcactctgggctcacttgcctgcctaatggtcatctccccagtagactgtaagctccttgagggcaaggattgtgttggaatttttgtattaacagtgcctggcttggtgcctggcacctagaaagcactcaataaatgtttgtttaatgaatg

SEQ ID NO: 9819 - DNA, 281 bp, Homo sapiens
tttatatttgcaagcaactaaattaattgacctgaaaaagcctatcaaatactatcaaaatgtactatgacattgagtccttcactgcttccatcatgtaaaagttcacagttaaagactgaattacagaaagattaaaatatatacatatataaatacataaatatgtatattatttagattaacaaacatatttgttaatttgaatttgaagaaaatcttgattactaattacttagggaacattattaaaatcatatagaaataaattattcctcttc

SEQ ID NO: 9820 - DNA, 2989 bp, Homo sapiens
cccaagacccacccgcctcagcccagcccaggcagcggggtggtggttgtgggaggtagaaacctgtgtgtgggagggggccggaacggggagggcgagtggcccccatacttgccctcccttgctccccctccctggcaaaccctacccaaagccagtgggccccattcctagggctgggctccccttctggctccagcttccctccagccactccccatttaccatcagctcagcccctgggaagggcgtggcaggggctctgcatgcccgtgacagtgttaggtgtcagcgcgtgctacagtgtttttgtgatgttctgaactgctcccttccctccgttcctttcggacccttttagctggggttgggggacgggaagagccgtgcccccttgggcgcactcttcagcgtctcctcctcctgcgcccccactgcgtctgcccaggaacagcatcctgggtagcagaacaggagtcaaccttggcggggcgggggctgcgtccaacctggagattgcccttccctatgccacggttcccaccctccctcaccagtttggacaatttgaaattacctattgctgctacttgttctgtcctctgaccttggggcaaaggagccccaggccctgtctccccagcatcctccctggtggccctgggcaggtgcactgacacccccaccttcccatcccctgctgaaccaggccctgttacacacagccgcctaaggcccgcggctcatgtgctgcccgcccccatatttattcactgatagagaatcttggggatgctggggtctggagtgaacatctcctccccttcatgccctagcctgtgttctagctgtcctggcgagacttctgtgagtgaagaggaaggggtctctggtcaaacccagcccccagggcctagggttgaaagccttccccggctccgggcattatttgggtttaatctcggagcctcactcctggactgaagtccggtgcctctgccttatccctggtggagatggaatgtggcccattgcctcctccctctcctgtcaaaaaccctgatcaggtagatttggaggcggccacgatttcctgtttggcccctgttcaccccagtgcactggccctgactccaggcgtgagtatggggaaggatacgggttcttctgacggggagcaagggcctccgtcttcccttccttaactctccccctttgccctccgccctgaaaaaggtgtccttgaagtcccttccacctctatgccactgtctgcttagcccagctcaggggtggggaagaggcgaaagcgtgggggaggtgagcgcagcggcagttctgcctcggagctgattgcagggccctgtgtggtctccggacagctgcgggaaggctgccgcagctgaagctgaagaggcggctacgtgcggtttgtcagggggattgggttgaaaactggccagtcgggatgactgggtgaaagaggagtagctcctgccactggcgttttgagtgttggcaatttgggatgcctcctggggaaggtttccgggcgtttggtgagtctctagatttttccttgctttctgtgtttattggtttttgatgttgtaaaagcaatgaatcccctttacaagaaaatcgaaaacacagaagaatgaaggacatgccagtccccgatcgctgctgtgagcacctcagtggctccctcagaccagatcccgtaggcagccccacagaccgaccctgaccccactcacagccaccctgaagatagactataggaacgggcccataccacacagactgctctccaatccctgagtctcagatgtttcatttatttcctacttttccactactaaaaaacagtgtggaatagacattattggcaaaattgctcatccctaatcctgaaaaacaggccagaatgggtaaagacttgtcaaagcttgcaacatagctacatggtgcacccggacctgtaccccctccccccaacacaaaaccagtgtctgggaggttcattttcctttaaactgatccagctggccctgaaccaattgtttttgactgagtatctaggagagcagtaagtggaacttcagacaagcccactgggtctggtccaggtgaggggcagggggcatggggctgggaggtctcaggggccttccctgggggtggccagcctggtagggggcagagaaggaaaagctgaggggggtccctgtgagggaggaaagaaggatcatttgccccgctgggtctcaaaggcagtgagaagagagctgaagaaagctctggctggctgacaggatccctgtgttgtaattggtccctcctttcagctctctagtgagatgcccgtgtctgtgcgtgtgcgtgtgtgtttcatacagctagcattagatgggtgatgtttcttacttatcatccctaactattgcaacttgaccttaaaaagacaaaaccccacaaaactcttcctgccacgggcttgcagattgaagcactttcgatgttgggcgctggcgtttgtgttctgggcaccaccgtgaccctgcccagatggctataatattattttatacacaaaccttttttttcataaatgttataattttgtgtctgtctttataaactattataagtactatttttgttataattcaaaatagatatttagtataaagtttttgctgttaaatatttgttatttagtaaaatatgaattttgctctattgtaaacatggttcaaaatattaatatgtttttatcacagtcgttttaatattgaaaaagcacttgtgtgttttgttttgatatgaaactggtaccgtgtgagtgtttttgctgtcgtggttttaatctgtatataatattccatgttgcatattaaaaacatgaatgttgtgcattttgtgattttggaaatactcaatgtggctcttctataggcttctagaataaaccgtggggacccgc

SEQ ID NO: 9821 - DNA, 2985 bp, Homo sapiens
gtgtggtcagcggcctggggacggagcactgtgcagccggggagctgaggggcagggccgtagactcacggctgcacctgcagggagcagcacgccaaccccagcagtcctgggccccctgggagagtgctcaacctacagtggagggagactgacccattcacattttaacataggcaagaggagttctaacacatttcgtacaaaaaaataatcaagtgcatttctgggccttatgtggggttgtcaaaactccactcagcacaattatgtgtgaagctgaaaaattgtagagtgcccatggggtagaagtagaatccttttatactttggttccttttttatttttattttttatcagaatcaaatctgagccttagtttcagctgaccagaagtggcaggaggacaggtggaggcgagccagattaggcctggagttgggctggtttggtggccaggctggtaaatttaggatattacaatggccagcccagatggctccctgggctggcatggggaggggagagaaggtggtctgcaccccacaggatgaactagccatgactagggtcctcaggcagtggcccagggaatcagggagcactggaggcctctgcaagattctgtgggcagctggctctgaatgtagccagcccacatccattccagagctgcagaaccagtccctctgagtgaagtccagtgaccctggagctagggtcccccttcgtggagctctaactgattcagggcccctgaagtgaccccagctccaggcaggaaaccccgagaaggaatggtgcttggcaggaaccatggacctgcacttggcctcttcgggaagatcctccttccaggccccaggctggatgctgggttctggggctgagagtggggctagactgggctggctgccttctgcggagcttctccagccaccaaggctgcctgccccatcccatccctttctaagcaggaaggtctcatgcctgagaatgcctaggccagctccttagacacctatcagagaagcagcatcaacctaggagcagtgggccctggctctgtcactaaatggcagtgagatgtcagacaaattcattcccttctctcagcctccactccctgtctgaaaccagaagactggatcaaggggttcccactggctcctccagcaagacctcgtctttgcttgtcctgctcagatgctggtcatcctgggcatgtccccagtgtggactctggactgggaagggggcaggcccctttggacctgcagttggcctcagcagaaggccttgccttgtgtatgtgactccatatcccgggagcagttgacctttgccaaacactttacagttctggaggaggaggtaacatagatgcctgggcctgatggtggggccatacccatgtgtcgcctctcactctggcagcctcagaggccccttgctgctggctcccatctccctcccatttgcagaccaggaaggaagagcaagctgtacaaagggaagcagagcctggggtgggtgtgagcagggtgacccctcatctgaaaggcccaaaccagggggaagcaccagcctcagtgcagccccctcctgaccccacctagaatggaagcctccacctgcagccccaggcctccctcccccggggtctccacctcaggggagacttaggccagaggtgaacattcatgtgtaggaagaggccgctgcagggtggcatcttagggtaggggaagtgtgctgaggtgggccttccatgggcatggccgttgcctctctgccagccgctggtgcccaccagctggctctgcagcacattgccctgaggggcctgccactctcctgaggagcagcccacctgctgcccgtgaggagggggagaagggttagacaagcctggaggacaaaacagcgggagtgtgggggtgccatggtgttggaggggcaggcctttttgagccaatcccaccataatgtgaatatgccagtgactgctgcgctgtgctggtctctaggcctgaactaggtgctggcatgtctgggtcgtcttttgaaaagctcacttcaagctcaccctgctcctacctatcataaggtcttattcttgtgcactttatcttgggaccaaaactgcctacccaccccttcccgccctccccctgccagaggcctggtgccctggcccagcctgtggcctcagcatctcataactcatttgctttgtctcccggatgatttccgtcatgctcccaaatgcagcttcaggtgagccaaggggtctgctcctgtggcggtgcagtggcaaaggatccagatagcctagggtgagggtgacagagggacagtgggctatgccactaggccctggtctggctttggaaagacctgtgaggggaaaccttcacccagcacccatgccccactctgctgaggccagaggaagggaggcctgaggggcagattggttcatgcctggggtggaggctaagcctggacacagtcagggcggggctggccagctgtgcgagaacacaagccacgcctgcgatggtgctgcacccctggtgtccctgcctggccctcctctggtcacttcaaacatgccctcaggcttggggatgcccttcttccattcccagacagcagtgtgagggtgcagggaccaagatgtcaagctggccgtggagtcgagctggccgacggacccctttcacctggttatgagccgacttctttggtgttctggcctctggcctgggaaaagggcaggagcctagaggaggaaaaaggctggtggacagacccagggtggtcttcaagcctggcccagtgagagtgaggcccccgcacgcaagcctcagccactcccaggggcctttgcagcgtctttttaacctcagaaaatttctcaatctatgtgatttgtgtaatactaatgagctttgggcaataaatacgggatttaaagc

SEQ ID NO: 9822 - DNA, 2139 bp, Homo sapiens
ccttcctcaccctacccccaggagggttggcatggacctattgctgcctgccctctctcctcctgaactctctcatctgcagtggggcatcgtctgtcttgccttgtcactccttgctcctctccctcctgcctcaactggggctgctggaagggggccctctggattccctttggaggcatcaggttctgtgcacaacttgtgtgtctttgggagccctgggtctttcccacctgcctgttttcatatccctcagctttgggggccccagggaattggaactcttcccccaagacagagcaggggtgaactgtagcttgatgcagtaatctgggacaagactggttgctagcacatactttattatcccccaaggatggtcagccatttcttcccacagccaaagccccatccccttcatttccctccagtccctggaggggcttctagtattactgggacaatgaccacgctgcctgtttgtctgtgagttacgggcaaccagcctcttcagcctcacacccattcccctgagagcaagaagcctgtgtggtctgggccagtctctgccatgtcctgagtctgcttcagtctggagctgtttgtggggcgagtgccatgtggacagtggtggatgatgtgtgtgcttcaggctgctccctgacccctctgacctttccacgagtgtcacatgggaatgtgtggggcgcaggggcgggtgcggagagagcacctttttgcttttcgagctcttgaccacctccaatgtgtaggtccctccaggctggggcttgggactgcttatgatttggggatcaagcctccatgtctattcttgttgcctgtccagatgccaaaactctgtgttgctgcagggtttgaacttttggaaaccaattaaaatgtgcctttggtgggcggggtcaagagcccctggatgtcgacctctcccgctgtgtggcgtccccctcccacctgttgaatacatagggatggctctctcagggccctgggaatgggaatggacagcactgctgtgggctgttcccctcccctaaagttaatctcttggtctggccaagttgctgctccctcaaccttcctgctgtcttcccctccctcaaccccaataggaggatcccaggataaacactgctgggcaggcgggcaggcaggcctggggctgccctgctcactctcattgtctggcctcaggacttagccatactagaccagtcagcttgcctggaagagggaggtcccactatgcctttgggagacacctatacttaggaaaaagcctttgttgtcctcccatccatccattaagctgctatctcagcctgtcccttctgccccaggggcttgcctggcttggctgcagtgcactttgaaatgaagtatctgtcctttggcccagcccctggtttgcttgtagaaaacatggtaggcttccccaaggcatctgcagggaactttggcagcttggggcaccctgaattagcaaaaatggggggtgatgaggtgctgaagaaggatacttaacagcttagtgaggaggcaagagctcctctgggaccaccacttcttcaggagagggcctgtgggcttgcttttggaaggcctcaggcagacacgtgccctctgggtgatgtctgtctgctgccaggatggagcagaggagcgccacacatggaggaaagcccctgtaacgttacctaccttaaactccactcatcaaatctgagaaaagtatccactggtccccagggtttcagtcatgcttttgggggtcattgggtattagagaagtaagtatcttttctgagagagggggagtcaccccccctactggggattcctctgggctttattcactcccagccctggccctgacctttgtgggcctccctaatgcccagggcatggatggcttcagaggagtttttgaatcgaagcccagggtccttgttgatgtttcttctcctagccacacttggaggaaagttgcaggtgggttgggcagggagcaggcatggttctgctttgctgtttgtcttcctagttaaggctctttataaagagcttgttcttcatgttttaagcactttatgaagaataaaacattcatgtactgca

SEQ ID NO: 9823 - DNA, 448 bp, Homo sapiens
aagagtttgtcccacattccagccataagtgactctgagctgggaaggggaaacccaggaattttgctacttggaatttggagatagcatctggggacaagtggagccaggtagaggaaaagggtttgggcgttgctaggctgaaagggaagccacaccactggccttcccttccccagggcccccaagggtgtctcatgctacaagaagaggcaagagacaggccccagggcttctggctagaacccgaaacaaaaggagctgaaggcaggtggcctgagagccatctgtgacctgtcacactcacctggctccagcctcccctacccagggtctctgcacagtgaccttcacagcagttgttggagtggtttaaagagctggtgtttggggactcaataaaccctcactgactttttagcaataaagcttctcatcagggttgcaa

SEQ ID NO: 9824 - DNA, 528 bp, Homo sapiens
gcaagagatgggtttatgggttggggcgccgccgttcggcgcgcacgagttccgggccgttcccctccccgctcttcttccaactcctcctcgcacgcccgagggccggcctccggtcccgcttccagtttccttgaagcgcccgccgcacacgccctattcagcaccagctccgcggacagttcccgcggtccaggcgctgtcacccttgtcagccgcgctttgggggaagtcttctgagaccacccagtgaataggcactaccctgggattcaagacagtcttttgtaactggcacacgccccacgccttcctctataacccccagagacaggctggggcagcgccaaggcggtctcgcgcgggactttgtacagcagtgtcttatccagcagccattggatgtaacgttttgctttgggttttttttccttttgttgttgttaatttttgtaaagcagacgctactctcaagcagttgacaaaactgtttatttttgcaattaaaattattgtgctaaaagctta

SEQ ID NO: 9825 - DNA, 222 bp, Homo sapiens
tctctttctgtgtgtattggtcagaatagaatccattcagctgtagcagcaagcaatccccaacctttcactgcaatgacctttcaatgcaataaaagcttattgtccattcacatctgagtcccatgtgattgcttgtggggtagcttctgggtttctgcttcattcagtctttttgattcccatctgtttcatttttctagtgccagcataatgttgcat

SEQ ID NO: 9826 - DNA, 111 bp, Homo sapiens
tttctttccttctgtattggtcagaatagaatccattcggctgtagcagcaagcaatccccaacctctgactgcaatgacctttctgtgcaataaaagcttattgtccatt

SEQ ID NO: 9827 - DNA, 66 bp, Homo sapiens
aatgtcagaaatattaacaaaaattctcagcattaaagaaaacattgattttcctttcctgactat

SEQ ID NO: 9828 - DNA, 457 bp, Homo sapiens
tacaaacctgtcctggaattctacctggagaccagagctggcctgaaaattactggtgtgacttttaattagttcaggtctaatcaggtttctttattgttcccttatgtattcaagcttaaggaaaaattgcattgctgtttacctctttgctgataaatttgcagtaattacagcattgcaggaaaaacaatctgttattccagtcttaaatttttctaaaagaagacaatattttagaactgaagcattgagaacttcccttgcaaattatttttaaaattctatcttgtttttctatgtatttctttctgactagacttgtgatatgcgtgtgtttatgtacagaaatttttagtgtttttgttatgttctgttattgacccaaaggccatctttattttctataactgttcaaaatttatattaaaatctacttaggagataatttctttag

SEQ ID NO: 9829 - DNA, 192 bp, Homo sapiens
ccacgccctggctgcatagatgctgctgcttaagaccttggatgaacttcactgacatcattcttccctaagcagtcaccaaaaaatttatatattttgctcatatacatttccatattataattatagaagatgtataatctatttagatgttaattaaaggaaacaaacaactgaagcttttgaagggtc

SEQ ID NO: 9830 - DNA, 484 bp, Homo sapiens
atgtttcttctagaacacagttacccccttgcttcatctattgctagaactatctcattgctatctgttatagactagtgatacaaactttaagaaaacaggataaaaagatacccattgcctgtgtctactgataaaattatcccaaaggtaggttggtgtgatagtttccgagtaagaccttaaggacacagccaaatcttaagtactgtgtgaccactcttgttgttatcacatagtcatacttggttgtaatatgtgatggttaacctgtagcttataaatttacttattattcttttactcatttactcagtcatttctttacaagaaaatgattgaatctgttttaggtgacagcacaatggacattaagaatttccatcaataatttatgaataagtttccagaacaaatttcctaataacacaatcagattggttttattcttttattttacgaataaaaaatgtatttttcagta

SEQ ID NO: 9831 - DNA, 2551 bp, Homo sapiens
catcaccttgcacttcaaaatatcctgtccagcttcacctgctttcagctactcacggaacccagtgttcatggtgccacaggtgaagatagagatggagtcagactatgacttcacagacatggataaataccgaagagaaactgacagtgagaccaccctctaggatgaagcagcttctcccagatgggagatggagagcctggcttagtcttcactgggagggtcttaacttctctgtgcctgtttccttctttatcaaacagagggagtccgtctgcctatagaaaactggagatctattgatgaaaagtattgcttagatgcaaagctctcccctttgtagtaattaaaatacctaaagctaaatattatattttattttaaaatgcagttcagcatagaaattctaacatttctttggaaataaaaaaatgcttgtttccccaaaccatagctaagataaaggggcaatagtcaattcatatttaaaacaaatatcaatttaaaattgtttaaaggttagatttaaatatagatgttctcaaacaaacttgtaatatacttttatgtcactagaccatctttggaatatttggcaattctgcatattaagaaatgctgaaaaggtcctatcttttctccctgtcacatccaatttcctaagggttatatgaaaagtttgaaccagccgggcacagtggcacacgcctgtaatcctagcactttgggaggccgaggcaggtgaattgcctgagctcaggagttcgagaccagcctaggcaacacggtgaaaccccgtctctactaaactacaaaaaattagccgggtgtggtggcatgcacctgtagtcccagctattcgggaggctgaggcaggagaatcgcttgaacccaggaggcagaagttgcagtgagctgagatggcaccactgcactccagcctaggcaacagagtgagactccgtatccaaacaaaaaaaaagtttgaaccatctgcattatgggccttgctccagaagtgtgactggggctttcccagattgaaaagccagttccaaaactctgttaatgaaagaaccaatgcatctgagtggataaatgtttctaaaataaaatagttcttgttaaagtgaaatttgaaaccacatgttaaatcaaaatgatcctttaaattagtatcactggtttttcatacctggaatcacatttcatgatacatttgggtgggtcctccctgcaaattttcaatgtttattcccaaagtcaaactcccattcatgtgaacaatacaggttagacagaggtaaggtcacattttacattacaactttgcaatattaatcaacctagtactttaaaggaatgattgaaaactatttgggaagataaaaaccagtttcaatgaagcaaacctattcctcatgaaacttaagatcagtcattttatcttcaatccacatttaatgaacaccaaccatgttgatttaatgcctactatgaccctgacagccacagtgcatctgacacttactttctccaaaacaactatgatttaaaccttgagtaaatcacttgaaccttgaggttagagttactatatttgctcaagatgacaaatgcaggtgctttcttttttaaagaaaaatgacactagatcattaacaccttgagtataggacaggtaattgcctctgtaattcccagcgtctagtgtagtgcctggtccatagaaagctctcaataagtgtttgattacatttaatctcagagctcccttccaagggatactgccaagaggtaaagctccaaacctctactcttactgagagcagaatttcttagaatttccagaaccatctcctatgcttaagtataaattcttgtcagacacagtggctcacacctgtaatcccgctacttgggaggcagaggtggggggaatcagcagaggtcaggaggtcaagaccagcctgggcaacatagtgagacccatctctaaacaaatgtttaaaaattagctaggcatgctggcacacacctgtagtcccagccatttcagaggctgatgcaggaggatcgtttaagtccaggagttcaaggctgcagtgagctataatcatgccactgcactccagccagggagacagctggaatccatgtcttataaacaataataattaatttttaaaaaaagtatttatcatccacaccaatcctggggaagctaacaatccacccttaacacatttcagttttaaaacctggctgatctggaatagaactttgtccaaattaaattgtagaaatgctatggattcaagagtaaacctgcttgattaatcaaacaagctggaaaactactgttaatttctttgttgtaaattgatcactgtaattttaccttacatgtcatttatattttgtatatacatgaacattttaatttccatagcttttaacaggttgacataatacttctccatgcagtaagtcagtcattttttccacttgtaactgtaattcaataaaatttaatcctgtctggtca

SEQ ID NO: 9832 - DNA, 33 bp, Homo sapiens
ttcttccttcagtgacacagaacttgaccgaag

SEQ ID NO: 9833 - DNA, 344 bp, Homo sapiens
gcactcctttcccctgctgtccccttcgaccctcagccctctggtgccgctctgcccgatgcacagccacctcagccagcccccaggtagaaacgtgggttaagctcttcctgccccgttcagcttcactcccaccctttcagcgtcctgccccttcaccttgacccgggttcccccactcccattccctggcctctgccataatttgttgttcaactgctccctccttcctgaggggcctcagggcttgtggggggtaggctgagaccccaccaccaaaggttaagtgaggtccccttgattgaggacttcaccccttgattaaagcaacttctgcttcagtg

SEQ ID NO: 9834 - DNA, 381 bp, Homo sapiens
gagagaaaggtgctggcataggatctgcccagaagagaaaatgacccatgcgcagttgggctctggatacggcgctgtctatagcaagttggccagtctggcctcctgttcctctgctggacctggggtaggctgcaggggtgggcagaagcccctcttaaattgtggttgccatggtaccgagggactcattcctggggctcgctgggacctccctaaacccttcctggaagaaaactggaaccaactctgccctacctccctgcactaaccagctttgaggatggcactgaagaacccttggagcaaacatacctcccttgtgactcccacatcaaccattaaagttatttaacagcagccttcacctggctcctgagg

SEQ ID NO: 9835 - DNA, 218 bp, Homo sapiens
agggagggagaggaggggagccaagacactcatgccactctggctctgaagggacaaaggcttctggcttttgcccccagccccttggataccagtaattcaaaccttcctcatttcatctcaggtgtctccttgctgtcatcccacatagccctggggtgaatgtgaatccagagtctatttttctaaataaattggaaaaaacattttgaactcta

SEQ ID NO: 9836 - DNA, 135 bp, Homo sapiens
cagcgccaaagagaccaacaagatgattttagcgtggactaggacacttaacctaagaagagtttcacttaatcattcaaatcactatctgaagggtcacggagcgcaaaataaagtttaaaaccctgctaccac

SEQ ID NO: 9837 - DNA, 444 bp, Homo sapiens
ggagcctgggaccaggagccagaaagttaagagctccccatctctagctggaaaatccagacatttggaattgcatattaaggaagcccagaactggaagcttggaggaaagcatactggagaataagctacaaagagcctgggcttaagaatccaagattaggggctgggcgaggtggctcacgcctgtaatccagcactttgggagaccgaggcaggcggatcatgaggtcaggagatcaagaccatcctggctaacacggtgaaaccctgtttccactaaaaatacaaaaaattagccgggcgtggtggcgggtgcctgtagtcccagctactcgggaggctgaggcaggagaatggtgtgaacctgggaggcggagcttgcagtgagctgagatccagccacagcactccagcctgggtgacagagcaagactctgtctc

SEQ ID NO: 9838 - DNA, 410 bp, Homo sapiens
agacaaagccgccgccaatcctgggctctggggccctggactcctcacctcgcgctctgcctctggccagagttccagggtggaggaaggaggtccacttgggcctcttccggcccacagtccagacgctcacctttcccggtttttttgtaagtttgttttgttgtctgagacagggcctcgctctgtcgcccaggctggagtgccgtggagcgatcaccgctcactgcagtcgcgacctcctgggctcaagcgatcctcctgcctcaacctcccgactagctggcattacaggcgtgcagcaccaccccaggctaatttaaaaaacttttttttttagagaggaggtcccgctatgttgtccaggctactttcccaatatttgagaataaagtcgagactctgccgca

SEQ ID NO: 9839 - DNA, 92 bp, Homo sapiens
gggccaagcccccaccccatcccactccccttccctccccagatatttatgtgaaatgaactgcagctttattttttgaaataaaaactttt

SEQ ID NO: 9840 - DNA, 315 bp, Homo sapiens
cctgcctgcctatggaatggagctgggttcatctcatcacattagattatccctcagggtgacaccaaagcacccagacagatttagaagcccaaagtttagggtcaaatgtaaaccctggaacctgagtcccaagaaatggtagactgggaatggaaagaatggggtaaaccacagtctacatagggaaggactctttccttagccttctcttattgattggagagggactgacatgctcctcattctcttaactttgccaaacccattcttgtactcccttgtgatctataaaagatttttctatgatgccaa

SEQ ID NO: 9841 - DNA, 151 bp, Homo sapiens
gctcaaaggaacaggatggcacccagagccgcaggacggagactgggggcagccctcacccaactcacaacaggctggatgggtgggtggtaaaaagggaaggatgaggctcccccaatgtcacattaaattcatggttttcattcaaggc

SEQ ID NO: 9842 - DNA, 787 bp, Homo sapiens
gtgccactgccctctgcaaaccaccactggcccctaatggcaggggtctgaggctgccattacctcaggagcttaccaagaaacccatgtcagcaaccgcactcatcagaccatgcactatggatgtggaactgtcaagcagaagttttcaccctccttcagaggccagctgtcagtatctgtagccaagcatgggaatctttgctcccaggcccagcaccgagcagaacagaccagagcccaccacaccacaaagagcagcacctgactaactgcccacaaaagatggcagcagctcattttctttaataggaggtcaggatggtcagctccagtatctcccctaagtttagggggatacagctttacctctagccttttggtgggggaaaagatccagccctcccacctcattttttactataatatgttgctaggtataattttattttatataaaaagtgtttctgtgattcttcagagcccaggagtcagtgctggtggttggagggacctgcccccactggttcatttaaccctctgtctcggtgccctcagaacctcagccagaaaggcaaggaggaaatcagagcaggagcctcatactcttggtgatctattcattctgtgacctcaggggtcacatataaggtcagtgtttctcgtccccgccggatctgcactgccaactgggattgggttcgaacagcttcataaacatcttcagcattttgtaccatctgctccccaatggccaaaatcacatcaccaggccgcagaccagccc

SEQ ID NO: 9843 - DNA, 833 bp, Homo sapiens
gtcaccagcaccagagcccagctgcccagcttaaccatatccatgctcaggttcacataatggctatctgtggtcagacttgctctctatccgcctgagcctctgtgagtgagggctgactgggaaacaacagccttcctgtcctgtttcagtgctgtcccactcctcaagtctggaagcgacacacccgagcctgtcctttctccagcaaggactttcattttctttagaatcatttgctactgtttacacaggtgaagattaaacacccagtaagcttctaccattgttaggagcattcataactcagaatttcttcttgtagctctgtgtaagcaggtggatgaggtcagatcacctttggtaaactggacctcaggaacaaggatgaggttttgaaagctcataaaagacaagtaagattgaaatccaagcctcatttcagagcctgtgcccttcccactacaccaccaggcttcagcctccaaagagacaagtgcttggtacctacatgcaaagtgtgtgtgctggggggtgggagggctgcccagaacaggggagaggatggtgtaaaaaaagacctactcctttcctgttaccctctccccacatgtaccaaccttcctgttgctccctccatccacagaataatagctaccatttataaaatgtttactctgggctgggagcagtggctcacacctgtaatcccaacactttgagaggctgaggtgggatgatcacttgaggccaggagttcgagaccagcctgagcaacactgtgagacccccccgccatctctacataaataataaaaacttttaaaaaaaca

SEQ ID NO: 9844 - DNA, 329 bp, Homo sapiens
gccacagggcctttggcaggtgcagcccccactgcctttgacctgcctcccttcatgcatggaaattcccttcatctggaaccatcagaaacaccctcacactgggacttgcaaaaagggtcagtatgggttagggaaaacattccatccttgagtcaaaaaatctcaattcttccctatctttgccaccctcatgctgtgtgactcaaaccaaatcactgaactttgctgagcctgtaaaataaaaggtcggaccagcttttcccaaaagcccattcattccattctggaagtgactttggctgcatgcgagtgctcatttcaggatg

SEQ ID NO: 9845 - DNA, 210 bp, Homo sapiens
ggatcccaaccccatgagctctccaggggccacaagaccatctacatacacagtggccaagcggccatcctaaatgagtaaacccagctgtgagacaagagggacaagtggggactgcagctaacttatcatcacacaactcagcctggctgattatcaccatccaggaatgggagcccggagtggactgattttctttttttcttttcc

SEQ ID NO: 9846 - DNA, 918 bp, Homo sapiens
ggagcagcaggaccccggaaaccactggaggccgcctggaaaggagagcgtctgcagggacagtgggcacaaggaactgaacccagctctgctaatattgtgatttcagagaaaaagcaggacatgccccttttctagccaggaggattgctcctttttggccaaatgtatggagaagtagaaaaatcaaagcagttcatcaccctttccaggtctcggaatggtgctgaaaaatcctctccaacactgtggatggagatcggagaaacgcgactgtggtttctcttgatttctgaggatctcagaagtttcagcagacttccttgctctgtgttattcctttgcaaaaggaaagatcattatagcatgagggctgggaatagcagggtgaacttaacccaataaatgcaatttcctaaatgacttcatgctatggaggtgattctgattcaaatagcatgatccatgcttattatttaaggctgatttttaaaatcttgtgttgcaagggcaacctcgtccattttaactggcacctcagggattaaaatcctactttttagtgtagttcccacctcattcatgaaaatgaatagaactattgtattatgggagatgtgtcagtgaactagaaaatgtcaataacctcaaaggatgaagggtttttattttaaatagtttataaaatatatattgacatgcatatttgaaaatgctgcataaaaataaaagtggtgtgttttccccctctttggagacaagaaaattttattatgactctagataattgtgattttaaacactttgtttttttttttttttttaattggatttcaaagaaaagaatggaaatgagaggtaaggattaaagccaaagttaggatgggaattaaaaaaataaacattacataaaatctt

SEQ ID NO: 9847 - DNA, 2498 bp, Homo sapiens
ataaactttattggaaaatgctaaaattttaatatagttacactcagttcctttgtttgagaagaagctggtgcctctctcttctttattccctgtaatagaaggtaggatttgaaaaaaagcaggactccacctctgtattcccccgtgctttaccttctggcatcatgaaaagctgccatgattctgtggtgttctaaggaattaaatgcactggagctttaagagctcaacgtgtttccctttgattcttttggctggtctttcaattttcttaagaggggaactggagaaaccttgctaaaggttttagcttaagtgagcatgctactaagtcttctgtcctgaaccacaataatatcttttagttctctttaactacctttatttaaaaataagtcaatatgaaaatctcagttggagtgaattatttgctaagtattaaatgattaaggcatgtgccgattgtcaaattatccttcagaaatctgtaccaatttaatgtaccaacataagcataagtgagtgccaatgaatccctaccagcagtagttattatcctttttaaaaatgcattgaaaatttgaaaggtaaaaatcttattttaatagcgtattttgtgttggctattagagagtaaacatattggttttggccatttgtaattatttctgaaatatccatctttttcttatggactttaagacctttatatttttaaagatattgattttttgcccatgcttgtggcagaagttttccttatttgccatttttcttttattttttttttaattgtattttttgagacagggtctggctctgtcacccaggctggagagtagtggcacaatctcggctcactgcaacctctgccttctgggctcaagcaatcctcccacttcaacctcccaagtagctgggactataggcatgcgccaccatgcccagctgatttttgtaattttttgtagagatggggtttcgtgacattgcccaggctggtctcgaactcttgagctcaagcagtctacccaccttgacctcccaaagtgctgggattacaggcttgagcaaccatgtttggcctttcttttaaatttgttgatgttttttgaagcattaagtcattacttattagcaagttactattttgtttttttgtcattggtggtaggactaagaaggaaacagatattttaaatactcacaacatgtgattcattttctgataaaatatttgtctaataaaacagaggcaagataatttaatcaaaagaaattaagaaaattttccaaaaatgttagtttactagtaatttttctaagtctacttattaaataacttaagggaaactgtaaatatattttgcaaattgttgttcaaaagataattggaaaaaattgaatatattgtaggatttgaatatacagcctacttttatgtcacctctaccttcaaaactacatataatttattttaggagttggatttgttatgtctgttgcagtgaggacttgtgattcactggtatgaagaattttttgatgtttatattagtaacaaaattatacaaggatagaatctcatctagaaaatgcaaactattgttgaaaagcagttagcatttccacacaaccgctgtccccagagataactgctgttttcattttaatgttatccttttagaccttttctctatttacaaaaatgttacgtgtttctatgtgtacatagttttgggttttttttttttttttacgtaagtggcagacactttattgcacatgaaatttgtaatttttttctatttaagtacacatttggaaattatcctctgacttttggatttttaactaaatatgttggacgtgttcctttatatatttaagttcagcacagaaactttcctacctttttgtggaagataaaatattaaaactgctttcaaaactacaaattgacttaaactgctatagtaattttcaattaaatttcattatacctggagtttgaacgttaaggtttttatcatatactgtaattcaaaaatttacctaaatctcaatgtaaaattcttttttttcttattactatgaaatggatggaataaggagggggaacacaactagcaagaacaaaacattgggttggcaattgatatcacatcttaattctttccctgaatttctttcagctttttgttcacataaagaatgtgaaatttttacagaatcagacagatgactttaaagaaatttttttcatgatggaaaaatcacctcaattgatttttccatttcttaggtccttgaataaatgatacttaggtatacctcagaaatgccatatatgatacaaatcctgcaaaagacatcatgagaaaataccagcagtatctatcatgaatgtagaaataaaagtccttaaaataattagcaaatcaaatccagcaatgtataaaaaagataatagggtttattcctggaaagtaagg

SEQ ID NO: 9848 - DNA, 1644 bp, Homo sapiens
accatgatcctcctaaaagcatttctactgcggggaaggagaggtaaatgtttgaagccctagaggtgtctctaatcactagaaagattaatgacccttttgcttttgggttttgctcagtgtgaaaggttacttaattaaattacaaccaccaggaaattgactgctttttttttttttttaaatggttgaaacttgaaggaagttcattcaaggataagttggaataaagcactatgttaaaacatctgctttttaacaatttgtatacaggggttggacttaaaaacacacatacaaacaaaactcttttcattctgaaatttctgtctggttcttggtgtttgactgttgtaatggagtaaagaagagggccagcttaatttaaaaataaagtgagtttaccaaaattccagaaggtaatgaagatttaaaccaaagagcaattttcccaagggttgattttgttgtaaatttttagttttaatgaaagcatgcaacagggatctcacacccatgttacttgccatttagttattataccagcatagagaatgtcagaggcctactgtgtaattgtatcaggctcctaaggcttctttctttttttttttttgtttccttctttcctactttctttcactccttcctttccttcctttctcttccttctttttttgtttgtttgtttgttttttaattactgggatatagatccgatttcaaaggtttttatgcactggctatttgtgtttaatcagaatgaaacttcaattccatgctttggctttgtccctggtaactaaaatcaggtcacaattttgtggatgatttagcaataataaaatggcagtcataacagggactgtttgtcagtattgctgtcatccccaaaagaaatgatatgtattcttgttaaacttattaaaaaataagtgatacaaatatttataaataaaaggagagaggtttgagttctgggtatcctccctttctgtaacagcctcaaataaaggtgtaccttccatgttatattatttttgtttttataagaataaatttggacccggtttctgattatttaatttaaaagatcacttacaggatcatgttagtgagcagacaaatagtcacaaatttcaaacttgtcaataagtaatgctggatgtaaattgttcttttcttggtaatgttgatcattatgtgcaaagactgactactaaggccttgttgctggaagaaactagtgaagagaggttaaattctggcaatataatgttttagtatctgattttagatgatcactctttcaaaagacagttttaatgagtaattaaagatgttgccctttctaatgctagttaacagttggaaaatataattgctctttgatagcatatactccaatttttccatagtcctaactacaaatgctaatgaaaatgttttcagacaaagcactgaatttgaaataatctctaactcagtacaatttggactattgaactgttcttcaaagaattcattttcttcttttttgtgtatcattgaaaataagagaagtaatcccagataataaattcctaaaaggaaactgtataagcaattgcccttaaaaattaaaaagaataaaagattttctat

SEQ ID NO: 9849 - DNA, 191 bp, Homo sapiens
aggaagctgaaaaatggatgtctagaactggtcctgcaattactatgaagtcaaaaattaaactagactatgtctccaactcagttcagaccatctcctccctaatgagtttgcatcgctgatcttcagtaccttcacctgtctcagtctctagagccctgaaaaataaaaacaaacttatttttatccag

SEQ ID NO: 9850 - DNA, 219 bp, Homo sapiens
tgcaggagggaagtcagcagcctgtgtttggtgtgcaactcatcatgggcatgagaccagtgtgaggactcaccctggaagagaatattcgcttaattcccccaacctgaccacctcattcttatctttcttctgtttcttcctccccgctgtcatttcagtctcttcattttgtcatacggcctaaggctttaaagagcaataaaatttttagtctgc

SEQ ID NO: 9851 - DNA, 373 bp, Homo sapiens
ttgtcccagtggctctcaacccatgcgctaccaaatacgcctgggcagccgggacgggccggcgggcaccaggctggggtctccttgtctgtgctctgatatgctccttgactgaaactttaaggggatctctcccagagacttgacattttagctttattgtgtcttaaaaacaaaagcgaattaaaacacaacaaaaaaccccaccccacaaccttcaggacagtctatcttaaatttcatatgagaactccttcctccctttgaagatctgtccatattcaggaatctgagagtgtaaaaaaggtaccaatcattgattttttttttttttgtaaactaaaatgtttaaaataaaatagcatttacagtt

SEQ ID NO: 9852 - DNA, 216 bp, Homo sapiens
aagaaaaaaaaaattcctaaaactgtggaatggatcacgtagacatgtaacccagcagcagtttgcttctgttgtccactgattaatcagcctatgtgcctgacactggtcttgcagtacaactggaagccaaaacaaggtggaagatgtcctgaattaagatgttttcaccacattgtattacagagacagccaataaatctactatttgatttc

SEQ ID NO: 9853 - DNA, 4712 bp, Homo sapiens
cagaatggtatattcctctggaaaaagatgaacgtcaccaatggattgtgctgctctcgtttcagctttgatttttttgtccttgagaaccttgtcctccctgctgatttgtttctaaatcaaaagaaatgaagaaaaaagtactgtgacctgagagacaccctcctctagaatttagtggcgggtctgggctggcagaggtagggggctgctttgggctttgcacctgcactttggtgacattgttcttctgtgttccctttatttatgctggtggcttccatccgttcctcctctgagggtgagtggaggggtatatggaaacacggctatgaccaaagggagatcccagcctgggcaggctgcgctgctgaccaccctccctggggcccgggctctgtaggaaagttggtccttgactgtggcattgcactctgcactgtttctctctgcagacctaggggaaaactgcaggtggaagtgcttttctactaaggcctcttactttgggggggatgtgccctacagaagacatagaagatggggaaatgccaatgggcaaagagctactttgaatacataattctcttcaaagacttcagcagcaaaccaaaacagcaggttaaaaaaaaagatgcttttttgggtgcaagtctaacctgtctagcatgagatcttcttgattttctgattattttatgtagcttgagacaaagtgaatcaacttccacttagttgtaccgagcataaaacagaacttgggcttcctggcagtgaggccactgtcccatcacagatttttaaaataaatatgatttgaagtagtgtgatctttcacacaatcatactcagtaggaactttttgaaatagggcaagtttatgtttcatgcgagaaaacatgaaggagggttttggttttggtctgcagtttttccaaagggcttttatgagatacatttcccacaaagtccattttgcctttgttgcctaaaacagacaaaatagacttagatttattaatagaaactatactctctgccaattttacctcagtgtatttaatggtcctttaatctgatataagatgccaagggtatttgataaaaattcttcttccatgccatgtcaggagttaatacaaatgaagaaattccgtgggttcccctgggataagtgagggtagtgtcttggacaacactattgtttgaaggtttatcttttctaatcatgctctaccgcattgtagagagcctaaagagagttgtttctgagctgatctcagggaaatacaaataacttgggagatgagggaaataagatgaattctgtgctgtcaaggcagtaagtctgaagaaaggaccatgcttcttatattatcttccaccttgcttaaaacagcccatagctttgagttgacattttcattcttggcggatagcctactttatgaaggtaaggaatgaactcctacccttcttgggtcattctctgtactgatgcgttagtcttataatactttgcaccaacctgaggaatcttctaggcttctctagcatcccctaagactgtggctatttcacgtctctctccctgcctgccttccttttcccttcctttcccctcctcatgttttctggttgtgcccatctgtaccagctcctttccatccaccttcgtatgcacccagatttttctgttcccatctgtcctatttgttattcatcccgctgctcaacttctccagtatgttgcttcccttaagttgccattcattctcttcatgacttttactaactcacttcggtctctgtctgtcaactaaacttttctaaaggttaccagttatccaatcaccaaatccatggctttttctcaaagcttagtcttgtccttggcagaactggacactattgaccatccaaatggaaattcccctttcttggtgtctctgacaaatggtcctttgccttatcttgtgctggtggtgaagaggccctcaaagccaggcctctctattcctttgactgtctcctcagccattaacccattcttcatcctcggagtgagtgattcccaagtctttgtcttggcttaatccctaaagaacccagttctgctggtatcgaatagttcagcttggttgtcattgaaaggaatttctctcttctgtccatcagcctgtccctcccaactgtctaggacagtcttcggtcacctaaattcctaactgcagacttttgccctttttctctctcatcaccaaagtcccatccatttttttttaataaaagatcctcagctacagtctttccattttccttgcttctcttattgcacacccccagcccattttgcttctctcttggattttgttttttcagatccacatttattgggtttcctgtccagcttcttggaaaggagctcactcttggaaagactgatctttccaaaatattttccctggtctgaagctttggtgtgaacttctcaaggcttagagaatccagttacagaccttttggggttcaggatgctatagattgacaccctcctgcctgtttttctctgcatcccaacctggccaaggcccctcctgtggggtgcccatctgtgcctttattccggctgtgccctcgactttccagcttcccatgtttctttggttaggtttctctcccttccttctttctccttccccaatccgcctgtttcgtcagggcccagtttgtttcctcatacaccttcctcactaccccaccccacatggttgactctttccctcagctccaccagctcttcatcatgccactcatttcagaacttgagcaaaacagggcagtcaggatctgatgtctttctggtctccctaagaaaactaagctcttgagggacagcccttggcaatgctttcctatctgctgatcatggtgaccttccttaggacttccagagttcagttccttctggcagagaggttttctttctccatgccatatggatgtgactcaaatgaggggtcccacagcttttcctggctaccacttgctgtgaccttatacatgttggggtttgctcttaaagaggagagcaggaagaaaggttggtttcagaaaccaagagggtcggcagtggacgcgtacattttgtcacggagtccacagagctgagcttttgagcagactctgagaagtatcattgcttgtgttgaaagaatacaacaggatttaagtttctctttagaaattgcactgaagaaaggccgggcgcggtggctccccctgtaatcccagcgctttgggaggccgaggcggggggatcacgaggtcaagagatcgagaccatcctggccaacatggtgaaaccccgtctctaataaaaatacaaaaattagccgggcatggtgacgtgcacctgtagtcccagctactagataggctgaggcaggagaattgcttgaatccgggaggcggaggttgcagtgagccgagatcgtgccactgaactccaacctgccaatagagcgagactccgtctcaaaaaaaaaaaaaaaaaagaaagaaatagcattgaagaaaataccgcacatcagaggaaagcttattttctgcatggtgtcttttcaaagatagaatatttgaagcatgttttctagcgattgtgtggatgagggtgagctggctgaggcatcgctcaagctggggggtggtgtgtaagaagcacgtggagccacaagaggcacctcctatagtcagctaagggcttccctttctgcgcccagcttttgggtgaagggtgatttctattagacacatctgtgcttcagtcatagatgttaatagaggaagcagttttcctgctgcagattcctgaatagagttgctgaaagagtctacttctggactcaggggaagttgaaggccagtctgtgtagaaaggctgaggcaacggggaaagacctgacagctagttacatacgctctgacatagtactcccatgatggcttccagtgacacatgtgctgatagaattctaaacctctggaatttccctgctggcgacttctatggccgttgactgtacagggtaacctgatgccagatgctatgggcgtgatgagaactagagcattgcagcatggaggaaactgtgaggcaccagatcctgtgcttctgcaggccattttctgaaaacccctgttaggaaggttggatttggcgtgacttgcttgagcaagagtcctggggagagattttgaggtttaatttaacggtatatccagagctaacagtgactcaactcgtctagttctgcaagtcagatgtacacttagagtctctctgtgaagggtttgggtctgagctgtatagtatgtcaaactgccagtaagccagcccctcaccctctgatagatattcctttaatgcaccagacttcatgtttgataaatgattaatggttgaaattgtttctcttcttttgtgttttcccagttaatagatggtcactgtttccacaatgttttatactttcagctttttgtaacttaactataattacttaattttatttttttaaagcttgttgtggtctaatgagaagtatttttcagtgcataatgtttttctgagcttctgtaaatgccatcccaatgtggtttggttttgttgaacagaaaccaaaataaatttcaaaatgttaaagcaatgg

SEQ ID NO: 9854 - DNA, 1143 bp, Homo sapiens
ttccatcagggaggagtcagaggaatttgcccaatggctggggcatctcccttgacttacccataatgtctttctgcattagttccttgcacgtataaagcactctaatttggttctgatgcctgaagagaggcctagtttaaatcacaattccgaatctggggcaatggaatcactgcttccagctggggcaggtgagatctttacgccttttataacatgccatccctactaataggatattgacttggatagcttgatgtctcatgacgagcggcgctctgcatccctcacccatgcctcctaactcagtgatcaaagcgaatattccatctgtggatagaacccctggcagtgttgtcagctcaacctggtgggttcagttctgtcctgaggcttctgctctcattcatttagtgctacgctgcacagttctacactgtcaagggaaaagggagactaatgaggcttaactcaaaacctgggcgtggttttggttgccattccataggtttggagagctctagatctcttttgtgctgggttcagtggctcttcaggggacaggaaatgcctgtgtctggccagtgtggttctggagctttggggtaacagcaggatccatcagttagtagggtgcatgtcagatgatcatatccaattcatatggaagtcccgggtctgtcttccttatcatcggggtggcagctggttctcaatgtgccagcagggactcagtacctgagcctcaatcaagccttatccaccaaatacacagggaagggtgatgcagggaagggtgacatcaggagtcagggcatggactggtaagatgaatactttgctgggctgaagcaggctgcagggcattccagccaagggcacagcaggggacagtgcagggaggtgtggggtaagggagggaagtcacatcagaaaagggaaagccacggaatgtgtgtgaagcccagaaatggcatttgcagttaattagcacatgtgagggttagacaggtaggtgaatgcaagctcaaggtttggaaaaatgacttttcagttatgtctttggtatcagacatacgaaaggtctctttgtagttcgtgttaatgtaacattaataaatttattgattccattgcttt

SEQ ID NO: 9855 - DNA, 145 bp, Homo sapiens
gggtgggcgtcttcctgccccatgctcccctgccccccaccacctgcctgcttgcttctctggctgcctggtcagtgcagaggtgccccctgcagatgttcaataaaggagacaagtgctttcccagctcttttcctgcaccacc

SEQ ID NO: 9856 - DNA, 852 bp, Homo sapiens
agggggccagatgttgggtgcagatgtagaagcagccagtcacagacccattctatgcaatggacatttatttgaaaaaaattctcaaaagttttttttttttttttgggggggcggggttctaaagctgtttttaactccgagattacaacttagaggaaccaaggaaataaagcaaataagatttaacaacccaagattaagaggccaggaagaggttagacgcaatgtgaaactgtcctcctaggataaggtttaaagtggctttttgggggctgggtgccgtggctcacgcctgtaatcccagcattttgggaggctgaggtgggcagatcacttgaggccaggagttcgagaccagcctggccaacatggcaaaaccccttctctactaaaaatacaaaaattagccagacgtggtggtgggtgcctgtaatccaactacccaggaggctgaggcatgagaatcgcttgggcccaggaggtggaggttgcagtgagccgagatcgagccactgcactcctgggcaacagagcaagacttcgtctcaaaataaataaataaagtggctcttggggaaaagcaatttaatgtaccacgatgaatagctaactgttcccaagtgtttgctatgtgcaacacaccgcgtgagcagtgttacctgcattattacattaggctgagaggtaaaataatttgcccgaagacatacagctagtgacgaatggactgatggtttgaacttaacgtctatttgacttaaggtcctgcaccctgccacttgtaattttcagaatcactgataatctgaaataatgcagcttaaaacatgttttcttaattaaaagtat

SEQ ID NO: 9857 - DNA, 528 bp, Homo sapiens
ggtctggggagggtggctggcccggcctccacagcaccccaccccatatcttctttccatttatttcgtaccaaaaacaattttgagaaagtattctgttgggatctgggcttcctcacttctggagaagtggccatcccatgcccacctgtgccatggaggagtgggccctgccagctgccacagctgcatgacctgcttccccaccccacggtgtcgttttgtttttaaaggtcacctgtcctcactcacccagccagcccttcaggtgccttctactcccagtgccaaagccagaccactggggtttcctgctgcaggaattgggggctgggaacagcagaggggatagaagtctggtggaggtggagtgggcacgccttagcctacggaaaggcccatttctgggcccactgagctgcactgggattcttcactctgcccctcacttcctttagggcaaataacacagcagaaccacgtgggtattttagtacttttttttatattaaaagaattctaatttgc

SEQ ID NO: 9858 - DNA, 2289 bp, Homo sapiens
ccatgttgaaggcgttctctccaggctggattcactgcactcggaagaattctgcccagggaatttagtgtgggggtaccaggaccagtttgtctgatcttgagacccccagagctgctgcatccatagggtgttgcaggactacacctggcctgccttgcagtcattctttcttatatgttgacccatttgcccagcctgatattctggaattcttttttttttttttttttttttttttttgaggattttgtgtggctaatgtgttctagaagcagagactccagggagaaccagaatttatgaagcctcgtgcaacatggtgctttctcaccgaggtcatatgcctggctgctgctgttccactcagctccatgagccacgtttgttattttatgtttcttctgtgcttttgctcatttccacccatgtgtttatagaccttttttcagccctttttctttgttcctttccctcatctttttgcctcaggtagaatccatcagttttcctccccctccaaatgactgtgtacctccagctgctcaggactttggaggtgggggcggggcctggggatctacccttctaaaaaactctccaagtaattctgataccaataaagtgggagacctccatttttgaggcctatttgcaagcatgtctccctccctttccatggctttttcgtttctcgcatgttccactgctttgcactgtctagacaggaaacctaggaagatgttggtgctaaactgaaaagatttcttacagcaaaacctgcctcggccagggctacagaattccaactttcaacttgattcctagccgtgaacagactgtcctctgctcagactaaaagggaattataaacaagtgggaacttactctccagttgtgacttaacagttctgaacatacctacaaagggaaagtcaatattagcaataattgcctgattgacagcacgccagagggaatgaaatgaggccttctctcctacctcccaggagtatgtaactcagatccttagcataaagatccccaggaataccactgctctaacccggtgaacattttttctaatgcagggttaggcttacgtctgaattccacaagacatcctccccctccagtacggaagttccaaggcacttgttttccagcatatcagcctaacctcagtgccttgaaatatggctttaagcctttgagaactgagatttcctgaaaccataggcccttgccccaggggtttctccacatccgggtgttaagacacctgatggcactgttggtttgtcccctataccccagaaaatctatcctgcaaggtagctacttcaatcttgtcattaaaatgtgtcaagtcacagctcgcaatgccaaaggaatgctggggcagtaagtgaggtggataagtgagaagggcctggtggtgaaagcggccagggaccagaatgctccagacctacagagctggtcaaggttaagtgccttaaacttaccaatcctgggctcagttctcctttgaaaggagaaagtctttgtcctctacttaggcagctgggctagaagtgccttttgacttctaatgttaactaccctccaaagcctcctgggtcaagaaggctctcccaaactccacccctgttcttcctggtcagagaaccagtcagtcattctagtcttctagtccttaaactgatctgatgacttggaacataggatttcactgcaagtctggctttttagtctggaaatacatttgaggtctgttttcgcacagctggatcacctgtttcctggttttattacacaattcagaaggctagaagaggagtttgggggcttggcacctgaaaatttagaccgcattcttattaagtaaaggaagaggtagggaggccgaggcgggcggatcatgaaatcaggagatccagaccgtcctggctaacacagaaaccccgtctctactaaaaatacaaaaaattagctgggcatggtgacatgtgcctgtagtccatcccagctactcgggaggccgaggcaagagaatcacctaaacctggaaggcggaggttgcagtgagccgagatcacaccactgcacttcaggctgggcagcagagcgagactccatctcaaaaaaaaaaaaaaaaggaagaggtaaaaggcaaggcagcatttaataagtacctgttgtatccttttaagtgtttgttgtggtaatcctcacaaagaccgggactgatggaaactccttgctattaaactttttttcttgagg

SEQ ID NO: 9859 - DNA, 1538 bp, Homo sapiens
aaaaagacaccgtcctttaaagtgctgcagtatggccagacgtggtggctcacacctgcaatcccagcaccttaggaggccgaggcaggaggatccttgaggtcaggagttcgagaccagcctcgccaacatggtgaaaccccatttctactaaaaatacaaaaaattagccaagtgtggtggcatatgcctgtaatcccaactactcagaaggccgaggcaggagaattacttgaacgcaggagaatcactgcagcccaggaggcagaggttgcagtgagccgagattgcaccactgcactccagcctgggtgacagagcaagactccatctcagtaaataaataaataaataaaaagcgctgcagtagctgtggcctcaccctgaagtcagcgggcccaggcctacctcactctctcccttggcagagaagcagacgtccatagctcctctccctcacaagcgctcccagcctgccctccagctgctgctctcccctcccagtctctactcactgggatgaggttaggtcatgaggacaccaaaaacctaaaaataaacaaaaagccaaacaagccttagcttttcttaaagactgaaatgcctggaagtgtccctttatttataaaataacttttgtcatatttcttatacatgtttcttgtaagaaattcagaaactacagacaaagagagtggaaattacccactgtcaggcctctgagcccaagctaagccatcatatcccctgtgccctgcacgtatacacccagatggcctgaagcaactgaagatccacaaaagaagtgaaaatagccagttcctgccttaactgatgacattccaccattgtgatttgttcctgccccaccctaactgatcaattgaccttgtgacaatacaccttccccacccttgagaaggtgctttgtaatattctccccacccaccccacgcccgcacccccgcacccttaagaaggtattttgtaatattctctccgccattgagaatgtgctttgtaagatccaccccctgcccacaaaaaattgctcctaactccaccgcctatcccaaacctacaagaactaatgataatcccaccaccctttgctgactctttttggactcagcccacctgcacccaggtgattaaaaagctttattgttcacacaaagcctgtttggtagtctcttcacagggaagcatgtgacacccacaatcccacctagcccaggagagagctacggcagggtgtgtgttttgacactgagcttggggctttttccatcttctccccacagcctctggctccacacctccaccgttcaagcgccagaaagagctgtctatgcagcctgctcttgggcctggggatgagacacacaattcattggctcctggattttaagtagacatttgtaaatctatagctaactactgtccttaaagccattgtttccattacaaaatccaactctctgagagaaaagggtgttttaaatttaaaaaaataaaaacaaaaaagtttgattgag

SEQ ID NO: 9860 - DNA, 821 bp, Homo sapiens
ctgcaaaggaaaagccaagtgagacgggctctgggaccatggtgaccaggctcttcccctgctccctggccctcgccagctgccaggctgaaaagaagcctcagctcccacaccgccctcctcaccgcccttcctcggcagtcacttccactggtggaccacgggcccccagccctgtgtcggccttgtctgtctcagctcaaccacagtctgacaccagagcccacttccatcctctctggtgtgaggcacagcgagggcagcatctggaggagctctgcagcctccacacctaccacgacctcccagggctgggctcaggaaaaaccagccactgctttacaggacagggggttgaagctgagccccgcctcacacccacccccatgcactcaaagattggattttacagctacttgcaattcaaaattcagaagaataaaaaatgggaacatacagaactctaaaagatagacatcagaaattgttaagttaagctttttcaaaaaatcagcaattccccagcgtagtcaagggtggacactgcacgctctggcatgatgggatggcgaccgggcaagctttcttcctcgagatgctctgctgcttgagagctattgctttgttaagatataaaaaggggtttctttttgtctttctgtaaggtggacttccagcttttgattgaaagtcctagggtgattctatttctgctgtgatttatctgctgaaagctcagctggggttgtgcaagctagggacccattcctgtgtaatacaatgtctgcaccaatgctaataaagtcctattctcttttatg

SEQ ID NO: 9861 - DNA, 996 bp, Homo sapiens
acacagaaaacctcagttgaaaatgcaactctaactctgagagctgtttttgacagccttcttgatgtatttctccatcctgcagatactttgaagtgcagctcatgtttttaacttttaatttaaaaacacaaaaaaaattttagctcttcccactttttttttcctatttatttgaggtcagtgtttgtttttgcacaccattttgtaaatgaaacttaagaattgaattggaaagacttctcaaagagaattgtatgtaacgatgttgtattgatttttaagaaagtaatttaatttgtaaaacttctgctcgtttacactgcacattgaatacaggtaactaattggaaggagaggggaggtcactcttttgatggtggccctgaacctcattctggttccctgctgcgctgcttggtgtgacccacggaggatccactcccaggatgacgtgctccgtagctctgctgctgatactgggtctgcgatgcagcggcgtgaggcctgggctggttggagaaggtcacaacccttctctgttggtctgccttctgctgaaagactcgagaaccaaccagggaagctgtcctggaggtccctggtcggagagggacatagaatctgtgacctctgacaactgtgaagccaccctgggctacagaaaccacagtcttcccagcaattattacaattcttgaattccttggggattttttactgccctttcaaagcacttaagtgttagatctaacgtgttccagtgtctgtctgaggtgacttaaaaaatcagaacaaaacttctattatccagagtcatgggagagtacaccctttccaggaataatgttttgggaaacactgaaatgaaatcttcccagtattataaattgtgtatttaaaaaaaagaaacttttctgaatgcctacctggcggtgtataccaggcagtgtgccagtttaaaaagatgaaaaagaataaaaacttttgaggaac

SEQ ID NO: 9862 - DNA, 1093 bp, Homo sapiens
cagctaccccggcaccatctgcccagctccaaggacccttggtgagggcgtggcccagcctgccttctgcatgagaggaccaggagactggaatccagggcagttccaagtgacagtacagagcacagcagcgaccttgggcctgaaagcagtgggcctctgagctgggccagcttcacctggaaagtgacagagttgctcatccttgcccctccctgtctctggatttttatcaaggtttaccaagtcttctgagtccccctgagatggctggggcctcacctgtgctgcaggaggcctctgtggcataacccctaaggagaagtcctgattcacgattcactgagaagaccaaggggaagccatgctttgctgctggggaccccaggcacctccagagtagggaagcggggttcttttgctgtgagtggccagggacaacagacaagattcctgggggctcccgatgagcaggaacgtggagcctgctgcccaaggcctgctccttccggctgctccagcccctgggggcagagtccacaaagagtccccatcaagacttcttccctgagtcaagtacagcgtagcatagtcctccacccacccaacctctctgcctggccagggtcctggccctgccactgtgtggcgaggtgtccttctagaccacatcagccccaaggctgggagcagtcgctccagggccgcagcagttcactcccacacatagaacccaggtcactgctggggcgattgaacaggttgcctggcttttctctgctgtcagtttggtgtggaggcctatgttctgccccatacaccccacaggccctgcttatgggaaggaacacaggcctccagcccagaggactgtgccgccctgttcttggccgtccacgtttcctctccctctagcaccagcaatacatttccctggcatggacagaaaagacagagaggacttatacaaaggctttgtaaaaccagaggctagcttctatctttgtctactgttatttcagctcagggcgggtaattaacatcattggaactagctattaggaaagaaaaaaaacttggttttttttacaac

SEQ ID NO: 9863 - DNA, 336 bp, Homo sapiens
ggtttaggaagattttcataaagtcatatttcatgtcaaaggaaatcagcagtgatagatgaagggttcgcagcgagagtcccggacttgtctagaaatgagcaggtttacaagtactgttctaaatgttaacacctgttgcatttatattctttccatttgctatcatgtcagtgaacgccaggagtgctttctttgcaacttgtgtaacattttctgttttttcaggttttactgatgaggcttgtgaggccaatcaaaataatgtttgtgatctctactactgttgattttgccctcggagcaaactgaataaagcaacaagatgaaaactga

SEQ ID NO: 9864 - DNA, 3101 bp, Homo sapiens
aatccttcgatctcgcttcaggaagaaaagtacctcatcctcggccaccgaaaccacgtgagtgagatgagccaacagcaccggatccacagaatgtttcttctctgccttaaagagctattcactaataacatagaaatccgcaagctgggtgtgctttgagtgtgcagcctcacaaacatggccttttctctctccccttccacttttaaggatttatttttttcccccttttctttattttgctggggagaggctaaagggaaaggtagtaggggcgggggtggtgacctttaagtcttctgaggttggtaattttccacaattggattgtcattatagacagcagtgtgttttttagaaagataagagaatcacccctatgctgctgagatgtacatttgtaatttatctgttgcatacttagtttttagtcctgtaaatgcaaacacagcattttttacaactttctttgttcttggtacttatactttgaactatgatgtacatatttatggcttttggcttttaatataatggacttgcaagggctgccagaggttctgatatgtaagaaaactgcaaaaacaaatatagacaaatattttgattctagagaacgtctcagatgtgcttataaagcttccaaatacaactccagtaagacatccctttccctgcaggagtgtggtctatattctttagatagttgtttagtcaaaagaccagacaagttacaaactaagagaaacaatatttcacaacacagtaaagtgtgatgagaggtcaggggaacatcccagtaaaagagaagagtcacaggaagctcatctcctccctggattctggattaggagcttctgaatcttttccagggataggcaggtagctcactcttggtgcaatttcttgaggatgggaacatgtagagctgctggaaggagtaattctgtgcttgacaaaggacgatttctcctttatcgtgaccagtgctgccgatttcctgacagaggagcttacactctgagcaccttgttttagcgaactctagcaaaacttgtttagcttagcaaaaacaaacacacaaaaaactgagaactctgctgtttcagatatgccataacatacatctgaaacacatgtgtaacaatcaaaatggtgggctctagaatggttttggagctcgagatcttcatgggttagacttgctggtcagacccaggagcacctgtggctcacaccttctgttcccctcctggcctgtgcagaatgtaaacagcagactcatactcaatgggcactacaggccttatcagacgttttatacaagcctggattgcttagtaggggaataaggcattctctgagggggctttccacttagattgagaattttatttgaaaagaatctggtttaaatggcattgtggtccgaggtagctgctctccccactgagagctgagccgaaatataagaataatatatttgtgcttcgagttggtgtttctttcagtgtaatgcatgcagtggtcacaacccagttactcataatatttggattgtatttgttcgtagatatgcccagaagactagagaattagtgttatataccatatagaacttactgtcagtcaactataaacaggcccaattaaaaactgttccattactacgcaaacacatattagaggcctttgctgatgacacattagctggatcttagccaccccagaaagggtttgatttgaagctgattgttgccagatatgcatattggaatcccatctacccatagttcctctgaaggtgattttgtaatttgcaaaagggtataggaaaatatacctaaaagcgaatttgtggctgagaggataaacagaagctgtttgctcatgttctgtgccccacacccaccaatacctaaatctgttaaggaagacagaaaatgttttctttgtgctcattgagtagttccagacagaagaagaatatactctttaaaatgtatttacctgttagttggaagtacccagaattatcagaaacgaatgcaaaaaaaaaaaaaaaaaaaaaaagcttacacagcttcttagcaatttttttttttttgccgaaacaataaattgcctttagcagcagtttaaaatcctatcgtgaacaacctatattttcgccattttacaatggagagttgtgacaagtacaggttatcaagtttgcacttaactatgccaaaaaaagtttgaagcgctctattctcagacatgctgtattattacttctcattcaagattgaaaaatataaaggtatccaaactctgtcttaatgtaaatgtaactatttttccttcaagtgttgactagggagtcggtttctctcttaaagacactcactgtacaactgaaagcagctgtcatatttctggcaaaatgtgtttacgtatctgacaagttgtacatttgtgtatgaactgacataaaatgtgaaagcctgtaagtgtacatgtagtggtgtggtgttctgtctagaggatacaactgaatgtttttaatttgctgacttacagacacaggctgtttacaaaatgctagctggaaagtctgtaatgttcatgtcataacttttagttaattgccattgagcacctgttctgaggaggtgagatgtggacttgtgcttataaactggagagtttagtcataatccctcctggctttgtgtgaatagcttgctcactttgctggcctttgaaatgtgttctccgtgataagctatccatgtgtttgtgataagagtgcttgtcaaccatgaccatctttgagccttcctagtcctccacctggcacagtatttgaaatggcaaaggatgtgcttcatcctctaacagtgtacactcccagagctgatattctggattttgactgtgcacatttcctctagttcatgtctgtagtccctatagaatgatctgtaataaaatagtatactggactgtgcatcaaagggatgtaaaattacagtattccaaaggttgaagttctgctgttttgttataatgcctgatacacatcttgaataaagtcttaacatttttctttt

SEQ ID NO: 9865 - DNA, 2373 bp, Homo sapiens
gggctgcctaccccgctgggtgtgcacacactcctctcaagagctgccattttatgtgtctcttgcactacacctctgttgtgaggactaccattttggagaaggttctgtttgtctcttttcattctctgcccaggttttgggatcgcaaagggattgttcttataaaagtggcataaataaatgcatcatttttaggagtatagacagatatatcttattgtggggaggggaaagaaatccatctgctcatgaagcacttctgaaaatataggtgattgcctgaatgtcgaagactctacttttgtctataaaacactatataaatgaattttaataaatttttgctttagcacttggccccattgtagattgccctgtgcagtaaactttcaaggtgtcggctgccccagattgcttcatttgctgggtgtggaaagagttgctatggccaggcatatgggatttggaagctcagcagaagtgacttctgctctgtggttgctgctccccggctttcacagacatggtatggcagccattcttttatctatttaaccaagaggatgctggggaattgtgctgcttgtcctgttggctggtggctgcattatgtcctggggtgtgcatgtgggtctatttagagcttctgtcccttccttcccattgcaagttgcacccagatgagacagctgtagtactaggtctctttcacctctcattgcctgtccctgcttcgagctggttgtcttgtgcgtgggacatgggccttcctatctgtgttttctcaaagtcaggagctgaccaggagcacactaaggtgtggtcatgcatcataaccaacattcactcatctgggacattcttaagatacatttataaatcatttcagcagtagtactttgtatgtgttgagagtttacagagctctttgacatacgcgatcttagtctttacaaataaggaaaacagctcagtttgggaagtatcagagatgggattcaaacccagatcctctggtccaagttgtatgtgcactgaactaatcaggcaggaaaaaagcccagccactgtctcacagattgttttttgtatattgtagcaaaatcctgaaacaatggggtccttccagtctcatcatacaaaatggcaatcttggctgggtgcggtggttcatgcctataatcccagtgctttacaaggctgaggcaggaggctctcttgagaataggagttcaagaccagcctgggcaacatagcaagatcctgtctctccaaaaaaaaaaaaaaaaaaaaaaaaaaatttcatttttgagtccagaggaccctcctattactcttgatttcatcttcagagtgtagttaaaaaattattttaaataattatttttttaaatcagttgtaggttcacagcaaaagtggacaaaaagaaatttctcatatatcccctgccctcacacatgcatagcctcccaccactatcagtatcccacaccagagtggtacatttgttacaatcaataaacctccattgacacatcattatcacccaaagtccatagtttacatgaagattcactctggtgttgtacattgtatgggcttagacaaatgtatgatgatatctacaattatagaatcatacagaatagtttcactgccctaaaacttctctatgcttcacctgttcatccctttcttccctaatcccctggcaaccactttaaaaaaaaaattaggttcagggggtacatgtgcaggtaaactcgtgacaagggggtttgttatacagattatttagtgacccaggtactaagcctagtacccaatagttacttttctggtcctgtcccttttcccaccctccaccctcaggtaggccccagtatgttattcctttgtgtccatgttatttcactcccacttgtgagaacatggaatatttggtttcctgttcctatgttagtttgttaaggataatggcctccagccccatccatgttcctgcaaaggacatgatctttctttggcaaccactttttactgtcgccatagttcttccttttctagaatgtcatattggaatcatatagtatgtagccttttcagactggcttctttcacttaataatatgcaattaaggttcctccatgtcatttcatggcttaatagtgcatttatttttagcactgaataatactccattgtctagatgaatagtttatccattcacctattgaaagacttcttggtggtttccaagttttggcaattatgaataaagctgttgtaaacatctttgtgcaggtttttctatgggcatgtttttaattcatttgaataaataccaagagcttcagtgctggatcat

SEQ ID NO: 9866 - DNA, 449 bp, Homo sapiens
ccatgtgcaatttgtcctttataagctttgagtatcttacagcttgcctttttaatgttagtcacaatgtttttgtggtttgaagtttagtttaatgttagtgcagtgacgggaaatacacattatgctaatgttgatgacagaatttatttggttgccttgtgtgttaattgaatgcatacctaattgtaaaatttttttatttacaacattggaaattcagaagttaatgtttttttgtaagcacaaaagaagtattatagaaatttatcctagcaagactttacaagataggatcaaattctaatggaattgagccggtttcttatcctaaatgtttcctccctttttacaatctctgtccagcacctcttggttaaataatgtatgctgtgagacatgaaattaaaacagacctatgaaataaattattttaaaaccagaagatt

SEQ ID NO: 9867 - DNA, 1314 bp, Homo sapiens
ccctgtgcaacagccactacattacttcaaactgagatccttccttttgagggagcaagtccttccctttcattttttccagtcttcctccctgtgtattcattctcatgattattattttagtgggggcggggtgggaaagattactttttctttatgtgtttgacgggaaacaaaactaggtaaaatctacagtacaccacaagggtcacaatactgttgtgcgcacatcgcggtagggcgtggaaaggggcaggccagagctacccgcagagttctcagaatcatgctgagagagctggaggcacccatgccatctcaacctcttccccgcccgttttacaaagggggaggctaaagcccagagacagcttgatcaaaggcacacagcaagtcagggttggagcagtagctggagggaccttgtctcccagctcagggctctttcctccacaccattcaggtctttctttccgaggcccctgtctcagggtgaggtgcttgagtctccaacggcaagggaacaagtacttcttgatacctgggatactgtgcccagagcctcgaggaggtaatgaattaaagaagagaactgcctttggcagagttctataatgtaaacaatatcagactttttttttttataatcaagcctaaaattgtatagacctaaaataaaatgaagtggtgagcttaaccctggaaaatgaatccctctatctctaaagaaaatctctgtgaaacccctatgtggaggcggaattgctctcccagcccttgcattgcagaggggcccatgaaagaggacaggctacccctttacaaatagaatttgagcatcagtgaggttaaactaaggccctcttgaatctctgaatttgagatacaaacatgttcctgggatcactgatgactttttatactttgtaaagacaattgttggagagcccctcacacagccctggcctctgctcaactagcagatacagggatgaggcagacctgactctcttaaggaggctgagagcccaaactgctgtcccaaacatgcacttccttgcttaaggtatggtacaagcaatgcctgcccattggagagaaaaaacttaagtagataaggaaataagaaccactcataattcttcaccttaggaataatctcctgttaatatggtgtacattcttcctgattattttctacacatacatgtaaaatatgtctttcttttttaaatagggttgtactatgctgttatgagtggctttaatgaataaacatttgtagcatcctctttaatgggtaaacagcatccg

SEQ ID NO: 9868 - DNA, 740 bp, Homo sapiens
gcagagaatacggttttggtgtcctgctacaaaaagacatcggtcagtaacgagcacgatgtggaaaaatgagagaagggacacattcaaccctggagagttcaatggctgctgaagctgcctgcttttcactgctgcaaggcctttctgtgtgtgatgtgcatgggagcaacttgttcgtgggtcatcgggaatactagggagaaggtttcattgcccccagggcacttcacagagtgtgctggaggactgagtaagaaatgctgcccatgccaccgcttccggctcctgtgctttccctgaactgggacctttagtggtggccatttagccaccatctttgcaggttgctttgccctggtagggcagtaacattgggtcctgggtctttcatggggtgatgctgggctggctccctcttggtcttcccaggctggggctgaccttcctcgcagagaggccaggtgcaggttgggaatgaggcttgctgagaggggctgtccagttcccagaaggcatatcagtctctgagggcttcctttggggccgggaacttgcgggtttgaggataggagttcacttcatcttctcagctcccatttctactcttaagtttctcagctcccatttctactctcccatggcttaatgcttctttcattttctgtttgttttatacaaatgtcttagttgtacaaataaagtcccaggttaaagataacaaacggctcctgtgacat

SEQ ID NO: 9869 - DNA, 380 bp, Homo sapiens
gcctcaaggggaaggtatatcaggaacctttgtcccccaatgcctgcatggatactacagcaatactacaacctcacagaagctgcttaacccatggatcctgaaaacataggcaagaagcacaggtcctgatgagtggatctttactacttttaccagattcctccctcgctcagagggatcctcccacacacccagcagagacttctctgccaccatcaaccccccaagtcatagggggctcaagttctgccctggtgagctgtggcccccatccttgtgaaccccaaagtgtcccccttgtggaaccaaatgtatccatcttgaataaatttgcccaaaatcctaaagaccgggaaaagggaaccattgagcttggc

SEQ ID NO: 9870 - DNA, 578 bp, Homo sapiens
agctttcaaagttggttctcccaaagttaaattgaaaaaataggtgagagcttggttttatgatatccgtgttcataccacttttcttatgtgaataggttctttaacttctaacaaaggcctagtaaacaaagtgtttagcatgcttgctctccaacacagaaattgcttttcctcattttctaaaagcattattacattttttgaacatatagtgtaatttcctttaatgaaagtgactctgcttttattcatcaaattgctttgatggtggaaatattttctgttgggaggttatttattttaaattggaggattaatgacctttgcacaatctgtttcttgattgggtttgttatagttttgagttgggtattttatgttcattggtttttctctgtgaagcaatttttttctcctttattagatctaacttgcagtgtattttctaggctggaaagtggaaaatgaaatatattataatcttaggttacataaagtttctaaagtttcaaagagtcttgatacaaaatcagtttatattctgaaaatatttataataaagtattctaatttct

SEQ ID NO: 9871 - DNA, 63 bp, Homo sapiens
acaagtctgcatttcatattattttagtgtgtaaaattaatgtaataaagtgaactttgtttt

SEQ ID NO: 9872 - DNA, 995 bp, Homo sapiens
ccttaagttgtgctagcaaccctaataggtgatgcagataatagcctacttcttagaatatgcctgtccaaaattgcagacttgaaaagtttgttcttcgctcaatttttttgtggactactttttttatatcaaatttaagctggatttgggggcataacctaatttgagccaactcctgagttttgctatacttaaggaaagggctatctttgttctttgttagtctcttgaaactggctgctggccaagctttatagccctcaccatttgcctaaggaggtagcagcaatccctaatatatatatatagtgagaactaaaatggatatatttttataatgcagaagaaggaaagtccccctgtgtggtaactgtattgttctagaaatatgctttctagagatatgatgattttgaaactgatttctagaaaaagctgactccatttttgtccctggcgggtaaattaggaatctgcactattttggaggacaagtagcacaaactgtataacggtttatgtccgtagttttatagtcctatttgtagcattcaatagctttattccttagatggttctagggtgggtttacagctttttgtacttttacctccaataaagggaaaatgaagctttttatgtaaattggttgaaaggtctagttttgggaggaaaaaagccgtagtaagaaatggatcatatatattacaactaacttcttcaactatggactttttaagcctaatgaaatcttaagtgtcttatatgtaatcctgtaggttggtacttcccccaaactgattataggtaacagtttaatcatctcacttgctaacatgtttttatttttcactgtaaatatgtttatgttttatttataaaaattctgaaatcaatccatttgggttggtggtgtacagaacacacttaagtgtgttaacttgtgacttctttcaagtctaaatgatttaataaaactttttttaaattaa

SEQ ID NO: 9873 - DNA, 149 bp, Homo sapiens
cctctctggccttgtgcagccagttcctgtgctgccctgcacctaggagagactcagcccctcacagcttgggatgttaccttgccttttgtttgttttgagggaagtttaatctttaaactctttggaaataaataattatagctttc

SEQ ID NO: 9874 - DNA, 1627 bp, Homo sapiens
attcagtgaatatagaagggctttcagctggagtgcagacatcactggaacttaaagaattcatatcagagagagatcctaaaggtgtaatgtatgtgggaagaccacatcttgttccacatcaggcaataattactaaagagaatccctgtcaatgtcaagagggggtgggcttcccctctcttaccaaacatgggagaatccatactagtgagaaaccacgtgaatgtaatgaatgtgggaacgctttgatcagaggatgcatattattcagcatcagacagccgacactggggaggagccttatcaatgcagtgagtgtggcaagccttcagttacatactgattctttaagaaaatcagataacttgtactggagagaaatcctacaagtgtggtaagtatggaaaaatcttcagttgtatctcttcctttactaagcatcaagaacacatactagagagaggccctatgaaagcaggaaatagaggaaggccttcagtcagggctcatcccttattaagcatcagaaaattcatacctgagaaaaacctgtgaatgtgggtaatgtgggagagccttcagccaaacctcattgctttataaaccccttagaactctccctactagctggaaactctggtgacgtgatgaatgtgggaagggctttggtggatgttccaccaaaacacgttagagaatttgtacattagagaatttgtgctagagcaactcttcaaatttagtgaaactgggaaaacccattagtagagttcaagcttcagtattcatctcaaagagaaaccttgggaacatgatgaatgtgaggaaagttcctttccaacttgagatgtataaaactagagctgaaaagaagctgagaaatcaccttgtctggtgattttctgcctggtggggccatttgtataacgacacttgtgcattgcctcctcatgctgttactgacggggcagggtgtcatgcatgggtgcagaggatggaggctgagaaaggtagacagctacccatgatctagcccagtcgtattttagagctaataaaactgatgttcagaaagtgacatgccttggcctatagtcctaactgggctgggcctctttcctgtggttcacagctgtagtatggagattaatagactggatctttgcagtacaacacctctatgcacttctttctctgtagcacatgttacctttctttgtgaggcaatggagtggtctaggattgagcaaaaagcaatttttgttacatctttatgctaatagatttggaatttttgaaatgaaatgaaaccttgtttaaacattaaaattactaaaataggctgggcgcggtggctcacgcctgtaacctcagcactttgggaggccgaggcggacagatcacgaggtcaggagttcgagaccatcctggctaacacagtgaaaccctgtctctcctaaaaatacaaaaaaattagccaggcatggtggcgggcgcctgtagtcccagctacttggaaggctgagacaggagaatggcgtgaatcggggaggcagagcttgcagtcagccgagatcacgccactgcactccagcctgggagacagagtgagactccgtctcag

SEQ ID NO: 9875 - DNA, 212 bp, Homo sapiens
aactgtgaggaggagcctgtgctgagacttctcagccccagaacacagctgtgtcctagagccagaagatggagaggaggctgcaaacccttagctgctctataaatataatcattgaggcttgattgtcccttgccatctcttgctttttcccttctttgatgtgataaacaaggggacgagacgagttgtcttttccccagcccagcagc

SEQ ID NO: 9876 - DNA, 1919 bp, Homo sapiens
gcccgcctgcgctgcccctgtggggttggtgcggtggcgccggggtcaccctgcttcttgccctgctgtgtgtggctgcctcccctgggctttctgctccctgcccagatcctgtaggcctcatcttaggaaccccttgggaggggtgggcaggggggctgctagcaagggtcccagtgaagcttccccttgccggcttagctgtgggggaccccttctccaccctctccctgagcacaggccgatggaggtggttcaaatcctctggaacatagccaagaccaggagaagagagagcactttcttcccagagccccatgctctccagaccaatgtctgggcttccctttcttgaggaccttgtgttcctggcaggtcacttgcttgtggtgttttcgtttctttttcatctcccccccacccacaaagagcacggagccagccttccacttttcccagtggggcctgctgctgagggggaggaagaaacgaagactgatcacccacgctaggcactcgcggtccctggcaggcgctgggatgggggcttatggggtggcatcgtctctgggccctcctttccccctttgcctgttttcggatctgtggttcctttgaaagccagaacaatggatcggcttccttacccagcacccctccggtaggtgggtggccacgtggatgcctcgctggggcggtcttggaggcctggtctctgcctcgacgggagatccccgatcactggcattcaccccctgcaaaaatcggggcgacaatagctcactgcctacttgctgcagggagatgaaaggctttgcagaaagctttgagctctgtgggggaacacactagagaaccaaaaatgtgattatatggtgatataaaaatccctttcctctgtgtttaccaccacctgtcttcctgtagacttttgttctgtccctggggtgtgtgaattcctaccccgaactggaagccgggagtggcagacagaatcactatttcaagttaaaggatctctttgagaatgtgttcttctggctgcaaaggtctgagttattacgctacatgacaacgtttcgacatttcaccggcaacaccaagagggtttttagtggcttgggtctccccagtgggggataagtcttttgtcatcaaggaggcaaattgtctccccaagacagctcaaaatatccacacctcggcaacagtctaagatgagagcctgtgacaggtggcagcgcccccaggtggggtactggcatcagagcctggtgcgcccctaggggagcctcccactggagtgcccggccaggtctccaagccccaaatgagtccttgtgaaccacaactgatccccccaggtgggtgcttgtggactgcctcggacccagccacgctgctccccgcaatgctgatggggctgtgcattgaggacccctgcttcctggttctcagtcccaccccaaaacctggcacccagaacagttggaagtgtggaaaggaggtttatcggccttcccttggagagggcctggcttcaacattgggccagtaggcatcttagcttggcaggtgtcgggggaatgggccagatggacctgctagatttggaagggcaccgagggagttttctgggtgtagagagaatggaggggaccaaaaagagtccttcctggggtgtgggaggcttcccagcttggtcctcagtgggttgttgaggccagagtatcgccctgggatgtggtggggagctgggccaggagagggactgactgtgaccctctgctggccggtcttgtgtgcgccccatgggacccccagtgttcttgcctgtgacctcttattgcgacatgcaggtggtgttttttttttttttaaactctgagctattttatcaataaaggatattttgtaat

SEQ ID NO: 9877 - DNA, 645 bp, Homo sapiens
ggtggtgcccctctgcctgcctgccccactgtgctggcaggagctgactgtggactggtgggctcccctctgggccagcacagtcccctcacctctggcagggctgctacctcctcagagtttcagaagcccccacatgggggctctaggaatgccggcatgctggtctttccgacctggtgctcttctgctgggggactgaggctggccctcattcggggtcgggaaccaagggtgtgtctgctctttccctccccatcctctggcagaaatcagctagacgctataccgtggactctccctggtccaccaccatgttgaagcccttggcagcctgagagctccaaggaacaagctgtgacaaccaggagccctgtctgtgggttcgtctgcccagggcctggagcccaagccctgtgttcctggggaagctggggacttgggaagtgatgggtgtgtcatgttgcgtgtgtctgtctgtgagcctttcacacctgtgctggcgctggaaaattatttgtgctcagctgacatttaacactccctcccccgcttcctcctagccctgtgggcaggggttggaaacttagcactttatatttatacagaacattcaggatatgtcaataaaatattgttatattt

SEQ ID NO: 9878 - DNA, 1865 bp, Homo sapiens
caggctttgggataagaagggacaaggtgcttctagccctgtctcagtccgttatcactctgctgtagaagggggacatgccacatgtattagaaggcatctgctgtaacttccagtgcaagataattcaataactgatgtcccatttcattcagagcccttattgctcttatcaaaacagaagaaggctacatttgtgggagtgttgtcatattctcaggccaactgttttgaaattcggtatctcactgagctaatctggaacaaacctctcacctcaggccagaaggggatgacctccatttgcttctctgagtagtttcctctgctgacattccaaatcccaccatcgattgtgcagcgctttggatttccttcagttctccaggtccacctggaaagtatagttggccagttgagtctctcaaatgaggggctactgggagtgctcttggtaacaatcatgatgtgaatgggtgtgaacgatacttggctatgttaagtgccttgtccgcaccttgcttttatctctagagacatgaagttattattaattttttttttttttaagtagagatggagtttcactctgtttcccaggctggtcttgaactcctgggccatgcctggccagggacatgaatttgtacaaagaaatttccctccctgcctgcacaatatcacccattgactcaccttatccaaagcaagtttcctgtgaatcggccagttcttctatattcattggatcattgcctccttcctaaccttccccatttaccaagaacactgggagactaatccttttagatagtagctttttgatgctcaaaacatcacatttaaatttagtttaaaaattttttaacttttgtgtcaaataggagttgaggaattgagcaggattctaccctagtccgattgtatagaaaacaccattttgattcaggtattatttttcatatttcaggtttgacttgttcttttcagaaggctaaagtcagaggaatgggggctgggccactcccttggagctctcagatctacagacaagctgtgtgaatgcatagatgtaatcttgtctcaaatactaatacagtggagatttggtttatgttaccattaagttcctctaaaaagtttttcttcctctcttcagagccaaaataaaagtgaactacactgttcagataaggtcacaatctgatgctgtcagtttgaccgagctggttttgcttatggtcatgctgcaatttgttagaataatagggatcaagttttaaatcctcctccttcccttttttctggagtcttgagggccagagtttttgtttttgtttttgtttttgttttcctgcttgctactgttttgtggtgttgaaaagtggtttaaacctgagactaacttaaacacttccttgaccttcttgttgcctgttcatttttgtgccaaggaagtagctgccccagtgtatgtcttgccttctccgcgtcattgttggaagaggagagatgcatcgagcagtcccagctgcttttcatttattacttcttctttccaggacctgacagaagtcagggaagagtccctgggttatgtccaaacttagcacctgcaattgttgggatgtggatggatgtgtgcataagagagagagagaatatgtgtgtgtgtgtgtgcgtctgcgagcgcacacacatgcacaagtgcgaaggagttgcggttgctccatgttctgacttagggcaatttgattctgcacttggggtctgtctgtacagttactcatgtcattgtaatgatttcactcctaactgtgacatttttatcaaatgtgtgaataaatacataaagattggtacaa

SEQ ID NO: 9879 - DNA, 3232 bp, Homo sapiens
tgccagccctgggctctcttcctcggcagcccctccctcaactctgcagctcctctcgcacccagaggagctcctttccccagcaggcctcactggtaggatcctgaccatcttctccaaaccttccccaggagagactctgcctttagggtcatccaagtatccctgctctcagaaccggaggtccactggttttctataatgtactctttccctcctgccacatcctgcccccttcacattcacgagtcattaccagccagggaaggtcatccaagtttcctccagcatgggcgatatctttgggaccgagactttccttggagagctgctgagagcggacagtcccaaaaacaagtgtcaaagggcccaagggaaaggggactgtgccctggaggctcacttcacagggatcagtgtttgctccacagctgtagctctgggctgacgccccccagaccccttccttctcggagtgacccgcccccaggccacctgctccggggagttctgtgcactttactctttggacttctcctcacgtgtgccctggttttatggggagagggaatcgctgttgggaaggcagagcagttgcaaccctctctgcccttgcttcatgtggctggagcccaggcaaggagagcaggagccagcgtgagactgaggccccctggtgcctatcaaggaccagagtgaaggggactacatctcccagcccttcaccttttaaatatgagtggttttaaaaggaaaaaaatgaaaccaggcaacagcaacaatattctgtttttaaaatagggacaagactgttgtcactttttagacatgtatcccattccttttggctctgcaatatttggggctgtagctccttccaagcccatggtagtccctccccgagtctctcccagtagaatgcagcctcccttccctggccccttccctctcagtgacggtgactccctggggccttctcgtggaacccagaggggctgaggactgtggcctggctggcgggccagcgtggtgctcctcaggactgcagcactgagatggaacctggcctcagtttaggaacaggggccacaacagggcaggaacccaccaccctccacataggaatacaaccagtggggccacatcatgtgaggcatcagacccacactgtcagcccagcaggccgggctgtgtccttcagacccagtgctgccctagactctgactcgggactccagcttgccacgtgccctctcccctcttgaatgtactctggtcttgcagtgtgctgctgggactttcttgctcagccatcactctggtcaccttgtttgctctgggtctggctgaattttctgccctgagatctgggcataaagtggatgaaacttgaaagaccttcagtgtagatccagatggccaacctgtccttgttaagttacttgcttcttgggaatcagtgtcccctgctgagctgaaaaggaaatggattccaatctcttccaacctttaaggtgatagatagtttgagcaagactggagaatggacaacactatgaagctgtggctagaaagggactgtcatgtcccatcctttggccagattgactggggatgtccggacagatgcctgcatgggtggtgagggccacatctgcacacgagccagtggctgcttgcagttcactgctgtgatgccagagtgtgttcaaaggtgactctcctgctcttctggactcttctctcaggcaagaaaggctgcaggctgcctgctatgtgatgcctgagcacaaagccaaggaactgaactaagtctttctgttaagtcctgagtttgtcattggcaggtttacttgtggccagctctctctgcccttgggtgtctgagcaggcagaccagaagaccaggcactggacctgcatgccaaagggactggtcatctcctgaggacctgtaaatgaccctgtggactgttccgcacgatccggaacccactttttattcactccccatgtctttggccttcctcttctttctctttccctctgccatcctgacactgatagtttgtcatataaattccccgggttgtgtttttttttctagaaaaaaattaaaagggaaaacaaaaccaaaaaaaccagaaaccacgaataagaatggaaatgacaatggctgcctgtcatttttctgtcacgattttcctgatttggtttgttccctttgtctcagagaagcaggagatgttgatgaggctgtatttttttttctttttcttgtttttgagacaagagtctcgctctgtcacccgggctggagtgtaacgtggcatgatctcagctcactgcaacctctgcctcctgggttcaagcgattatcctgcctcagcctcctgagtagctgggattacaggcatgcgccactatgcccagataatttttttgtatttttagtagagacagggtttcaccatgttggccaggctggtctggaactcctaacctcaggttatccacccaccttggcctcccaaagtgctgggattataggcatgaaccaccgtgcctggccaaagatgtaatttaaaatagttagaagggacttggcatgggccagctccgtgcatggcattttcacccccagagcttcctaatcctgttttcacacaggaagtttctaggtctttctagaacagctagaaatagtagctgactcccgcccaaggcccaaccttcaaaccctgagctcttcaggctgcatcctctggtgagctatagaggagaacgtggctcctaaactctagccatcctgtgggaggaaatagacttctttgggctgtggcttgcagaacaaactacactttttttccctctattgtttaaattttatttaataatttgtgtgtttttctgtctttattttctgtatttcacgtgttccttcactccctagaaactgcactttctttgaaaccataggtaatgaatcttactaggagaggcatggggatagagacagttctgggagtgtgacctgtaagcctcctgtagggcagtgccaggccttgattgcccacgttctctccgttccttcttccttcatacatttgatcacacagcctacacccagccccgagtgtgcatcacggtaaaagagctgagggctctcttcagggagcagcccatttaggtctcttttgttgttgttagggagaatacacatctttcttgg

SEQ ID NO: 9880 - DNA, 675 bp, Homo sapiens
gtcctgaggcatttacttttgggtaaaggagagttgagcctgaattaggaatgtgtacattgtaggaatcctggttgtggggaccaggtctgtgggcctcaggtctggccagccagggctggtgctgtccccgcctacctccacttcctttcccttgctcactctggatccagtgacagcaggtgtcatgggtcaagcataaatcatatatagcattttcaggcatgttcctggtagttcttttgagtctgacattctaataaaataatttgtagaaaccatttgtctttgtagtgattccaaattaaaagttttctttctccaacctgagggcacggccaaaaagatctggttattttttagccaggaacgtgcttgttaatgagtatgtctggaggacagacctgctcattaggtgtgctgtcccctgtagcctcgtgagtcagcccagaggagggtacatgcgactgtggcctggcctcagtggtacccacacatcagcactaccacaagaaccaacactgagcctcggaagctagatcacaggttaggggtttctctagatgggggttctgaaatttgcagtgtctgctcctgggaggcagcaccagaaagggcactgaaatgtactagctggatgtgacccagtcttaataaacaggttttctaatccag

SEQ ID NO: 9881 - DNA, 2437 bp, Homo sapiens
agatgctgtgtgatatgtcctccttaccaagttggtgatggctgcctcatggtgggccctggacaggtgtgtggtcctgctgagctgtccacgtgtcggaagacctgtttaagacagtcatttttgcctctccgccaactgtcttcagagaaaccattaggttaggtgatacggtgccagcaagggaagcaccatcgtccaggatctgcaaatctggttcctgggaaccccagactcctcagcagatctggctgtacatggatcagaaccacttcttcccccgcttaagctgtggtttgacccaagggtcagcatataggactgcctgctgcatttaatgaaggtgtttccttttggaagtctgtgctaccctctgcgcctagttgggaggagacatccatctggtctgggatttcgggagttagaatggaaagctctttgctaaagactggagtcatcctggcctgccaactggtggttcagagccggacgggcttgttttggacatcactgttgccttcactcagcagccacgggagagtgctccccatgcaactccaccttagaaaccacgtcagatactgagtagcttgctgactcctggaaacttctggtttttgttagtatcataatgaaggcaaagagaactaggctgtcatctttcagcctctttgacttactctagatgttgggagcagtggttgccaggtgaaacctgggccctttgtctttttcaccatgctttgggcagtttctgtatccagagagtccgcaggttcagataagctgaagaagagtaatagaacagcaaaggaagtggcttgaaggatgtgctagtaagccctgtggtttgtgcttaggtctctgctctgctacccaaggaactggtggttcagctggagataaaaagaagaatttgccaagtcagagaagaaaccccaaccccggaaaatcctctgtctccagtctctggaggtgaagcagggacaataagctaaggtagtatcttggccatcccaggaaacttgtggcattaggacgatgaaggccatgcttcagtgttttcgtttctatttcatgagactttttgtcttcctgcttacaagtgggaagatgattgacagtgactctactatgcagggctgttggtaccaacctgagccctataggtggcagtccctggagaagtggtcacagaagatggagctctgatcccctgcttacctcttcacaacacttgtgtgcaaagatagttttagatttggtttagaagctatcctccagaacaggctcccatacttagaatgtttctagttaaggtaataaattaggcaacccaagtgtgactccactcaagtgtccttttctgtaggcaggaagggcccacaacatggcttaaaatgtagtccatggttctggcccacagtacagtgtgtatctataccaggtcacctgtgttcaatctgggagccttcctggccagtctgagtggcagccagaagggagctcatagtgtctaggagtctcaggcaaggtaggtcagggtactgtgggcaggggggatgtgtgtgataggagagggtaccctaaaccccataccttccctccctgacctgaaaagctgatctcaacagggattcacacagaattaggctgtgtttttgcattagctggtaggtgactttctcaaaattcttaaattcagaaagtatttagtaaacttgaggaaggtatgaaatctggaggaggcatccaggacccaggggtttgatagctttacaggtaggatcataccacaccaaaagagcagtggacaataagactatatgagctatatgaagcttttaggaatcatttaggacagacagagccctaaacaacccattcatgacttaagttgttggctcagtgtatgctggggacaaagaaaaactaacaagccgacctgcctttatgataaattctagtgtgcttacaagggatgacttcctgaggtgtgatctgtccaccttgaagaactccacaactgaagaaggggagctgtgagaacgtggattgttctacaacttgcacagggtaacagaggaagtggctgaggcctagagtcacgttttccagttcccttcgcaaactatatttcttggaacgcgaaaggaagctttacctatttcatagaagacctggaatccataacctcagaaggcaatattattgatagaaaatgtggaaggatcaggaagttcttagattcttggatgacagatgcatgttgatgccctatggagatgtccttgtgttttgaggtcactgaggtaggaagacctgtctactcttggtttcaccactagaacagtcttgggctggatgggttatagagctgagcggctgtgatggttctgtttttacattaacaaaaacaattaaaaacaccaaaaac

SEQ ID NO: 9882 - DNA, 1326 bp, Homo sapiens
gccctcctgctgccaccacttttgtgactgtcacccatgaggtatggaaggagcaggcactggcctgagcatgcagcctggagagtgttcttgtctctagcagctggttggggactatattctgtcactggagttttgaatgcagggaccccgcattcccatggttgtgcatggggacatctaactctggtctgggaagccacccaccccagggcaatgctgctgtgatgtgcctttccctgcagtccttccatgtgggagcagaggtgtgaagagaatttacgtggttgtgatgccaaaatcacagaacagaatttcatagcccaggctgccgtgttgtttgactcagaaggcccttctacttcagttttgaatccacaaagaattaaaaactggtaacaccacaggctttctgaccatccattcgttgggttttgcatttgacccaaccctctgcctacctgaggagctttctttggaaaccaggatggaaacttcttccctgccttaccttcctttcactccattcattgtcctctctgtgtgcaacctgagctgggaaaggcatttggatgcctctctgttggggcctggggctgcagaacacacctgcgtttcactggccttcattaggtggccctagggagatggctttctgctttggatcactgttccctagcatgggtcttgggtctattggcatgtccatggccttcccaatcaagtctcttcaggccctcagtgaagtttggctaaaggttggtgtaaaaatcaagagaagcctggaagacatcatggatgccatggattagctgtgcaactgaccagctccaggtttgatcaaaccaaaagcaacatttgtcatgtggtctgaccatgtggagatgtttctggacttgctagagcctgcttagctgcatgttttgtagttacgatttttggaatcccactttgagtgctgaaagtgtaaggaagctttcttcttacaccttgggcttggatattgcccagagaagaaatttggctttttttttcttaatggacaagagacagttgctgttctcatgttccaagtctgagagcaacagaccctcatcatctgtgcctggaagagttcactgtcattgagcagcacagcctgagtgctggcctctgtcaacccttattccactgccttatttgacaaggggttacatgctgctcaccttactgccctgggattaaatcagttacaggccagagtctccttggagggcctggaactctgagtcctcctatgaacctctgtagcctaaatgaaattcttaaaatcaccgatggaaccaa

SEQ ID NO: 9883 - DNA, 1634 bp, Homo sapiens
ccgcagcaccgccccccgccgcgcctttcgcactgccaccattccatcctgtgccccgcccccgcgtctgcacctctgtggttcctgccctcagccctggttcctccctctctggcctgtgccgcctcagcagccctggcagaactgaagagcggcaccgggcccagcaggcaaagagagaggcctccctggcttcgagtgtcaggggagccgcgttccctcccagggctggagcagaggaccacaaggcagcagaaagcgcgggtccagatgagggccaggaaggggaggagagtgagggccaagaacgagccttaagggagcagtcccaagctggagccacccagggctgggtctgggagtcctcagtgtccacttgtcccaggttagggggcttgccttgctctctccagggccagtctgtgtgtgtggggactcagcccgtggccggcagatgccatccaggatgtacaaggtgcagccaaggcaggccatgcaggggccgggcctgtctgcagctggtggatgcctgtgggcatggctttctctggggaccccattcctgtcagtagcaaccctggcagtgtccggagcggctctagacaactttggtcataggaactctggaggtgggttctggtcatctgaggtggctactcaacaggtttgaggccccacagcaacagaagtccaggacccactaggttgcctcagaagccctaagactgatgagctggagcgcgcatttgagagaagcctcgcacccactgtgtactggccccgctcaggccggcctggcacaccgttgcctgctggcggctctcatggggaagcgcctgggcactggggattgcttgtggcccactcaactcttggggcagtggcccgtaaccctagtttgcctgaggcccttatgtccccttatgttcctggtactggagcttgagctcttgcctggaacgctgcagctgcacccaccctgcttgatcccacctgggaggccaggacactgaggagctctgaacccagcccacagggaagcagaggaaggtgagcccccgccgccccccagcccttcccatcccttccctgctccctggtggtctaaggacccaagctccctagacttcctcttccaccgtctgtacgtttcaaattacactggtgtaggcctgtactgctggtggggctgggcccctaaacgccagaaagtgaatcttaagaagctctgccctaaactgagaaccacatgctgagggaagggctgaaaggtgaaggctcagcctccctcacatgggtcctgggttacattaggtaccgggctgattgataggcatttggccatggttccttttcgtctacctttgggggccttctcaggcccagaacaaggctgttgttactatgtggaaaagctgaccagtgctgcacactaggggcacacacctttccatgagcagctcctgccctgtggcgacagccagcgtgcacccagacgctggtgccatggcgaagcaggcgttcaagaccatggagaagacaactcctcatctagaaaatgaggacacctcagtgacaaacacacctttttataccaatcagtatcctctgttcattaaaactggctatccatt

SEQ ID NO: 9884 - DNA, 258 bp, Homo sapiens
gccgccaccctatctccagctgcctttaaagggtacacagaccagttctccaagcccctgccttggtcagcatccatgctgctgggcagggaactgaggccagaccacccaggaagagccccagtctggtcactgtggaagcgagggagtagatttggtgtggctaaaagtgtttaagactggacagatgatcatattctaaattagttcatatgagacatctatttatttggaaaaaaataaagttatatccttacc

SEQ ID NO: 9885 - DNA, 883 bp, Homo sapiens
ggggaacccccaccgcgtcggcgggaagcgtgggaggtgtagctcctacttttgcacaggcaccagctacctcagggacatggcacgggcacctgctctgtctgggacagatactgcccagcacccacccggccatgaggacctgctctgctcagcacgggcactgccacttggtgtggctcaccagggcaccagcctcgcagaaggcatcttcctcctctctgtgaatcacagacacgcgggaccccagccgccaaaacttttcaaggcagaagtttcaagatgtgtgtttgtctgtatttgcacatgtgtttgtgtgtgtgtgtatgtgtgtgtgcacgcgcgtgcgcgcttgtggcatagccttcctgtttctgtcaagtcttcccttggcctgggtcctcctggtgagtcattggagctatgaaggggaaggggtcgtatcactttgtctctcctacccccactgccccgagtgtcgggcagcgatgtacatatggaggtggggtggacagggtgctgtgccccttcagagggagtgcagggcttggggtgggcctagtcctgctcctagggctgtgaatgttttcagggtggggggagggagatggagcctcctgtgtgtttggggggaagggtgggtggggcctcccacttggccccggggttcagtggtattttatacttgccttcttcctgtacagggctgggaaaggctgtgtgaggggagagaagggagagggtgggcctgctgtggacaatggcatactctcttccagccctaggaggagggctcctaacagtgtaacttattgtgtccccgcgtatttatttgttgtaaatatttgagtatttttatattgacaaataaaatggagaaaat

SEQ ID NO: 9886 - DNA, 390 bp, Homo sapiens
agggacagggtcagggcagcccagggctcctggcttcagcaggaagtgaacaggctcagggaactggaggaagcgaagcatcaaggccagaggaggccacatgctgaccagcctgatgaggcaagagcctgcccctgccaccgccccgacccctctcctctctgcaagagcctgcctctgccaccgccccgaccccctctcctctcagcaagggatgggcctctctgcctcgcccacccctcagccctcctcccagccatctcctcttccctaaggcctctgtctccatagctctggtttccctgggcctcagtcctccccaccctccttcctctgtctccctgtcactaatgtgaggtttctttgtgcacattaaagtcttctttcagc

SEQ ID NO: 9887 - DNA, 168 bp, Homo sapiens
tggctcctgcacaggcccgacataggatgagggcatctgctcccactcagcctagcccagggaaaggcccagtggcaggtgtgggcaggtgccagccctgcaagccgcctcttctcggtagaagggagaaggacagagctctcttcaataaatgcgtcgggtcaaagc

SEQ ID NO: 9888 - DNA, 890 bp, Homo sapiens
tgcccaaggagggcggggcatgttgggagagggggagggaggggagacagagcctttaaccctttttggtcttggctcgtatactaggcttagggtcccctgcatgccctgaacccctgggtgggtggcacagcagtgcccccctgcagccttcccctctacacaggacatgcacacacaagtaacattgagctgcatggacaggagccttgagctggcgtgtgggaattgagcgccatgtcaggctgttgtgggtatccccctggcagggccagctaggcctgtggttccctgctccgactctcagggctgcctccctgagctccagggccagaatgcctggatgcctgggtagccagtttggggagtgggctgcaaggggcagccagcagctcccactggtgtgtcactgcatccattgccacctcctgttcgtgacctgacagggtgacacagcccctttcacactctgtcctcctatcttcctgggtagatgccctggtgtagggctgagtactgaatggtcttccatccccagcaagggggtgcagcccagggtcaggcccttcagagccagggcagaggatgcacggtggctagagccgctgcactatccttttcagagcacttcatccacttgctcctccctctaccctcggcaccctgggtgggaaagggttgatgctcatcatttattgaggggaagccacttaataaggagtcagacctaaaagggggtgggggacattttcttacctcacccaagaaagaggtcgtcacttttgctgtggccagggccccacctccctctctcagatatgtacaataatttaacacggttgcctgaaaaaaacttttgtaaatcattatagtaataattatggacaagg

SEQ ID NO: 9889 - DNA, 1349 bp, Homo sapiens
tgcattatgttgaagccaacatggaaaacaacaaatattttccctggtcattaacacaaagaagccaaaacaggaaacatactttttactacatctgtttggttggaccagatttcccctccgtggaacactgaagaaagtggatgagttgttttcgaatatgtataaagtaaatgattctcttgatccaagttatttttagaagaaaaacctaattgaacaggtatgggttgggagcataataaatgtgttttgagaattgttctaaagcacagaaaatggaaagactgttatttgcaaacttgactcttcaattgaattacccaattagtacaggccactgatttgactgacacagtcgataacatgcagcctatccagaaggtgtctgttgggaaagtttaggataaaactttttctttagttcagtcttttcctgtctagttctaaaatgaattgtgtttgattccttagagaagaaatacttcatttgtgctctgattcactgaagtaataacctcagcactttaatagcgtccacaggcatagctgatgctaggccccagattgtgttgcccaggctctttaccatcatcttcggactgtttttgtttcctggttacattttcagtctggcccgctctacataatgggccagtgtcagctccaagtccacatccttattatccatgattcaaaagggagagagagaacttcctttttcagggtccacaaatcaaatctataaaaggactctggtcttcccaggatcacctgcccttgcattggaccagtccctgtggaagaggggatgggggcctgtgatcttggccaggcctgggctatctatctgcactgtcattgctaactcctgtcagaatcacatggatgagtagtgggctgaatcccaaaaggaaaggggtttagagcaagtggaaacaacagatgttcactatagaaagcaagaatgaaaaccatgaagtggttgaagattagccttacagtaattttattctgatcacttaatacagtagagtcaaacaggaatccaagtttccaactttattatttttggcactgaagaattacaaagaactctagcgtctttatacctccgtggttcactggagttaaagcaatcggggcgttgtacagctcacttgagtttttaaaggttctactaaaaagtgagaattccacagcaatatgggtcattgttgcagaatatcacaaaggtctgttgtgtatactccttttcaccaggaaagggacaataatagtttttttcaatgtatatatatataagtgatctaactttttattaataaaagtaaacaactctaaaatgt

SEQ ID NO: 9890 - DNA, 6460 bp, Homo sapiens
tcatctgagaaaccaacacattttttcctgtgaatttgttaattaaagatagttaagcatgtatcttttttttatttctacttgaacactacctcttgtgaagtctactgtagataagacgattgtcatttccacttggaaagtgaatctcccataataattgtatttgtttgaaactaagctgtcctcagattttaacttgactcaaacatttttcaattatgacagcctgttaatatgacttgtactattttggtattatactaatacataagagttgtacatattgttacattctttaaatttgagaaaaactaatgttacatacattttatgaagggggtacttttgaggttcacttattttactattatagaccctcttttatagattatcagggattatatatataaatatataaatatacataaaaatgttatggaattaatttattagaaacacttaagaagtacatatttttgtgcagtagatttttgaatcgatactttttttgaaaaccagtttccttgcttttttaagttctttctatatttttctttggaaatgcaaacattacaaaccaatgccatttttcaaatgcactgccatttaagattgattatagatggatttcttaattgaagtacttttataatcacagtgactgaacaaaatattttcaaagacatttgtcattccttaaagccaagattttaaagactaatgtccttcctgagggttactttactatactgtgtatggtgtatagccacagaaagtcagtctgataaattttcaatgtgtaagtgtgatgcattcaacccagattattgtagacttaacttattatatttcctctgatatgtaaaatgacaaactcttctttcctttttaatctttgtctttaatccatgaattaggtgcattatctgctgttgattcttttatatctgcactcattttatgacgtcagacaaaatgttttctaggtgttgctattgtatgagtcataattggtataattttaaagaaaattgtaatattgttttttggtgaaatatattattagtagtatattttccaaaatgattttattgtagtatgaactgataagtgagtcccgtgtccaagagactgtatttattactcttaaacacgctattccaaatgatattactactataaacaaagaatattaccggtctcagcaatcagtgatctttataaaagtacttttaaaaaatgatgaattatcaccaggcgctgtggctcacgcctgtaatcccagcactttgggaggccgaggcgggcggatcacgaggtcaggagatcaagaccatcctggctaacacggtgaaaccctgtctctactaaaaatacaaaaaattagccaggcgtggtggcaggtgcctgtaatcccagctacttgggaggctgaggcaggagaatggcgtgaacccaggaggcagagctggcagtgagctgagatcgcaccactgcactccagcctgggcgacacagctagactccgtctcaaaaaaaaaaaaagatgaagtatcaacatcagttcccagccagtctgcttggacacactggggtgccacaagtgggttgcaggttggttgcagacgggcagagatggattctgctgagctttcagagtgaccactggctggggcctagcgctggggcaaggttccagctggctgcctctagcctggaggagcttcatctagttacccaatgtgctgaaccaacagcatgaaatagcatcatttcctgtgctgtgttacaaagtgcaaacgtttggaaacactgatacagtacaattatttccatcactccatgttgttataatttttagttacttttcttgattgaaaagtcaatcacattgccaaaaatgatttttatgtcagttaaaggccagttgaaatttttttattaggatgttttaaatttacttttcactttcttgaatttttttcttctcaaatttccttggcccagtgcccatgagcaaatttcattcaaaaacaggaataaccttttgtcataaaattttggcaccagcttggtatactaaattactgcaaagataactgagtaccagaagtaaaaatctctgcaggtgggcttaggagtactcttgggtccctggttcctcagttgccaactctggtttcatgaagaaagaccatgctctgaaaatctagggaggagaaagttattgcagcacctggtgtgatttgttacaacttctttaaagacagcctgcctggctagctttttcctgttttcatgcagtttgccctcccagcattggtccacctgttgttcccaagaaactcattcttgttcccaagactccttttagccaaatctttcctatcattccaggacttttttgtgcttctctccccatgaatctacccgtgcctagggtgtgtgccaggcacgtggcaggtggccagtcagcatctggatgtgagaccaattattccagcctgccctcctctttctctttttatcattttgtattatttttgagacagggtctcgctttgttgcccaggctggagtgcagtggtgctctcatagctcactgcagcctcgatctctggcctcaagcaatcctcctgcctcagcctcccaaagtgctgggattataggtgtgtgccaccatgtccagccccctttctctctcttaactccctctccctgctgtcgttgccatactcttgcatacacaatcggttgtctagtttttgattgtttgtgtgtatggtgtgtgctgtctctctgaccagatttcaggttcctgaggcgagcctgcagctcatactgctcatctgtcctctcctatggtgggtgctcagggcctctcactgttagttactccctcctttctgcccagttctgcactcaactagtagaagcagccatcctttccccaagcaggaaattgtagtggtcgcccttaagagcagtgtgagggcagaagattaagggaggggaagagtccctggaactggaagaaggtaaatactttgccttgagagggcgccgaatcattttaccaaaatagtaaatggaaaaagtgtcaaaggttgggactagttttaaaaacacatatagccagtagacacatgggggctgtttaaataaaaacatttttttacccggttctgccatcacacacactagtgacattccaagtactcagtggccatgtggagctagtggccaccacacttgacaccacggatgcagaacttttccatcactgcagaaagctctgttgaacagtactgtgtccagagtgctaattatgaacagcttagaaaccacaattaatacattctcatgaggttaaaagcagacatgggaatagaacataatgcaaatgatgatgaatattttgggtgagaagagaaagctgaggacccatttctaggattctaagatgtaagatttcttaagttctttatcttagtctcatgcattctccacatcacgcgctgtaccatactgtgtagtcagaacagacagtgtgattgaaaagctttggaaaaagttaacacaaaggattatttagcacataggctgtagatacgtatgtgtgtatttgttcaacaattggagatggttgaatacccttgaacaaagtgtgtatcttctcaaatcagtggttgcactagtcaataattagaaggtgttgttatttttaaaactataagcaaaattatgaaggcctttaaaaaatctatcataataatgaaaaagaggttgtctcccaacagtgctgtccctcaaagaaaagactggttatgtggaaacagcacgtttggagagattattctagtgaataacagtgtatatttgtggtaggcaaatttctaagaatgacccctactgacacccccaccaatgaccttgtataatatcctcccactttgagcatgggtggaacctgtttgatccatgattatatcatgttatgtagcaaaaggaagactgtctgggggtggctaatcaaatcttgtgactcctttaaaagcagagagttttctcgggctggtggcagaagtcaagagacaaagcagaaggacctcaggcaccattgctgttttaaggtagagggggctgcatgagaaggaatgcacatggctttgaggagctgagagaggccttggctaacagcaaaggagctgggaactgcagtcctacagccacgggaactgaattcagcccataagctcattcataggcttggaaaggcattcatctccagtctccagataagacccagcctggccaacactttgaatccagccttgtgagaccctaagccgagaactcacttaagcctgcttggacttctgacctacagaactatgagataataaatcagtggtgttttaagctgctaaatttgtggcaatttgttatgtaggaataggaaatgaatacagtattttaaaagaggtaaagaggaaatcttcatacttgattccctgtagtatgctggatatttcttggtaaatgcatgaataaagtctttagtagcaagtcatgtacctggaccttgttggggatgttctcgccagagatctcaattagtcttcattggacgtttgttggcaaagttgcagcatcttactgagtagcgtttggtaaaggaactgctagaatgagactataggaataggactgaaacagtgtgtaagggatcttttttatttctagaagaggtgttactttatactgatttagactgctctgagcctgtcagaagtaaattcaagaatgattaacagtggtattttagatacattaagagcaaaaataacctttgccttgtagagatcagataatctgtgtatcgagggatttaattttttttaaccaaaacttagtttctctttttatcatctagcacagatcaaatcctgtatgggccagccaaatgtttgtagtttgagaatgttttgcaaatacctctctgcttccaagccattaatagctaatgaagttttattttggtttgtccattaatttttctgcttatttttactgtattgccatgtccttgatacgagacaagtagaactaaaagagagaaaatgagaggttaagactgtcagaagatgagaaatgtgagtcataaccataccttagtgttttaagggaactttatccagtccaatccctttatagaaaaggaacttttccaagttatgttgcagtatttatagtgtgtaaaattttgtttgactttggtagttgtgcattttaaattatgaatcttatatgctacgataactagtatgcttactttctttaatgcatgtgatcatacaatgctaaaaaggtattttttaaagacccaaccaaactgaggattttgttatacatatctgtatcaacacctatatataaactcttcttcttacctgaaacactccttcacccggtttgggcactaactagatcattttcaaaggaacaaacaggaaggagcaagctggcactccagggtgcatctgagctgagaatttagaagacctcattcaagaaagtaaactgagcattgatgggaaagcactttgcgcgaagtaacattcccactgttaatgttgcagtcaaaattgtggaaaaaaaaaagtggtgctaaaattgttctgaaatgaagattgtttgttgtggggaatattttaatactcttggactttagggaggctattttatgtgtcacttgctcctagttgtttcattgtattagtaattagcaaactgtcctggaaccaagggtttggtacttttgcctgattagcattccattatttatttgaaatgctcagtgtttgctcaaatttggtgaaaatatcttttgaagacatattctctgagccttaaaaatggctgctatcgacagtactgtaagatgcactgccagtagatttgatacttttcatttcagtgtaggcagtaatgttttctaagaaagatttagaaatcagcaaagtgtaacaattgtgtttcatttatggaatggaaaaactgaagtgtcccattcagaacactttggaaaggttgtctgcattaggggatgtttctggaagcatcccttagagaagctgcctgaggaatctccttgccaggttgtaccagatttttttttttcttaaatgtattgtatatattttccttaaaatgtcttcattggctgaatgattcctatccgtagtaatattttaggtacttgttggatttttaaaggaagattatttattttcagatttgctgctataattgaaaacctagtaactggtcctgttgattgtgccttcatcactgtttctctgtgccacgaccgttcatgtgtatttgaaataaagaagtttaaaaagccatgttgaattcaagattccttctaataaaaataggtgaaacttaa

SEQ ID NO: 9891 - DNA, 686 bp, Homo sapiens
gtgggcagtgtgctgataaagcatgtccactaccctgacaagccacttagttaaaaactgccagtgtattgtggcaaacaaactgtgaaacttaaagattgattttatcatcaagttatgacgaacttggggaagaggaaggaaccaggcaaaacaaagaggataaacacacagccatactcctgggccagagggcccagaaacaagaacaacattgaaaaagtccaggaaccagttcctgtgcccaaaggtacgaatgtgtcttttcgaattcccttgataaagaagcctcagacaaggaagaaaatagaaatgaaattggacacataaataggacacccagcaaaggccagaagagaagcccttctaggagaagggacatctgtgcttccagctgagatcagcccatgtctctggtcgctctcttgcctgtggatcctgtcttctttcatgtttactacgaggcatgacattcatggcaaaacagggatgccgtttccaagagcagctataaaacaatctgttttcctaaagacagccactctgagaaggagatgaaggaacacggcagggttcatcaattcatagactgtttccaaaaataatttttaaacttttccactaggcatctgtgtctttaaccactgcacaatgcattgcctgtttaataaaaggtttcaaacatg

SEQ ID NO: 9892 - DNA, 307 bp, Homo sapiens
cacctgaaatgattcttcacatccctgagaaaggtcaaagttacaaactgatttttttttttttgctacatgagtgcatttatcttttaaatgcttggcaatgttaaatgtatttattaactttgtgtctctgaatctctgttctaatgtgccatgttgcagtgatctgagatgacttataaaaacaaaaatgtatatggctctttctatccatgcagtgatagtgagtgtaaaatctgcttacttcactattgaacactattctgttcactatctggagtaaataaagaagcttattaaaacaggg

SEQ ID NO: 9893 - DNA, 110 bp, Homo sapiens
tgggtggtagcctaatttgtattatgtctactttaagtgaatattggattttttttaaaagatcacttttataatgtatgaatttaacaataaacttttatatttctact

SEQ ID NO: 9894 - DNA, 114 bp, Homo sapiens
gcaaagctctgtgggtgggccaggttggcagagtgctcagatggccgcctttgagagttttacgtgaatgtgttgtatacaacactggcaaagaaatgattaaaatcatgaaag

SEQ ID NO: 9895 - DNA, 155 bp, Homo sapiens
catctcagatgaaacccaagaccatgatcacatatgcagcctcaaatgttacacagataaaactagccaagggcacctgtaactgggaatctgagtttgacctaaaagtcattaaaataacatgaatcacattaaaggaagaattttgacctgca

SEQ ID NO: 9896 - DNA, 657 bp, Homo sapiens
agctcaataattctttgtaaattgtctttttttttctgcttcagatttaaatgtgtttttaaaattctattaatgtctatacattggtcacctaaatactcatattctcgagttttatacagttgtatcacatcgaaaagtgtctttactgttttctgtgtggccatcatgtttaagttgaggaaaactcagttcttaaattatctgggaagggtctggattctctatttttgagattgactttatcacaatatgattcttacatctttataccatttacaattgtgttttagatctacagagttagaaattcgaaaactattccaggactaattcttaatcggcattatttatacaagaggtcaagtaacatttactagcgcaatactgcacttgtaaatgaattataaacgctcttctggaatatatttaaataaccattaaagaactgcttattcattctggacactgcatgttgatgttgaatcaactgatgccagcagaaagctattttgatttgtgaacatactgccttatttaaagggtcctgattgcttgtattttaagacattcattaaaaagaaaccaggaaacacttttgaaataacagcataaggaacttcactgtctctgctcaataaaatacctgtaactgga

SEQ ID NO: 9897 - DNA, 765 bp, Homo sapiens
atattaccagagagcctgatgctctctgatagctgtgccataagtgcttgtgaggtatttgcaaagtgcatgatagtaatgctcggagtttttataattttaaatttcttttaaagcaagtgttttgtacatttcttttcaaaaagtgccaaatttgtcagtattgcatgtaaataattgtgttaattattttactgtagcatagattctatttacaaaatgtttgtttataaagttttatggatttttacagtgaagtgtttacagttgtttaataaagaactgtatgtatattttgtacaggctcctttttgtgaatccttaaaaactcaactctaggaagcaactactgtttattatactaaaaggctgaaaaacctccaggccagactgctaagctctgaaattcctgagaggtctcagaccgggattctacttgttccaagaaagggtaaagcttctaaaccatcttattcttgtctccaagcatgaacacaggagcatgttaagaaaatctttactacttcttccatgcggagaaatctacatattttgaattagaaacaccctcacacccacttgaagatttttttcctgggaacattatgtcccgtagatcagaggtggtgttgtctttttgcttctactggccattgagaaactttgatgataaaaaagaacggtatagatttttcaaacgtatataaaatatttttatgttatatgttatgccataactttaaaataaaaatagtttaaaattct

SEQ ID NO: 9898 - DNA, 4220 bp, Homo sapiens
ggacctcaccctggggccagagtgggctctggtctccacagatggctcaacgtttttggacactgtgctactgaaactcccagccacagcatttatcagactgcggtgaacatttcctcagcattgaacaatgatcttttgcagggcatgtgtgtttgtatgtgtgggtatataagaagccgcctgtgtatgtgtgtaagatacacagctcttcagaacacaccttctttgtctagtttccataatcccaggctagacaaagtgatcagaggtttctgactagaggaagtacacacacacacacacacacacacacacaccgtacactcacacacaatcacagacacacactttctattccattccagtgctaaaccgtgacttcttagaaaattcaaccaaaatctcatgggttagttaaccaggtgcaatacagcacaccaaaagcttgactgccagtgaagatggacctgctcttatactgttgattactttcagtattaatatactattccccaattattttttgattggtatgtattaatgggtaattgaataatgaaaataagccaggtatttttgtgccggaagtttactagattgcatgttaccaaataccctgctcttcctctaattcccttcccccatctgactctattatcaactaaatgcattccaggcaaacagatggacactcacagcccttcccagccccacctccaagtagtatgcaaatggcactgagatttagcaaaaacgcggcgtctttgaaagttaacagacactaaggtagcagtgcctgtgtgttggagctcagttaggagttgaagttttctgcacctgtgataacaagcccaccagccacatgcatttcttcttcctgccactgtgactcggtggctgtagagccacatggcatttgtcagccaatctgtttcaagtcttttctttccaccaatagctttcttacagattttcttggctaaatgaggccattacctagattgtcccttcagtaggagcctgaatccttcgcttaccaggctgagagctatttgccatgataatgctgattctctcactcctcatgcagaatgtgcacctgcagccctttgatgcgttttgatttgggggcgatttttcaggctttgattagcaggctgcttgcaatgcagaagatcacagttcctttctggggcagcagcaaccagagcctcttcctgtgtcctgtgtgtctggtatgtttacaccttgctctgagtttttctcttgttttctttttttaattaagtttacattttagtttctttgacatcttgtttacagtttttgtctgatgttttttcttttgtagtgtcttatgccctagatttagtcatcttgttaaatatatttggatatgaaatcttgacgaaaagaaaataactcctgaaaaagagggtctatcttgccacacgttaaaaacaaaaataatgtccttgtggcctcttacttgataaagttgcaccaggacggtctgagaaaggcaggcggtgtaatatgtggtgcaatccattttttcaaggtgatgacggcacaaaatacttagactagatgctgatccataaacattcactgatattcttacaggttggtttgcagtgttaacatttttgttagcctgatctgtaggtgggaagtaagatcatcataattccttagctctgagcactgattcaaaattgtataaatgactgaacaacttagatgatttgaaattaattgaaaataagaagggcttgtggaatttgcatttggctttggccttcaagcatttggaaatattaagagaatttccattttacatgtctccaactggggtgcttcttacaaccctttcactttttttttgagacgagtttcgctctgttgcccaggctggagtgcagtggcacgatctcggctcactgcatcctctgcctcctgggttcaagtgattgtcccgcctcagcctcccaagtagctgggattacaggtgtgcactaccatgcccagctaatttttgtgtttttagtagagactgggtttcaccatgttggccaggctcgtctcaaactcctgacctcaggtgatctacccgcctccacctcccaaagtgttgtgattacaggcgtgagccaccacacccagccctttcactaatttttggcagagttcacaatcccatcctatgtcagaaacttgaacctaacttaagaaattttgagtcatttttttggaggactgaggctttgttctacctactcttgaagaatcctgatgaaatattcaaacacataaagggatggccctggaggtctatcctgcatacctggagagcttctctggtcctgcccaccttgaaagttgcagactttgttgtaacatctatgtgatgagcttccctgtgaagccccatttgacaggtgggccagcagtgttttatcagcactctgatggcccacatttcccaggaaaacttcttgaaacttaccgttgtgggcagtggtcagagcgtgtagttcttatgactgtcttgtttcatctgtggagcacgtgtggagcacgttggtacagcagtttctgtggggtttggcatgggtgattttggttagtaaccatcctccaattgttgcttgtgaaagtcattcataacttgttccttttacttagttttgttgttactgctgttgttgttggtttggttggttttgagaccgggtctggctctgtagcccaagctggaatgcggtggcgcgatcatggctccctgcagcctcaaactcctgggctcaagcaatcctcctgcctcagcctcccaagcagctgggaagataggcacgtgccaccacacccggctaattttttctttattttttttgtagagatgggggtctcactatgttgcccaggctggtctcaaactcctgggctcaagcgatcctttggcctcggcctcccaaagtgcatgagccaccatgcctggcctgtttagttttgtttcaagttgaaatacctttcttgtgttttctaattagaaaagtaatatctactcattgtaaaaactcaaacagtgcagaaatgtagaaagtagaaagtgtaagtccctggttgtcccttctgcctgagacaaccactgctcacagtttgatgtatatccttccagagactctcaaatttaagcaaataatttttattaccatgtctttttatttgaagacgtacatttgcctccaaagttcaacacaagttcaactgaccatatccttccatgacctgaatagatgctatcctttatcacgatgttcaattgcctttgaaagagagtagtccaggtatattcctgatcaaaatttggcatttttgatgatactactctacacagatcagactcatgtgcagaatcgtgcctggagagagaggtttggttaagacagagatttctggaaacattcaaattgcaaatggaaacttgaaacccacaatctaatgaggaatgtactggaaaaataatctgaagagttgacaaattgtgtactagattgaacacatggaatgcaatgcaatgagactttctgcactaaaacttatcctcatatgtacaacaatgatgtgtgtattatataacagtgatgtgtacatttctgacaccccatacataatatacacagtttgtataaatgcatacatttaaaaatatatatgtacaatacagctaacataaaactgtagtacgcctgaaggatattactagtgcctaatattgagtatgagtcactgcgtgttcgcatcaacttggaagtgcagtaattgttataaaattaatcagtgcagccaacattatttatgaatcacatctttgaaactgtgcagtagcatatacatatatatttttaaataacatttttcacagttttccagagttactgttgaaatctgcatcaccaaaaaaaaaaaaaagcaagatttttttaacaatgtagacactcttcagacccagtaatctgcgtgtgatttcctatttgtagattcccaagagactttagcagtcaccagccttaatgcatgtacaggatattattgtgacttaatttatctgcagtttttaatccatgtgaaattggaatttataaacggacttggattaaacatgtctgcctttctaaggttgcaaatgttacattaaatgatttatgttgtaa

SEQ ID NO: 9899 - DNA, 11007 bp, Homo sapiens
tttttctctctgtcaaggtttctggcagcccttgtgcttttataaatgtcaggcatggacgaatagccgtccattcattgtgcttcatcaagtgcttgtggatgaggttccaaaatgggacgcttgccaaacattgagtcctcctcaaaaatgacaattctgtgtctggtgggatctgaccttgtgtgaggttagcctgaagtctgaatggagcccatagttggaaaacaacctaagaaaatctcttagaagcaggtgcttggggaatgcagttcactgacagcacaggaccctgcagatggtttacatgtggtttgggtttcacgagaaagaaggattcacttcccagtcagcatctggctctgccagatggtaaaggcgtgctttagtgtgtagacaatatgggggaaccacgtttttatctggaagtggatttcttagaacacaggctaaccaaaactacgcttaggctttgcgtgttgctgtgaagttgtctgtgaaatcgaataatcacaccattgttcagtgcaggagcccaaactagtccttacccaagaagtagtagcctctggatagaactgtgtttaatgtcctgttgtagtcccaggtgttgtaaattgcatgttgtaatcaaacgaatgtcaaaacataagaaagtataccttggatatagaaaaacctgagaacagtatcattcacttgaggatatatatatatatatttacacacaataaagtgagttaaaattgtatatgcattgggatgtcaaacataaaaccaccaagtgcaaagaatgctttgaaagtagaaccttgtctcattgatcagtggttactaagcatttaggaaacagtcatctttttctattgggatttgcattagaaattagccccatcagtaaatttcagtttactatccatttattaatatacaaaaacattaaaaaatctgccatgccatggtaatctatctattccaggaaaatagatcagaatatatgaagggaggatggccggtatgggatgtaaatattcagtaagtttttctccaacaccaacctaaaattatctttatttttttgaaagaaagttttacggtgatcagaccaggtgttatctgttaaaggacagtagtatgacttccatcctgtaatgcacgttggtgatattgattggaataactgaatctgagatactcatatgttctctctggcccaaccagctggtgcatttggttggcttcctcgtctgtaaggtggacattcttaaccagagggtcacgaccacatcacagctgcaagttttgctttgttcattgaaggtgattttttagttttaaaatatatatatctcataatatacaatgttgatggtatatcaatccatcaagcattttattagaaagactttataatattattaatttttctttagttttcagtagataaagtagtttcagtagataaagactttataatattattaatttttcttttagttttcagtctcatcatgggagttagaaaataccagcatcacttaattgtaaagagaaaatgtgaaagtattttccaatccaatgtttcaagtgcctcacttattgtgaatctcaaatatcatcttgagatggtttaatggcagtttggccaagtgatttctaagagattttattaatttatgcattaacaatagtattcaactttcttaggcattataacctaacccgatcatttgattggaataactgaatcattcattgattggaataaaataaagaaaacaaaatgcatctcacatgccagaagacctttaccagaagtggttcatgaaaatcagtatgcattgaccattctctgcctttcccttttggaaaatttttttgtaccttcatatcacagctgaatagttatcaatgccatttccatttggaagtatctaaataaccacaatgtgatcacagcttctccacgagccttcctgaagtaaagctggtatgcttgctataatacttggaacctgttgctttctcttcctcactctttaaatgtcataaggtcacacagttcttggaatcagaactattcagttatttcttcatgattctgcctggctttctgagtcttctccttcggcatgttatgtaaaagtctgaacaacaatgatgacgcagacgagagcaacatacgtttttattttttgataggtttttatttttttgataccagagggaattaactatgatcacatcgtgctctctctgttcagcatcacacgcccacatactgcagtgtgggagtagattggtacttactgagcacttagaaacatcacgcatcaggaaccgggtcagggtgacagcatcctacggtcatatcatgaaggaagcctcccttacaaacctaaaaaaaaaaaaccccagcttcagtttgctaccaattaagctaaagcagaacggtctgcttcctcctccgcctgcccccttctgcctcttttctgttggggagatgccaattctaaggatttctcagaaaataatgtaatctctcattcaatgtcaggacattccagcttaattgtactgaaagtgctccaataggcatgctctcgttacattggaatcaaagcagaaaagagtaatagcagcgtgggggagtcatttttcttcttgaggaacaatacatgctgttctgtatttttccattcatcgcccaaacctgcctgtgtctttgaaatgcaagtaagatcccaaaggcagctttctgaaagcccgtggcatttttagcttatcccatcccccgtgtgtgtcctcatcttcagaattgaaagttaggatactttttaaagtttcaaaagaaaataatttaaaatgttaaggtttatccatagaaacacaataattcttaaccaattcatgtaccaaattcaacagtattatctcatttttagggtcacaaatgtgtcctttttgcacttaaacctcctccctctctcaaaaacaaaaacaaacaaacaaacaaaaaacacaccaagactgtttaacaaattgtatctcaactcttaatatatgttaagtcttaccacaggacatttgaatcatcaaggaacagttgaagtttatggatggtagaataacaatgaactatgatattatcactttattataaactttttggaaaattggcagttgctaccatcgaaatactccattgcctgtgttacatagaatttgttataatttttaagggctttaaaaaaatacccatctgtttcttctccttcttgttttcttttgtgccccaccacttaaattacttgggtaaataccactcttcaaaatttgaatactgtctatcaaataagaagaagtgtgaaagatatgaagaagaaaggtgatagcaaattagaagaaaataaatgtgggtgatttcttttagttgaaagcacagagttttatttttccccagtataactattgagtagggtagggaggtccctgtatccccatttttattttttttgagatggggtctcactctgtcacccaggctggagtgcaatggcgcaatctcgtctcaccacaacctccgcctcctgggttcaagtgattctcttgccttggccccctgagtagctgggattacaggcacgcgccaccacacccagctaatttttgtattttttttttttagtagagatggggtttcaccatgttggtcaggctggtctcgaactcctgaccccatgatctgcccgcctcggcctcccacagtgctgggattacaggcgtgagccaccgtgcccggcccatctccccatgttttagcatagacagcagcggcattcagtggaaggagttcttccccttcaacatcgtccttcccaaaggccacattctgattctattgttcaccaaaaactaattcccagggaagcccgctctggatgggaaggatgagctgcgtgagccatcgcccacacagggagataaccgaacccctttgccagcatcaccccctctctactggggtgagacacttcattcagagcactggctctgactcccaggggaaagtctttttccctttacaactcctcacctcagcctcaccttgactttcacttctcaactgctgaattctataaaatagccttttagcagtgactcagcttttaggtgagcacagataatgaagaaattgaagtgccaccattgcactcccccaagttggggacataaactcgaatttgcacccaggtctgataaaagtaactgattgaggacgcagaaaggtggatgccattgacagcgttgactgttctcacaattcctacagaaatgaaagaaggagaggcccagcagaccacaccgggccatgaggggaagcatgggagacaggcagaagcaggagtgaggaggaacgtggctcagaccctctactgtatgttctgcaggaaagggcagggaaatagctaagactggctggtctgaataacagctcagactctaggctatacaggtggtctctagccatctggcacctagccccgggtcgttagggtgggggatattgcttcctaggttgtaagagccagatagaggaggatgggctctggattggtcactttgctcccagggtagccctttgctgtatctaagaattggctcaccctgggatgggcagtttctcctgggtcagcgaggcccctgagatgtcaaaatatcataaaatatagaaatcatgattaatacaattggtcctctgctgttttgacatactaaggtcacttttgatagcagaaacttttaaagagtagggcatacgttgccctgaagagcatagaaaacattttattctgagagtagaaaggaggaagacacgtggagatacaggagtcccttaggctggcccatagctgagtctctcatgtgtgtggcattagtcaagaatgtagttctgcagtttgcggggggggggtctctaacatttcttggtgcagttgttaacatgtgttaaacatatgagtctgatgatgatatcgcggtgtttctcggctcggggtggcaggtctggcggttgtgtggctgggggtgtgcactgatagttcagtaaaggataagtagagactcgtggtgttcatgtgtcaccacagggagggagtggctgtggagacccaggacaggaagtcgcggtggaaagcaggctggggtggtaggagaaggcaccgggggtgggtgctcctcccccaggggttgaggagttgactgatagggggcagttacctcctgggaaagcaagacgctcccttaagttttagaatggtacagagagtagtcccttctaccagagtttccatttagacatgggagtgtagggggccatgtttcggcagaagcagggcatgtatcagcattagtggactcctcagtattaaaaggaagaacagcaaacatgtcatgtgcccactttgtgcctcaggagaggtagcccgtggacatcgctagggcagaggttttaatatctgggacaaagttatctcccacggcgaggtcgtggctgggaccatgtcatcttcagccgtgagctgctgggctgggcaatgtcttctgggatgtgagacgtggggtctcctttctaagcggacccccactcgtgctgatgtgggtcccagcatttgccgcgtttggttgaaacagtggcttacctggagggtctgggtctctggatcataaaccagcgaaagcccccacatcagtggtgacaagatcaatagaccccagaatgtgtgcagctgtgcttgatagggttttggttcttgctttttggtggaagtttaggctcaagtgggtcccgtatcggatgagcagctgcacggcctgtgggagccctggggttagtgggtccaggagagaatgtgttctctctctgggctccagccctgatggggtggggataagatgcaagatttataggaatagggggaaacattatggaaggccccaatatgtaatgagcttttatatacaagaatgcaagacatagccctctttttatgtttaaaggggactatggtaatgttttttaaagtttgtgtgaggtgtgagtcaaccgaaaggccctaaattaagagagattcaggtttgtggtgcaagatagaggcccatttcggggtctgtttgcagaccagaatttgaaatggagttgtttgaggagaccattgtgtgtcttcgtgaaaccgattgtgtggaacctatcagggctgtggaagttgtagcgaatgccttttcccagagcccagcattgtggattccgagaagtggcatgtgtgtctcagtgacttccagtgatgcctgccactctgaagagatgaaggagtgtcctggcaagacctggaatcccagctgtagcacctgtggagagatgtgatttagatttggatttggggtatctgtgaggaagagtcccagagtttttcatcctgaagggggcaactcttgggcagtggtccaacagttggccataaatgtgaagctggggcgctgtgctgaccagggcatccagcgttaagacgactgcctaactttggccacatgcgttgttttttgggttccgtttcgtatcagggcatgctggctaaaagatgggaagcagcaacattctcttgggctccatcatttatatgagggttggcaatgccatctgtaccctctgtgaactcccactgctgttcactcagttaatctaagggacaccaaggggtctgcgggaggatgacctcacaagggactgaggacatgggagaccaccctcctgtgggtagaatacaccagagggcccaggcttgactctgtcctgtgttaaggaggcatcggtagttttgctgagcttgtcaggtgtttataatggacagttggagattggggtcctaggcttaggtctttgagagcctctgtgtccaggagagcccagtaggcatccagccatttactgctttaatagggtagcatgaggctgagagggatagtttcttgcatccaaagcccttaggcaccttatgtccatcctaagtgggccagagactccagggctgcatagagcttgccagagcttctataatgaaggggtctctgagggcaccaacaggagtgcccatggattttaaggtttgattatagaggttgtttatggagggtgccccatttaaagcaagctgatttgtaagcagcagcaagaagattaagtaaaatttgtaaatgaggactacattgccatcagaacctcgaaagtatctaaagatgttggacttgtatgtccttaatgagtgtgacaatgagtttcctcatttgtgctcctggagaaggcggatgtggtgaagaccctgtctgcagacattgtgtgccatggcaaagccgtggagctccctgtgggtggcctgcaaaggtgtatgtgcccctcagggcagaaggcaaacggcagccaagaagctgtgcaagtagacacttaatgggacatgttagccaaatctgtaagagcaaaatattggccagttatttattgtgtagaattaataattttaataataatggaaattgggtaatggatgggactgcagcaataaggttgtagtaatccaccatgaggcacacttgtttttttccaggtttaaggataggaaagattgggctgttcaatggagaaacaagggtataatcacccctttattaattagtaagttttaatccttgaatacctcatattaactgttttaactggaggtccatggggcatcattttatcaagctagtttataactgccaaagactgactttaattttaatttattatttgttttattagagtgtctgtgttcaatatgggatattagggcgttgggtactatgaccacaggaaatttagacaggctacagttaaagtgaagcataccttacccatccaccccccattttatatttagttgcctttttaaaaagattataggggtacaatgtttagatttagtgggatctccaggtataactgtaatttgagccccagtgttaagactatgaagctttgtcaatgggtacattttagcaaatgttacaattaatttagaacctaagttatggagacacaaaagccaataggcacccttttatgttttggttaaatgtttcagtatatacatcttatttatttgtaatattagtatataatttgttgtatacatttttagtgtataagcgttggatttctaattggatcagattagggaccttccgtttagctgcatatgtacatatacatgtacaatttattatatatttgcgttaaaatagcctatctgcatgtgtatatatgtgtgtatgtgtatgtatatgcactcacacgcataaatacacagtctatttagttacctttaatgttttttcccttgtacctaggctttttctcgctttttcctttttttctgattttgtggcaatttagttggaaggaggcggtcccagcatgttgacaggcagggtgttcagagtgcccaggcacactggtggggggtggttacaggctcacgtagctcaggggcttctgcaggtctcaggggagtgggaacaaagtgtcccaccccttccccttttcctcaaacctcaagccactggtctctatggatagatcctttgcatcccaccggattgaggaatgagtcacaacagctgcaaggctcttaaagcaacatttaaaccttttggcggctgtcatttctgtgaggagggtgcctctcaccggccgcatggccggaggatccctgcagcgctttggagaccaacacccagatcctttgcccaggagtgcgattaattcctcactggatgctgggggagggcccctcaggtgagcagcccaccactgacttcagcgttgctggctcggttatcagactctcatccaacacaagctcacagggaaagccgttccttgctccttgtggagggagctaccgtcattgccctgagaccaccagccaagaaagtaggtatgtccaggtagggaattcagagggacccagtgcatccaattatacaattatacccagaaggtcctgtgtaggggactgcgattgacatcaccctagtctgcagcaccaaggactgaatgagctcagtcctcttataatttaggctggactgtcacagacactggcagacacagcatacgtggtgcagccaaagtgcaaacatgccagcagcggccatgctccccagggtgggggtccagttagtaagccacgcgcagccaagaggcgaggcatgccctgtgccacacacggactcaccctgctcactgtgcccgtggtatcgaaatgtacccacgtttaattcataaaggagaggctgctgtcattgaaagaaaagtttgttacttgcatttctggagaaaaggagcgcaccaggccacgcagggccacaggaggaggacgcaccagagtggtcaggaggcagaactaggcgagcagctttccactgtgtctccatggcaaaggcgaagatgggcgggggcagagtgtaggattggcaggtttgaatgtcttgggcagtagctacaggggtggtctccagctgcctggtgcctggccctgggtgatcagggtgaggggatactgccttctgcagtggaagagtcaaatcgaggagatggactctgagttggttagtgtgcaaaggtgcactcccaagggacccctttgctatctctaagaattggcctgccctgggaagggcagtctctccccagtcagtgaggtccccaagatgtgaaaacattatacattataaaaaagcatgattaatataagctcattctagcatttcaggttacagcttctagaagaggtttgtagtctcaaatgagtaggtttttcctctagagaggggcgggcctggaccttcaagcaccccttggtgtgtttaggagctcaggagcagaagcacctgcctgcagccctgcagctaaggaagttctctcagtcactcagagcagggaggggctgagagagtcatgtgaggctcccggggtactacgacagccctcgaggtgaaggattggccctgatcataatagagaaccctgaggaagtttactgtcatgagtctcggctggttggcgcatgtgacctttgaaggatgaagatggagtttgcaacatgagtatctctaaccttttgcttttcagggatcattttcaaaaattgcattggggccttcgttatttaccatagtattttcactttcatagttttgtcacctttttgtactgtgaacagttcaaccagtgaccgacttctctctcatgctgtttaccccacacacaatttcccactcaattctgaaaataagaacctgttaataggttggaaagctgtgtactctattcatatattgttctttcatgctagtggagagtggtgtcattagcatcttaattttagagttgtgaaatgattttaccaattaggaattgaatgtgtattttttttctgtttaataagaagagcaaatttgaataaataagctggtgtagataaacttaataatcatgctttttcttgtttggagataggtgatgtgttgtcatatcctgtgatacaggtcactcatctggccttctgtttctgaagtttaagtctggtttgaatatgtaataatactactcagcatttcttgttgcctaagtgagacgaaacttaaatgttatgatatttacttcatgtattcttgtactgttcatttcaattaattggtattgtatatctaatatgtgatatttgaactgaataaaacttacagtgttgtaaatgttctttaataaataatcacacctaagtaataggctagactgatgagaaattagatcaaatcagtgcctaggcctttgtgtttgtgtcgtagggatgtactaacacatcaccacagactgacggcttttcacaataaatcagttttcttcgctca

SEQ ID NO: 9900 - DNA, 1384 bp, Homo sapiens
tgcataagacctatgaattcaaatatctttattagacctggggctaaccaggtgaagatctgagcccagaaatgacccttcctccaccacacccctcctttgaggacgcccggggtctcccacaggcctgtgagttgcctcggcatatgacgcagaaccccaactgttacaacttagtttggatgtaagatgctctgaggaccctgcccacacccctgcgtgcattaggatgtcgctggcctttgctcacctcagaggggagaaaaggctaaagatttgcagtttgacagcccagcagggaggaagcatcacacagcgttaggagccgtttccttcaggtgttaaggaaggggatgcccctgaggttctcctggctagtcagggtggcttcacccatcactggtgggttgcaggaacagcacccaggactctgaggagggacagagaagcaagggggctgctgaaatcgcagagacttttgcagcatcagatctgaggagtaaaacggcacctctggccttcatcttggtgctgcgacaattgtggaggcaaagcattctttctgtgactattttgttcctgtagacagtcagcgatggccagagggtggtgtggtgtccaggggtccatctttccagaatccatgcctgtgtaatgctggtccatgcttctgaacctgtgtctgccaagcgcctatttcattcagcacaagacatacgattttagaaggtgaggggaggggaggctttttctacctgagaaggggagtgtctttgagggccttaaaaggaccatggcccaggaatgggggcgctggttgggcttggagctcaggctgctgtggatcccggcgcatcagttctgacttgccttacctgggtggacagcagtgaatctccacctgtcttctccagggagctcccatgttggggctgaagacgagcaggggcaacctgccagcatcacagaattcagtgtagtttatacatttcgattcctttcatctcagcaaaatgggcactgccagagccatttctgatcacaccaccatcctggaccatgtgactggaaggtgggtaaccaagttcaccagcaataaaacccagcgcccaggtagcctccagcagtgcggcttcctggcaacaaggtaggccctggtgcagggcaagccgcagcgaccatttcagataccgtccacagccaggaccgctgagaactgggacagtttcctgggatgagtgccagcctgagcctgcatggtgccgccgagcccggggtggaggagggagccaggcttcgcttcaaggcggcctctaccttttctcagaatggtttcctgattgtgtcaatgtgaaagttaaataaaatttatgtgccaaacctg

SEQ ID NO: 9901 - DNA, 671 bp, Homo sapiens
caagacagcagctgctatgcacactggagtccaccataccaaagcacgaaccagactgtttcttggggtcagccctaaaccgagatttcagtctaccttaccaatggggcatctggctaaacaacctgacaaactgtggccaggggaaccgacacaaccctcaagcatttctatgtattgagaattgtcagtgccctaaggtatccattggttcccttgatgccaacttacaatttttaccggatttgctgaaatgggcacttctgctgtgatgctagtgttgattttgctctcagatgaacacaatgtctcatactaaccaagaagcaagaaaagccccatgctttcatttttcacttggagtgacaatgggagaggtcaggaatcaagttcactttcaagatctaagggagtccactatctgtgcaattgtatttggcttttttttgcactgtttcaatgctggtaattgaaaccattttaatatatttggttgtattcactttatatgtccttccaaaaatgttgttgtgtacaaaccatgctttcaatgttggcttccaagttttttaataagaaactttttgtatttacttggtccttttcttttaccttgtagttaagtgtcttaagctgtagactgtggcagtgaatgggtaagctggagatgt

SEQ ID NO: 9902 - DNA, 1147 bp, Homo sapiens
cacacgtgcccactgaagtggcaccaacagaagtttggcttgaactaaaggacattttattttttttactttagcacataatttgtatatttgaaaataatgtatattattttacctattagattctgatttgatatacaaaggactaagatattttcttcttgaagagacttttcgattagtcctcatatatttatctactaaaatagagtgtttaccatgaacagtgtgttgcttcagactattacaaagacaactggggcaggtactctaatataaaggacaggtggtgtttctaaataattggctgctatggttctgtaaaaaccagttaattctatttttcaaggtttttggcaaagcacatcaatgttagactagttgaagtggaattgtataattcaattcgataattgatctcatgggctttccctggaggaaaggttttttttgttgttttttttttaagaacttgaaacttgtaaactgagatgtctgtagcttttttgcccatctgtagtgtatgtgaagatttcaaaacctgagagcactttttctttgtttagaattatgagaaaggcactagatgactttaggatttgcatttttccctttattgcctcatttcttgtgacgccttgttggggagggaaatctgtttattttttcctacaaataaaaagctaagattctatatcgcacatgagcattaagttcttcattgccttgttaaggaaaatgagtaggcagactcagaatctgttatattgatttcagttacaatttaatctttacaattaaaagggcgaaagatgtagaattttagtttttgttgttgactcgaaataaccagttttcttgattagagtttaagcagatttaataccatgaccttgcttaaccgtttcttcttttttacttgcttgctgttcttttgggtcaaaggagcaggctaatgcaaagcttttggagactgctaagtgttaaaaagtgattaaacacacactctgctattttttcacttcttggaggtagaagtcgagtatgaggcagttattttttagagtgtggaattatagtctttccttgctcctagttattctgtatatctttactttgtaggtaaaaataaatgtttatttaaaac

SEQ ID NO: 9903 - DNA, 2160 bp, Homo sapiens
tggagtgagaagaaagtccttggtgtttgcacttaaatgaaaaccttttcagtgatgcagccagacagctattgaccactgtctctttgttgaagggttcatagcagccctgccatccctgcagcagaatgagagagggtgaacagggaactctatgctagatttgagattaaagtggtcatttgcagatctccaactcacacagatacttcacgtagatagtctttattccattgtattcaatccagactcatcgattcagaaatcatataatagctggtggtcaaaatgacatgttgagatcattgttgtttcattgtttaaggaaaaaaaaaaatgcctgtacctacaatgtgattgctttgtattgtgagagtatctttgttgcttgctctgccaaatgcagtcttggttctaagttcactgtgaccacgaagcagctgactgtgcatcacgcagtcacaatattgtttttagggtgagggtggaggactgtgtgtccgtggattactcctcctgctggtggattgcagatgcattattaggtcatactggctagaatgcagcttttctcccaccataacatgaaaacagtgtaagaacatagggtgctttgtgcatagcccttctctatgtaagcagccatggcagtcattaaagagaaaggagtagctttgacattaagctccccagatccctgctgctcatacttctggcaagggttcccctctctcatgcatgaacaggggcatccaaaataagaagctctccattctgtggtggggaaagcggagaggggagtgggtgaagctgggaaagtaaaggcagcacgttacagaaggaagaaaggaagccagtaactgagggcccactgcctgcccggccctgggccaggccctcaacagaagccatctcatttaagccctgcaaccaatgagatgcacgtcatcattggctcttacagacaagaaaactagactcagaggggctgagtccacatcccagacagctcactgcagacacaggtggagtggttcctacaagacatccagttttaacaacaaaagagttattgaaatgcatgggtagaaattgaaccaggaaaatcagtaaagtgattgtaaaaaagaaggactagcttgcctggagatgatgtttcttgcttttggaaaaaaaaaaaaagtctctgaaatttgattcttactacagatttaaaactttctacatattatatgtaggagctcctagtgtttttgagaaattagactgtacctgtgtacacttctaaggtctacatggacctatgtatatatatctaagacctctgatcattaaaacctataaagggttgagctgtcccaagttttctgtctttctgtaatggctacaaactttctttggtaggttagggaggttgtataacataaaaaacacatcactatatgtaggaaatatacatttttcaagtaaataagagtgttattaatgattatgaacttttgcttaacaaaataacatacgacgagagcttgagttgtcaaaatatattttaattatctattgctaaaaacatagtaagatgcagagaattctttatttgtcataagccagtcctcaaaagagttcctaacagtagtgatttctaatatataagaataaggtacttctgagggaattttatattttcagagtttaaaattattgctactcccaatttagaaaaatggggagaaagctggaagaacaaatgacatgctcaaatgtattgcataagtcaacctcacaccttaatactgggagcttctctgcctcctgatcctgtcttgcagataaggtcccctggctaggtttgcgtttatagtcaggttccatttagctcattaaaggtcactgctgcttcaaaggactttgcccagtggatgccattcataaccactgatgaatgttatcagctatttatccaaattacaggaaatgaaacctgaaaaggttgggtaagaatagtgttgaaaattcacagttttaagtttgatggtctccattcaggcaagtgtgtttcagcaaatctctagaaatttacattgattaaaatgttagaggctgttctggaagttctagacatggcaataaggcaagaaaaagagattaaatgcatacaga

SEQ ID NO: 9904 - DNA, 1213 bp, Homo sapiens
atggatttggacaacataaagcaacaaaatttgagatggttgaatgagggccggaggccatgatgaaaagggcactttggaaagggttggggtggaagggaaatatttccgggtgggtgtgagctgttgggcttccaggtcagctcttggccatgcagccatgcctgcaggatgatcagaagtcacggcacctcatgggaaggttaagactggagcaaagcttttccaaggtgagcatattcagcgtttacctggaagtctcttcttcccacctgggctaatcaggttacaattttcaagggtaaacaaactaccagctacaggatagggaagtggtggtggaataagagaacatgatacctggaggaagggaagaaaccacaagcattttcctactgaaaaatagggtgacatgtcagtcaaattctgatcaactggaacttgagtttccagttaaattccatacactaggagggagttttctatcaaaatcctgcagattgaagaagctggtttattagaaccagcctgtcgcttttcaaagctgcttaaaaataagatactgacctcacccctagagatgattcagtgggcctgggtggggccaagaaatccgtggtgttttgtaagcactgctggcgatttctcatggcagtaaagaccacactgagactgcactgattttgattaaagtacataggcttggctgtttttacacagctaactaaatttggactcttaaaattgtgtttgtaatcacagtgtgttacacctttcccagctctcagcagttgtactgcatgatggagcagcgggcccctgggacctgttccctgtgctccctgcctctgagagcccagcttgctctgaagttggactaaaccacttagatgctggggttgccacagcctgctcctggaagcctgcattccagtcaggttgcatccttctggtgctgacagaacccagtggtgaagccaaagcacaggaatgctttaaaaatgaacagtttatgcagaataagggtcaggagtcatgccagaccagaacttgatgctactgtgtcttgtgttaagaatcatttcctggccaggctcggtggctcaggcctgtaatcccagcactttgggaggctgaggcaggtgaatcacttggtcaggagatggagaccattctggctaacatggtgaaaccccgtctctactaaaaatac

SEQ ID NO: 9905 - DNA, 300 bp, Homo sapiens
aaagcttggcccaagggtgcgaggggaactccgagttctttctgagcctgctggacatgaagagcagatgaccaccatgctctgtgtcagccaggacgaagggagacatctgggtgccagggagccttccgtccatacgcaacaaggactcctcgctgctgaccaggctctatgaatgtacatggaatgaccaggctctatgaatgtacatggaaaacccctaaaaatccccaaaacagaaacatacaagagttcacctgtccaggtacatagtaatccaagacagaggtctactttgaa

SEQ ID NO: 9906 - DNA, 455 bp, Homo sapiens
attcaacacagagaagttgctgcttgtgatctcacacacagatttttatgttttctttctcacccaggcaatcttgccttctggtttcttccagccacattgagactttcttctagtgcttttcagtgatactcacgtttgcttaaaccctttagtgctttgtgatagttcagtcccagggaaagagaaaactcgccctaggccctaggtgggaagatggtttgaaatttttgtaatcgagtaaggcacacccaaatgtaaaaatccttttgaatgatgcctttataaatctttctctcactgtctatttaagtgcaattaacatatgtcacgaacttgaaagttttctaaactcaataaggtaatgaccagttgttatttacagctctgtaacctcccgttgcgtcaagtctaaaccaagattatgtgacttgcaataaagttattcagaacag

SEQ ID NO: 9907 - DNA, 722 bp, Homo sapiens
actcctcacttttaggacacaagactaccattgtacacttgatgggatgtatttttggcttttttttgttgtcgtttaaagaaagactttaacaggtgtcatgaagaacaaactggaatttcattctgaagcttgctttaatgaaatggatgtgcctaaaagctcccctcaaaaaactgcagattttgccttgcactttttgaatctctctttttatgtaaaatagcgtagatgcatctctgcgtattttcaagtttttttatcttgctgtgagagcatatgttgtgactgtcgttgacagttttatttactggtttctttgtgaagctgaaaaggaacattaagcgggacaaaaaatgccgattttatttatgaaagtgggtacttaataaatgagtcgttatactatgcataaagaaaaatcctagcagtattgtcaggtggtggtgcgccggcattgattttagggcagataaaagaattctgtgtgagagctttatgtttctcttttaattcagagtttttccaaggtctacttttgagttgcaaacttgactttgaaatattcctgttggtcatgatcaaggatatttgaaatcactactgtgttttgctgcgtatctggggcgggggcaggttggggggcacaaagttaacatattcttggttaaccatggttaaatatgctattttaataaattattgaaactcaccagtcatgg

SEQ ID NO: 9908 - DNA, 26 bp, Homo sapiens
aaagggtttcttgggaatcaatgtgc

SEQ ID NO: 9909 - DNA, 2434 bp, Homo sapiens
aaagcatgcctgtgggctgtcctcccaggacaagccaaggagccaacgagggctctggagctgtgagtggtgccaaaagactgccaagaatcaaggcttttgtgatatgtcaccgtatgccttaggatgttcaaggagccagacgaaataaggcctgtcttccaatttaaccaaagataaaggactagagccgggatactttcagatgctcgcctgtacctcaccaggcagagtaaatatctactcactcatacagccagcccaccagcccaccattaactcactgaacaatgagacaatgttgaggactcaaatgaatcaaaccccgtgggaatgacagaagtgaagaatctggtccctgtctttaaggagtttgcactccagtagaagacagaaggaacgtatgtttacaaaccacttcactggaagacgtcaaacaagctgaatgaaggggcgcttagaaaacgttaatagaagttctaagcgggagatgactccctactgggatgatgaaggatggcatcctagtgaagaagcagctcaaacattttgataaaatggcaacaaaatgcagacaccctgctccaggtattatttcaggtttagtacaagtctgttaataccctatgtggtttcattaggataactttttacctatccttgaggtcatccatattcttacaggccttccagtcaataatggaagagctcactctatacaaaaccaatatgcaaggcatgtgtttgtccaagcaattggatgtgtgcagtagccaatttcatttactgcattactctttggcctgggaaccctgtggtctgcactacatgtgaatggccttccacttcagtcttaggcagatttgaccttttaggggcagcaatgctgaaggacacagcaatttaaattataatgtgtcaggctgtgttttcacttcaaacatgtatgagtagtcagctgtaattagagaaatgatgacttcctaagagttcagccacgcataattctagatttcaagagcatctaagacttgtggattagcctcatggcatgagagtttcagactcagccttctgagccagtcagggaaagtggagttctgcagcgcaaatgagagcctgggcttgatgtcgagggagctggcttctagttgtgccaccttgggccttgtcttttcctctctctgcctcagtttctcgtctgccaatgagatgttagttagtgattctataattggggcaggtagggttcaggtgagcaaaaagaaagtggagctataggaaatgccaggcctttgaggtgctctatggaagtcaacacagtgtggtttgtccatttaaatgggaataaaaacagaaaaactcagacttggcattttcacaataactgcaatggtttgacataacatttataggcagaaagttaataaactggcattgttcttggcatattattgtactatccctgtaactgccaagagctcaggagccaggctagtgatcacaccaggggttagagttcactgctgaactccctgatggcaggtctgtgtttattactacattaaaacaaagtctctgacttataaagcgaggttgtaaaaattacaagttgcatgactgaaaaaatgctttagggggaaaatcagtcatatctttaacaccaacaagcaatttcccaccaacgaatgtagtacatactgtgagaggatcataatgaggtcctgaatatttaatatcatcatttactgtgtctgtttgctgctgtttttcgaacctatttggtttaccctgcaagctaaatactccacggcagagcttaattatccttttaattcctctttgaaatcctgtggtgcccccttccccctgccttgtgatgatgatgagtgagtctccccttaattagactgcaaatgtcacttgtgatgagtgtgccattccaggataacagcttgcaccctcctcagaatgttttcagcgaaagagtggggtggctgttctctgctcctggtgctttggcctcatttcacactattagaattctggggctgtaaggccagccagtgtcagctcatgttccattggctctccacctgccatttttagggagctattccttatatagttacaaattcccttgtcatttacttatttggaaacatgggatttactctgacaagctttagcctatgttatgggattcagaacaatgagatcataataattctcactgaccaaagctgggactccatcctgccatttttgtgtggagatattcataattctgcaatactttaaaacatttagaaaacaccccagggtaggtctgtggcccttagacagtgaagtcttaattgtcaatattatttttgtctaattctgtatatatataacttattatattttataatctcaataaacacattaataa

SEQ ID NO: 9910 - DNA, 1508 bp, Homo sapiens
aacagaagttccagagcacagaaggtcatcatcacaagcaaactttattaaaaaaaaactagaagtgtgctttgattttgctgttatttgttttatcacttctatatttggtgaacagccacagttactgatatttatggaaaagtactttcaagtacaaggtcaatacataagccagagtgaatgatactacaagttgagcatctctaattcaaaaatctgaaatccagaagcttcaaaatctgaatctttttgagcactgacttgaccccacaagtggaaaattccccacccgacacctttgctttctgatggttcagtttaaacagattttgtttcttgcacaaaatttttgtataaattactttcaggctatatgtataaggtggatgtgaaacatgaattatgtaattagagtcgggtcccgttgtgtatatgcagatattccaaacctgaaatccaaaacacttctggtccctagcattttggataagggatactcagcttgtacctatatattcatatatattcactgttgttagaaatgtttaagttgctgttctgtgatgaatctaaatcttttctcttgctaccaagctattgtcactgcagtgcattataccaaagagcgaagtcagtgccactgaaaatacagaacccattaatatcgtggctatctgattacatttatattccaagatgaaccttttttatatatgctaaaaattttggggaatatgttttgggatgtattatggagctaaaactctaacctcttaatagttttatagaacttaaaaattttttatacaattacccaattggtgatatgatcttaagcttttgtgtcagattatttaatatgatgacttcatgctttattatgccttattatggctgacgtattactgtggtgaaacaaaatatctttaaaagttaaaacatccagatatataagctattttttcctaaggataaagtacctttgagcatgagtgtatcacagctttcattaggaaaacttttcattacatacttgtttaaactctgtcttccagggtaaaaataataaggttgaatcattttattaaaaatactttttaagaaaataactatgaacatctgaatattaaagatataaaaatgcacataattcatatttcaggtggtatttgcattcagtgccttactggtattctcagaacattttaatgatttctaacatttcttaacagtcatagatatatacattttcattttttgtacttgaatattctaaataaaactgacatttactcttgacaaataaaacatatatttactaaaatgtgtttaattttcctttctgaaaactctcattttaaaaacgttcatttaattatgtatttgaattattttggagatgaggtattttatgagtattttcagacaatgaaacttattagtctgtgtcagattctgagcaatcatagagtcatctaagttgtaaataaaaccttgcatagcac

SEQ ID NO: 9911 - DNA, 1817 bp, Homo sapiens
tgcacaggcgccaggccaagggggaaatgctctttgaaagctccaattattggtccccaaaagcagcttccaacgtttgccatctggatgacaaacggaagatccactaaaacgtccacgggattaacagaacgtccttgcagactgagcgatgacaccacactttgtttggacatttaaattcactctgctgaataggaggaagcttttctttttcctgggaaaacaactgtctcttggaattatctgaccatgaacttgctcttctagacaactcacatcaaagccctcactccactaatggagaatcctagccccactaatgccaagtctgtttggggattttgcctcagctatgggcttccctagagtaggtctaggggaatactcagtctgatcttttttttgtttgttttattttgttttttttgagacggagtctcgctcttcctccaaggctggagtgcagtgacgcgatctccactcactgcaggctccgcctcccgggttcccgccattctcctgcctcagcctcccgagtagccgggactacaggcgcccaccaccgtgcccggctaatttagttgtatttttagtagagatggggtttcaccgtattagccaggatggtctcgatctcctgacctcgtgatccgcccgcctcggcctcccaaagtgctgggattacaggcgtgagccaccgcgcccggcctgattctcttaaaattgaagaggtgctgccaaggccttcagatctaacgcagatgcatagaccttgttcctggtacttgttcagcctgtgctggggagccgtggtcccgagttccctgggaggctgacagggtcaagccaccctgcccaccaccctcccacttcccctcccctttcctctccagcattaggattcaagggaaatttgcatgaagccaattttgagggtagacgtgtggggaaaataaatcattatacagtaagacctggggcttgaggggtggggaatggggagggaagggcatagcctgctcctccatgagtctgacatctcggaaactgagcagctgccggacgcctgggtcaggaatccaagaccccacctcttaaggactggttcctcagaaagcaccctcagggaaaaaggtgaaaacattacatccgtggattctcctgccacaaccgcattggaagaaaaggctgccgcaacatctcagcgaggagtgaaggacccatgtcccaggaaccgcgctgcgccacctgcactcacccccctcacattctcttaagcacccggtggccctccgaggcctggcggaatggtggtgcccacggggttgggcaagggctcaccaggacctcaacgggcaaagttgtgcacactaaaatatcaaatcaaggtgcttggttttaaagtaaatgtttttctaaagaaagctgtgctcttctgttgacccagacgaatagggcacagccctgtaactgcacgtgccttctgtcattgggaatgaaataaattattacgagaaagggacttgtcctaactggtttgaggccttacagttttgtatctacatttttcccctcctggggtttgcggggacagggacagaactacaggagtcatgggaaagaaaattctggcttcactactgctcactgctcactttctgatcactctgatacttttttttttttttttttttttgcaacctgataccttgaaaagcttctatgtgtctctccttttgttgcctggcagctgtctaggatgatcactgattactatttactaagtagccacatgcaaataaaagttgtttggt

SEQ ID NO: 9912 - DNA, 1462 bp, Homo sapiens
cagtggcagcctctagccctcagcttcccacggaatcagatggatcctccacgattacgtgaataaaatgatggaaccaaaaatcactgtcactttacaacttaggttttactcttttctttctacagaccatatttttaaagaaatgtttatacaataatttaaatattttttaaaaccataaaataaatttttataaggaatactgttatatctaaatttaaacagtatttattttttcaaaaacagctacttaagttaatggtatagatttctataaaagcaagattttgtcaaaaactaaatttatgattattcaagaaagtgaaaaaaacaacctacagaatgggaaaacatatttgcaaatcatctaactgataaaggtctagtatccaaaatatttaaatttatgagtgttaataaaatttatcttgttcaatgaagaggaagttaaagtgatccatttgagaaagttgtatcacttaattcagtctgatacttgaatgtgatttacccctaattaagtacaaaaacagagtcgcttttgccttttcaaatcaagaaaataagtgctctgtcaaaagcacaaaaagaaactttcaggcactggagagtggagtcgactcaccctttcaggccttgttgcatctcagataaacctgtgactgctggtaaaataatgtcccaagcctttccttttagtgataaacagtagcagcctgcgttaattgagcacctactgtgtgtctgagcatttctcattagcccagttaatcctcacacctactgtaggagataggtactgttgttttttattaccgccgaagaaacaggccagataagtgaagtaatttgcctaaggtcacagctaataagtggcacagctaatattcccagtaaagataccatgtataattttctacaacctaagatgttctgccttatcggggcgaaccttttaggattccatgtgaaaataaaatatgaggaaaagtttaacctaaataattagaatcccattagaggtacttttttttgatggcatgctgccttaaaagagccatttatttttagagatctgtcatattatgaaagttctgggctatcttagctaacttatcctaaacccttaacctaaatttaacttgagccccagtctcagaaattaacatggtatgaaggtgtttccaggccaggcgcggtggctcacgcctgtaatcccaacactttgggaggccgaggtgggtggatcacctgaggtcaggagtttgagaccagcctggccaacactatctgtactaaaaacacaaaattagctgggcgtggtagtgcgtgcctgtaatcccagctacttgggaggctgaggtagaagaattgtttgaacctgggaggtggaggttgcagtgagccaagatcgtgccattgcactccagcctaggcaacaagagtgaaactccatctc

SEQ ID NO: 9913 - DNA, 338 bp, Homo sapiens
agatatatcaccaatagctttaatgtttaactcaaagacatatagcagtatagatataaacaaatgacactaacaatagaatcagtcaacatttatttattgtgtataatagaaggtgttagatcccatgagagatggaaagaagtgtaagtcatagtctctgccctcaggcaatttataatttagttgaaacaaaacagagatctgaaaagctaaatgaacaaatgttagaaaataaagatgatatatttaatgtcaatgttgatgtgtaaaagggaaatgatttggaatgtctacttgcattgttctccctttcataaacattctttaaaaatttg

SEQ ID NO: 9914 - DNA, 130 bp, Homo sapiens
aatttggatatagacagtccttaaaaatcacactgtaaatatgaatctgctcactttaaacctgtttttttttcatttattgtttatgtaaatgtttgttaaaaataaatcccatggaatatttccatgt

SEQ ID NO: 9915 - DNA, 226 bp, Homo sapiens
ccgtgtctggcggtgaacctaccctgaaacgtgacttctgcacaacaaacgtgaccaaacatcaaagctaaagcaatgtttataaagttttatggtataactagggggaaatgagctgcacaaacctcaatgtattttaaatctgttgctgtcatcattaacggtatatgacatataaaagcaagttaaaatttacttttgtaaataaagtttttggtttgtttcc

SEQ ID NO: 9916 - DNA, 604 bp, Homo sapiens
gtagcaatgtacagataaagagtactttaacgcccatgcgtgttcaagactgttcaagactggtgatttggagtagtttacaagattcctcattcagagtgccctcttgtgtgactggggtgatgtgcagcttccataatggatgggacagagagctgggatctaatgtacaagtgaagggcttggtcttccctgagacattccagccattggaataggagaggagcatatatggcagaggtgatggctggtgggtaaatgtgatagtaaattgtagaaacctcttctgattgattggatttccttaataaaatcggaagcaaggttaggctgagtgagggtgagtaaagaggtagaggaggtttgaggagagagaactgctcggaagacattggtagatggaccataaaaacagagttagttctctttatgacattaaatagttttacaacatatttttaatggttcacaatttcattttagggcttaaaataaattatggttctatgatttttttaaaccagtttcctattgttagacatttgtttccagtttcttactattataaataaagtgaaacaatatctcttactataccatttct

SEQ ID NO: 9917 - DNA, 954 bp, Homo sapiens
tttcttgatgctttttttaaaaaaggtgtttcagaaccaacataagacaagaaatattcttgtccaagtgacctggaaaaaaagagaggcatcatggatgcagattatggacgctcaggacttaagtaattcactgggcttactctcaaattttctctccccatgggaaaatctttgctttatgtgtttaagaccagtttgccagttttacagtatacataaatttcaaacttttgaatatttaccctacaactatgataaatatttatactttattgatctactttaatcccaacatagttttttatatcagaaggttggtcccacaatataatgggacttttctttctgcatccaccttagcagagggcaagttctttcatcgtggaagatctgaactttgacgctagcttgacaggctgaatggaccttgacagatggccaagtcaaaacccctcattttacagatgagtttatgctagctgtgcctttgctcagagatcataaatttatgtgtgatctttgactttcatcacagtatccttgtaaatgagagagaattcttgttttttctatgccaggtctcctcagatgaaacacaatcctgaattggcatggtcgtctagcttttatattcaaacctagttttgcatttgttactcagaaacacttcaagtaacaaaaggggggcaggggagaggggtggggagtggacacttgcttcttcagttctttgctcagctagggtatagctggcctgagaaggcagtgcaagccccagagactgttgtaggttgctttttcttcctcctgggcaactatttgtggaaaggttttaccttagtcattatgtaaatataattgtgtagaaaaacctagtcaacacattttaaattttagctttcttaatatttaagtattatcttaaaacaacattaaatttctattagttcc

SEQ ID NO: 9918 - DNA, 1151 bp, Homo sapiens
gtctggagtctcacttgtctcacttgtgcagtgttgacagttcatatgtaccatgtacatgaagaagctaaatcctttactgttagtcatttgctgagcatgtactgagccttgtaattctaaatgaatgtttacactctttgtaagagtggaaccaacactaacatataatgttgttatttaaagaacaccctatattttgcatagtaccaatcattttaattattattcttcataacaattttaggaggaccagagctactgactatggctaccaaaaagactctacccatattacagatgggcaaattaaggcataagaaaactaagaaatatgcacaatagcagttgaaacaagaagccacagacctaggatttcatgatttcatttcaactgtttgccttctacttttaagttgctgatgaactcttaatcaaatagcataagtttctgggacctcagttttatcattttcaaaatggagggaataatacctaagccttcctgccgcaacagttttttatgctaatcagggaggtcattttggtaaaatacttcttgaagccgagcctcaagatgaaggcaaagcacgaaatgttattttttaattattatttatatatgtatttataaatatatttaagataattataatatactatatttatgggaaccccttcatcctctgagtgtgaccaggcatcctccacaatagcagacagtgttttctgggataagtaagtttgatttcattaatacagggcattttggtccaagttgtgcttatcccatagccaggaaactctgcattctagtacttgggagacctgtaatcatataataaatgtacattaattaccttgagccagtaattggtccgatctttgactcttttgccattaaacttacctgggcattcttgtttcaattccacctgcaatcaagtcctacaagctaaaattagatgaactcaactttgacaaccatgagaccactgttatcaaaactttcttttctggaatgtaatcaatgtttcttctaggttctaaaaattgtgatcagaccataatgttacattattatcaacaatagtgattgatagagtgttatcagtcataactaaataaagcttgcaacaaaattctctgac

SEQ ID NO: 9919 - DNA, 601 bp, Homo sapiens
agagagctgtacccagagagtcctgtgctgaatgtggactcaatccctagggctggcagaaagggaacagaaaggtttttgagtacggctatagcctggactttcctgttgtctacaccaatgcccaactgcctgccttagggtagtgctaagaggatctcctgtccatcagccaggacagtcagctctctcctttcagggccaatccccagcccttttgttgagccaggcctctctcacctctcctactcacttaaagcccgcctgacagaaaccacggccacatttggttctaagaaaccctctgtcattcgctcccacattctgatgagcaaccgcttccctatttatttatttatttgtttgtttgttttattcattggtctaatttattcaaagggggcaagaagtagcagtgtctgtaaaagagcctagtttttaatagctatggaatcaattcaatttggactggtgtgctctctttaaatcaagtcctttaattaagactgaaaatatataagctcagattatttaaatgggaatatttataaatgagcaaatatcatactgttcaatggttctgaaataaacttcactgaag

SEQ ID NO: 9920 - DNA, 583 bp, Homo sapiens
aaataaggggaggaagattcccatctctacaatctttgagtgggtttgctatcaatgaaatgctacaaatggaataagttgcagaaatttttctcttttcttgggttctggagagtttgtaaaacaaggacactatgtatttttaaagagttggtaaatcttacctgtaaagctagagaaggtcggagtctttttaggagtagatttggactacataacctgtaaatgtgttttgtccagtccttagagtgttttttaaaaaattgtaaagtcaaggttttcatgaaaaatgggaagatcagacaacattgctcctgaattcccacagagcagcaagctactagagctcaatctgttatttcttttcctgatgtacaggggttaagtcctatggaagaaacagcagaattattcaaaattatttacataatgtgcaattattcactagagcatgaggagtgaaacgctctgtttagtatgtataacttaaaaggaacacatacaattaaaagtaattgaaagacatttcttcttaaaaattctataatcttacactggtaaaataaactagtttttcccatgt

SEQ ID NO: 9921 - DNA, 344 bp, Homo sapiens
atccagcctaggctgtgggtggctggttccaggatagagaatcaagctgtcagagtcatcttaacagatcattatgcgactgagttcactagcagttcagcccatccatagcttacctcattcttactatccaaaagccacctcctcctccaaacatccatttctgtaccaagaccctcactcgaatgtcactatcccaagatgaaacctaaaaatcactttccattctttcttgatcttaccccaccatccactcagctgccatgcccagtttagtcaaccccccaaatgctgcttcatgcaaccttccattcctattccttttgccaacccatgatgtagag

SEQ ID NO: 9922 - DNA, 2612 bp, Homo sapiens
gttccccatattattacagttccacatcaaggccgagtgcaccgcccaccactgccacggcctttgaccatctgtagttgccatggggacagtgggagcgactgagcaacaggaggactcagcctgggacaggccccagagagtcacacaaaggaatctttatttattacatgaaaaataaccacaagtccagcattgcggcacactccctgtgtggttaatttaatgaaccatgaaagacaggatgaccttggacaaggccaaactgtcctccaagactccttaatgaggggcaggagtcccagggaaagagaaccatgccatgctgaaaaagacaaaattgaagaagaaatgtagcccccagccggtacccaccaaaggagagaagaagcaatagccgaggaacttggggggatggcgaatggttcctgcccgggcccaaggggtgcacagggcacctccatggctccattattaacacaactctagcaattatggaccataagcacttccctccagcccacaagtcacagcctggtgccgaggctctcctcaccagccacccagggagtcacctccctcagcctcccgcctgccccacacggaggctctggctgtcctctttctccactccatttgcttggctctttctacacctccctcttgggcatgggctgagggctggagcgagtccctcagaaattccaccaggctgtcagctgacctcttttgcctgctgctgtgaaggtatagcaccaccccaggtcctcctgcagtgcggcatccccttggcagctgccgtcagccaggccagccccagggagcttaaaacagacattccacagggcctgggcccctgggaggtgaggtgtggtgtgcggcttcacccagggcagaacaaggcagaatcgcaggaaacccgcttccccttcctgacagctcctgccaagccaaatgtgcttcctgcagctcacgcccaccagctactgaagggacccaaggcaccccctgaagccagcgatagagggtccctctctgctccccagcagctcctgcccccaaggcctgactgtatatactgtaaatgaaactttgtttgggtcaagcttccttctttctaacccccagactttggcctctgagtgaaatgtctctctttgccctgtggggcttctctccttgatgcttctttctttttttaaagacaacctgccattaccacatgactcaataaaccattgctcttcatctcaggctttggggttggctggggaaggaggcatcccggggctgggctttctcccaagaacatcagagctgagtagccgacaaactcactttggggccgtgggctggaagggaccatctgatgccccagagctctggcttggccttctccctctgcctttaattcacgttgaacgctgggtacctcactcatcccaagttcttcaacactgagcaaatgcaaggatagcacagtactgagccaaccatagactccccacaaggagttgctgttgttattaacaggaagccagagaatcagcagggtgggttagtgagggatccgggaatagctgtgactggagcctgcataaacagctctgaagggagagagaagactgggctctcttgtgtgccaggcacagtatggaaggcttcatataagttaagctgaaattagccctgttttacatacagcttcattttacatatgaggaaactgaggctttgaaaaaaatgagatgtcttgtccaagatgaaaagtagtagattcaaccaagtcctcttactctaagcccaacgcttttacccaaaaccccagagtcctcatcagggatgccaaatggttctagacccagtggaggttctggagctgccactggggatttaatttcttttgatttgctaaagatttgacctgactgaatggagaggtagagtgtagtgtggccaggacaaggtgagggaggctgtagagacttagcactttaggccaaccacctccaggaaatctgggaaatgcaatgtgacagctcgggctctgcactccagggggctgtctggtgtccacatggaccttctccatgtgggacacagctggaacaagggggcaggggcctgcagctgggatgcccaggtgaatatgggcagctggacaaacaacactgggattgagtcagatagaaggggcccaaggactccagggctgggaggacagaggctgggagagagggctcttacctccttaggcctcccaaagagcggttagggatgctgccatggatggcatggcagggggaaccctcctggaagaaaatccatctcttctgaagggatctgagatgcggctggtttttcaatggcagaacttccctctgcagcgcgactccgaatccatgacatctgagagtcttcctgaccacaaacctctgggatcccgagggctccctacccaagaatcactttgagcacagcatcccaaggagcccatagagcgatcccttgcattcacagccacagcccctctggggacactctgtacccccggcagaccctttccaactcacaaccaataaaggggcttgggctgtgctttgactaaggtg

SEQ ID NO: 9923 - DNA, 840 bp, Homo sapiens
cttgataatggaactatacagcgaagagacaatctctggcaagtttttgtagaaaaaatgtttcagtgcctagtctgaaaaataacagtttgagttctttgaaactctaaaatatatttttctcatacctgttttcttcattttcataatgaagcactttgctatgtagctgtgtacatatcactacagttataggaagtttcagtctacagtccatccaaaggaccaacctgccttacacatctcaaggaattcagctgttgaaatcatttgaactaatcaaggaataaatcctaatgttctgggactttattttcacatgttaaatgctggaatatattatgaaaatgttttcaagaaatcacttaagtgttcatagaccagtatttctgacaggtaaaatgctaaaataagctacctgtaataagtgtggattatatttttgggttttgtagaatattgcaaattaaccacacaaaaaatgtttaatttatgcaacaagcatgtttgtgcaaatttcatgggactttaaaaagaataagtatttgagaaaatatctggttcacttacactacatttactgtattattcttttatagcattaggtgccttgtattttaaatctgtgacaaaccatggcaaatttttaaaggggaagtattattataaaatgaagaaatatgtatttctaaaggctatattgctgtaaacttaattgataaagctctgtttaatttagagttttgaagaaatagtctcccttcaattaagaaattttcataatggaatgatttaaattgaagtgacaaagagtattattaaaatacaatgtttatacgt

SEQ ID NO: 9924 - DNA, 4770 bp, Homo sapiens
acatccccagccgtggctgtatgtcattgattttacttttaagcaccgtatatcacctacaagatcatgaaatggttctgaaagcgacagtagagagatgcagttgtgatgatttcaacaacctggatgttttctttctcctctttgcttccattcatctctgttggctgctgttgatggagtcagacagtaaacacgtggcttggataacacccatcatcctatgaagaatatagggagtacttgttctctgttgattcaacttttatgtctccagtaacattgcgcttatgaaggtacctgtatttgtatggactctgaataaagaagaattcatttgtttagcaagtattagttcagcaaccactgagaaataagcactgaggaagattcagagacgtgtaaaacacagttcctactgcacaagtacccagcaggtggcccagggaggcagatacagcacacttgaccgcagaactgggctatccaagatgtttttcagtaaacagaaggcatttagctgaaatgatcagcccatgtagtgttggtcacttgggcctttcacctgccatggtaccttttgttcccagctcctccaggtgccagccagcaggcttggtggtgacagcaactggaacgaaagttcagtgttgttttaatttttatacgttactcaagttgatttctcagaaaattgaaaacagaccttgtgctgaggacacgtcaataaaaattataccttcccctgccccaatgttcatgtgagtcacagcatgcagaggggctgtgcatccccctcattgaaggcacatttgatgaggctacgctgcagatgggtcatggtctgagccaggagagagatagacactgttccctgcactcaaggcaagtagggtgtcaggaggaagagcagtagggtttgcagagatccagggaaacttcctggaggaggcagcatttgagccctatctaaagggagaatcggatgttgataggaagactgttttaaatgaaaatacactatgattaaaaacccaagagagtgcagaggagtacaaggcatgcatgttgggaaaggagggaataagctagtctctgcaggaggcttcagagacccgtctgggaagtagggctgagactaggctttggagggccttgaagggcagctgagggttgattttaatccttggaaatgaccagtgcagatcaaacatggagctcctgctgccctggtcctcaggagtctggtaactcagtcatgttctgtaggtttgtgctccattttgcataaatcttgcaaacataccaggtggcaggtttgcacagtaacacaaaagcttaaacatgtcaagcaagtggggcattcagcagccacagaaatgtgttcatttttagtccctaatggatgtgattaagcagggctgatgtgtacagatttaaaaacacacacacgtgctggattaaaaacagccactggtttcagtgccagggccagcaaggcctacctgagccaggcggaagcagcagcttgcaaatagaaactgccacctgcgagcgcttcttgggtcatgtgcagctccacctcagctggtccctgagccgtggtcatgtgggggttttgaagggctaagttgaagcaagtaattgcaaaagaacaggtggcactctgagggcaggggaaggagacagaagtttgactgcgtttgaaattatttcagtcagggaaacatctgcgttgtcttgttaagcagcttgtaggcccacccctggctaactgaactttgtgagcagttggggcagttatttgaatatttgtccaaaggtggtagggaggcagatgacattctggggttactggagtccacctctgtgctgatggggaaagtatggcatgatgaatccaaagcaaccagtaattctttttgaaagtgcaggcatttattttgagctgtatttcataggagtttcatttggtttggttttggtatagagaggtgtccatagatctctattccctttttttttttatcgacaaggcctactacggataaatcagtttttgttgcctgaatacactttgaattagactacagaagccagtttgagctcaaatttcacacttgctgcagacaactctcagtgtggacagtgcctttctgagtaattaggatgttacatgactttttggtgaagccgtatagggtaaggagatgccccaaggcccctgatcatttcagaagccacctggagcaccagaaggggtcatcttcccagggctatggctctgtgtgcttagacagacatagtatggaattgtgctctaagcccacaggcttctccggagttaaaaggaagcaagaacatccttaagttactttttcaaaatatgcgcttcaggaggaaccaggtttccccaggagagagaggctccctgctcaatcagcacagggagttgctagcgggcaggctgcccagtgctgtggaatctccgccagcctctgggttgggggctccctcccacttcttgcttcttatggagtacatgggactgctctgctttaagccgcgatcagagctgttgtgagcaggacaagattgcgtgatcacgaggtgcgtggggagatgctaggacatttgttgatgtctttgacctgtgctccgtctctgttggatgactgggttagctaacaccactagagggaggtacagaatgttaaacagtcgtcagagtcacactgagggttgttttaacagagggcaaattcccagtttgtcaagcatatctctgttagagtccgaagttcatggttttaatggttctagctcgtagcccttaatattttcaggatagctgggtcctgccagtgtccgctgagtccatcagcacaaccagaaggtccagggtccaggcatgggaagcattctctgacaataccgagccctcgggacctcctgaaaccttgagcagaggctggagaagaccttcagacagtccttttactacctcacaaagtgccatgcccgggacctcagacctcagggttgtgacgttgttgatgttgtcaggccccagtacgtctctagtgaccgaagcagacctgcctgaaagggcactccggacagtgagccctggctctaacctgtgccctcatatttctgctgcctcatatggtcttgtttgcccactctgtaggtgactgatcaccctaaaagggaggtaggtatctagcagtagcacagttactttgagcctgaccacttgttctgaagtgcagatgttgaaacatgcattgaggaagaacactttaaggaagcactttatgatttactcatggctggtgttggcctcaaagtaaaagaacatcttaatgcagaacagtacaataaagagccccataggatggatgccatcatctgtccccatggttgggattgccaaggaaagtgccttgttctgtgcatcttcagaatcccccaggccctctcttgatccttttcatgaagtccagagcattccttctattacaggctgaagatgcattgtaaaaggtaatgctataatagtattccctcttctcaataaatgtgcaaaactggagaatctggtgctgatctgcagcatacttgacaacacagggaataccgtggatgttccacgccagccttacatccgtccccattgcctgcccatgtccagtggccctgcgcaacaaaagtaagggcttgtcttaccacactctccccagcatctagctcaaggtagatgactgactgggaaattccggttggataaaatggcttttccacattgcaactttgcatctctattaggaaaatttagattgaacctttcctctacttgatgcttagtttgagaacagttttcacaactttagagggtctctctcagagtatgttatactgtaaccttgaagtttgagatgaaacaaggtgtcagaggttttgaatctttcaaaggaattgccttttacagatttttttttttattccctaagaagggaaaaagagagggaagaactacactaatgttagagataaggtatgttttggctcaaaatgtgtcatgaacctaaaggtaacttgatgggcagaaatgtctcagccatgtgaaccaagaagtgggaccacagtgcaaggctgtgggtggcagcactagatacggtggtggcaggagtgtgacatgtaggcactccatgggggacagctggacggtgtctatcaaaagtgcaaatgcataagctctttgaactagcaatgctactcctaagaattgtacctgtgtacaaggtacttgtgtacaagagtttttgttgaaacattgtaatagcaaaaagttggagagtgccaccaatacaggggaatggttaaatacattatggccagcttaaacaatggaatagtttgtagaaatttaaaacaatggatcctgtgtgtgtgtactaccatagaatgggccccaagatgcatgattaagtgaggaaaaaagcccatggtatcctaatgtttggaatggagaaagtgtgtagatgtatgtgtgtgcatatgttttcacacagacgtatacacgtgtatatcatatgtccacctgcatatgcctaggatgtctctgggaggatatctagcagcccggcagcctgaattgcctctgggaagaggggtgggaatgacttttcaatgtacaccttttgtaccttttgaattttgtaccatgtacatgtattatctattaaaaaatagttcttaattttt

SEQ ID NO: 9925 - DNA, 767 bp, Homo sapiens
ccgccacaggccggggccgcgcccgcgccccctcccggcaccgccgccgtcgtctcccggcccctcgctgggggagaaagcatctgctccaaggagggagggagcgcagggaaaagagcgagagagacagaaagagagcctcagaatggacaatgacgttgaaacgcagcatttttgaaaagggagaaagactcggacaggtgctatcgaaaaataagatccattctctattcccagtataagggacgaaactgcgaactccttaaagctctatctagccaaaccgcttacgaccttgtatatatttaatttcaggtaaggaaaacacatacgtgtagcgatctctatttgctggacatttttattaatctcctttattattattgttataattattataattattataattattttatcccctcccccaccgcctcgctgcccccgcccagtttcgttttcgttgcctttttcatttgaatgtcattgcttctccggtgcctcccgacccgcatcgccggccctggtttctctgggacttttctttgtgtgcgagagtgtgtttcctttcgtgtctgcccacctcttctcccccacctcccgggtcccttctgtcggtctgtctgttctgcccccctttcgttttccggagacttgttgagaaatacgaccccacagactgcgagactgaaccgccgctacaagccaaagattttattatgttcagaaacctgtagtctgaaataaagtgtacactgtgctcacga

SEQ ID NO: 9926 - DNA, 559 bp, Homo sapiens
gggcgcggggggtgcgaggcggggtggctgcaggccgcccggtctccgcccgggcgcggctccttggcaaaggccactctcgattcataacacttcctgacatctcctttggaaaagacaaatccctgcgtcctccctgccccgctcctggcctcagtgcgtctgcgacccaccacgctcagggctgtgctcctggtctccatccccatcccggcaagggaggaagggacgcccgagcccttgaggcggcggcacagactttgcaaacctgattagactggacaggcagggccgggagcctgccctcctcagacagcctcctcccagtgcctagaagcggagggctccgggccctggccagggaggtaggccagagggagcgcgggcttcctggggcgtccttctttgtgacccgaaatacttgtgcagatttccctgtccatcagccaaaaccccacccacagcagaattccagcaaacagaaaattcacctctccacaccgcattccctcctgactcagactcaccgcgatgcattaaattatgtttttagactatg

SEQ ID NO: 9927 - DNA, 28 bp, Homo sapiens
aaacatctcgagggcttcctttttgcat

SEQ ID NO: 9928 - DNA, 272 bp, Homo sapiens
gaggctggagcagggtcacccacggacagagaccaagagaggtcctgcgaaggctgggcactgctgtgggacagccagtcttcccagcagacaccctgtgtcctccttcagctgaagatgcccctccccaggccttggactcttccgaagggatgtgaggcactgtggggcaggacaagggcctgggatttggttcgtttgctcttctgggaagagaagttcaggggtcccagaaagggacagggaaataaatggtgcctgggatgagattc

SEQ ID NO: 9929 - DNA, 3383 bp, Homo sapiens
gcagcagtggacctcatacctgtctccagctcccagccctgtggatccccgtggatgtagacattgccccactgtaagctgtggcctcaccaggcaagctgaggccaggagggaccctgcccagtctgtgaaagctacagagcaccaaccagcagaagcctgtggacaccaagtacggtgtacagaaagccagtggctcctttctcccttcctcttggcctccagattttgaatggttccttgttcttttctattggtccaaccctgacgttctaaaagggcaaacagtggagacgtctgctctgaaatccctcatcccttagttggaagctgattgggtatcttggtgctgcctgtattggtcccttctgaccactctcctgcctccagagaaagctctgcttcaccctggaagctggtacctttacctcctcctctgggagttggctgcatggccagcactgccgacttgatgggagcagtttgccctcattctcctgtttcaggtttgcttcccttctcagtgaccctggtgagcatccgcctttcctgttcttggatgaattgatgggagtggggctattctgtgccttctacctctttcttctctacgttgtttctaaggatctgctgctgcggaacccaaagatgtgctcctgtctctgcactggcgcattggcatggtagatgccacaatgtatgtgcacggcctttctcagagacattagttctgaggccctttgtggggaggttagggggatggtaatagaaaaagactattttatttcctggcaatcacgggtaaggaggattaggaatgagtattccattcctaggtgtcatcagatgaccttgaccaccacaataccaggccctcttggatggacttatagaaagttagagaagaccttgttgaaccgctgctaaacttgccacaggagcgatgtgttttctctgagtgcccctcacttacatgtttatctttgtttgtagaggctatgtttaggatattttgcctgcatcagaatgggtgcatcatctttcttaatggcctaactatcgggaaatttgagtgtcagtaactgtggtagactcagaaattcgtctttgtcttgcctctggttcctgggatccagtgatctctactggcccagggcttcagctcttggttaatttaggttcatggggaaccctctgaccacctgaatgggatgtcatagcttctaaatggagcttctgtggaatgaagtgctagactgaaggactaccagaataaaacagggtctacaatggggagaacttgttttatagatgaggaaaccaaggctcagaggggcaaagtcacctgcatggtagcacatagtgatagggtagcgatataaatttatcatataaaccaggacatctcggaataaaaggggctctgttagtcattatgttgggtaatagccgtggcattcctacagaacagagtgaggacaggctcctgattcctcttccttctttagaggagaagcggggagtgggttaactaacagctttattgagatgtcattcacatgccattcagtttacccattgctagtgtccaattgtattcacagaaccaccatcaattcacagaattacagtcaacgttggtacattttcatcacccccagtaaaaccccgtacccttggtctgtcactcctgctttcctaactcctgcagtccaaggcagccatgaatctactttctatgtaagattaacctactctggacatttcatatatctggaatcatgtgatatctcttttgtgactggcttcttccactgaatgttttctagggccgtccaagttgaggatgtatcagtacttcattcttttgtattgctgaataatacttcattgtatagatagaccacatttgtttattgattcatcagttgatggacatttgtgtgtttttactttttggctactctgaatgatgctgctatgaacatatttctacaagattttgtgtggacatatgttttcatttcttttagcaatatacataggagtggaattgctaggtcttacagtaactccgtgttttaactttttgagaaactgccagactgttttctatagcagctgtaccattttacattcccaccagcaatgtatccaggtttcaatttgtctacatcctcatcaacacttgctattatctgtctttttgcttttagcatcctaatgagtatgaaatgctatcttgtggttttgatttgcattcccctgatggcaactgatgctgagtgtcttttcctgtgcttacgggccatgcgtatttctttggagaaaggtctatccaggtcctttgcctatttttaattgagttgtctttttttttttaagttttctgttttcctaaccactagactaccagggatgagccttctttttattattgagttgggtgagctatttgtatattctagacgccagtcttttatcaggtatatgactggtaaaaatgttctccccttctgtggattgttttcagtttcttgttggtgtcctttgagacacaaaactttttaactttgatgatttccaagatacgtattttttttctattgtcacttgtgcttttggtgccatatctagaaaaccattgcctaatccaaggtcaagaagattaatgcctgtgttttcttctaagaactatacttttagttctcacaatggtctttgatccatttcgagtatatttttatatatgatgtgatgtaggggtccagcttcattcttttgcttgtggatctccacttgtcccactgctgattattgagaaaaatatcctttctccacggaattgtcttggcatccttgctaaaggcctctgcttcttactggatcttctttcctgggacatggtgtcgttgggaagcttaccttttttttttttttacttagtctgtgtttggttccaccagttttatgctgcctttctactctgttcttgctgtctccctctttacctgagtcaacggtactgagtcctatctctctctgatgttccccagtcttccttggtgcatgttctagctccacacactagtccttggaggaaggttgagaccaatgatttcctgttatgagtcatgaggaaactgaatcacctagaagtggaataatgtgctcagggtcaccatagcccattagtggaaggaccaggactagacctttagtcttctgaggtccagccccttaggctgtctgtcatcactgtacccaagtgatgtcactaccaaggccaaatgatggtgggctaaattttaattctcaaaagtgtaggaggctaatattgtcttctaagttccaaaagaagatgtaataaaagtctgttacct

SEQ ID NO: 9930 - DNA, 3082 bp, Homo sapiens
tggcagtacctgtctcttgtgtagacctagaagcaatcggtggtgcctctcagagacctttccccacccccttcatcggctgcccagtcagtacaaggaggcccacaaatatttattacaatcagtattttggtcccttccagcttttctgtagaatcttactggtattgaatgtaaaggaagcaaggcctgtattgcagtcttcatacaaaacaaaaggaataagaacagaaaagagccatactgaaacatgtcttgtacagcctgctgagatggcgaaaccctgtgtgtggggtgcagtttttaaaaatcagagcgctctagccactacttggtagaaagtagcattttttttttcagttaataacatatttgggggtggggtggggtgttactttgtgttcttcctccttagcctattttcttgtgcgtatggtctgtgtggggcccctttcacagctgacaccacgaaaggtgatatatctttaagttgtgttctgagacctactaaaaatgggaatcaagtcttggcaagaacagtctgaagatggccttttaacaaacgctgggaattttgcttgtcatatccagactggaggccgactgccctggctttcagcgtagaattgggagtgcaccctgacagtctccttccagctctccctaatcgactccaccgacaaggtccctaccccagagcttccatgcaaaggaattcttcaagtttaaatctggacacaaaaataagataaatgtatggcatcatttagggatgcctgagatggcagttcatgaagcacagaagataaagaagaagtctttcatctttactgctgagatccttgggaacactgttgtcatgggggctctgccaagaccctcatctctgggctacacggtgattcagattgagcaccaacttgtttcctcccctcaaagttctgcctaagccgttcagttctaacatggtctcagttaatctggtaaatggcatctttaccatcttagttctgacttctcagtttaatgtgggattaagagccaagaaaagcctagagagactggatatcacaattttttttaattttataaactgaagtagttccttgaatgtctgttgatgaaatagtcactgtttaaggaaaaaagtaattatgaggtgtagcagattgcagaaaaacaggattagaaacacacttaaaaagaacacacatttagagtctctcttcctcctcagcgaaccactaggccccctttttaaaaacacctttagagcctaattactccaataaaagtaactagaggtttggagtctggttaaataaattctgagtaaaattcttaagccaaatggaaattcttaatgcaatcatgaggacttctattgtctcttactgttgtattagatcctataaattgaactgatttttccataaggaaaatgcttcttttgagattaattctaataacgtatttgctattgcagtgcagagcccactgcaactgctaggactgaaagcagaggctgggtgccagagcacgtgattcttaacatcatttccacagacccctctgccctgaccctctgcattggatgcaggaagctgggaaagactgatgttgatttggaaacatgggctgaaaatgaaggccccatagtgcataggaacagtaaagccagggtgctgacgtgtgtgtgtgtgtgtgtgtgtgtgtgtgtgtgtgtgtggtgttgtgtgtgtttgtgcgtgcaccctacacatgtgtggtacctcactgctgctgtttagggaacttgagggacgcgtttcaaggggttgggtattactgacgagctttggctcaaaatatagcaggaccaggtcttttgttgataagtactgtttgtttattaatatgtcattaatggtatttcttttttacactctacaagtgaattagggagtctcttgttgacccctttgttgcaggaatgtgcgtcgggctaggttatccatgagtttctttattcctaatgcagttagaaagacctttctccttgagctctttgactcccagaaggtaccccagtccccagtgtacttagaaaggatctcgaacattgctggacgtcctcatagtactcacaaagggctagccttgaatgtcactcgcccagtcttcagtctcctgacttagagatacaatcacgtcacaggtctcttggcctcaatctgaaaactgctgccgccgcgccgaggagactcgcatgccgccaccacctcactgggagggcgccgagcccaccgtcgccccctagaccctgacagctgcagctgccttgccttgccgccgcctccctgcagggcccctgttccaatgaaaaacagaacacaaaagagcagagcacctaagcctgtctctgcctccctgtctaccggactggccagggcccaagacccccgctgctccactgcggggctgggcgggctgactccctgcttcctccaagctgctgcctcccctgcagccagggtctgggcagggtgcagccggtcctcggggcacgcagcttccttcaagtacactgtgtgtgcttcccggacctgcggcgatgccacgggcctgccttttctatgcgcctcactagcttaccaccctgtgcaggtaatgcaactgactttgtctcatcagtctttttctttccctgccaccctttatttatcaagcgtaatgttacactttaaaggacagcaaataagaactttgtagaatcccaccaggactttgctaacaataatgtttggaaataaagaagtgctctgaaaaaatatcagccaccaaaatagttatgttggcactgtgttcacacgcatggtccccacacccccaggttgggtgggtttttttgttttttgggtttttttgggggggggggctttttcatgttacatccatatctgtatttatatcttatttgtttcactttcaagtgtatcatggcaaatgtacagatttttttgttaataatgtgctaggatttgctaaaaaagaaaaaaaaaaaacccttttgagtttgccctagaataaatgagacttaatt

SEQ ID NO: 9931 - DNA, 746 bp, Homo sapiens
ttttcaatgtattatatttcttttgaaaaatataatatttttatgagagtggactttgtatttcactaggtacaatggaatacaacctttgacaagattttcagaggaaaaatacactgtttggtcaagttaaggaaagcagtgtgtaattttggattgcctgcccttggctgaaatacaggggtgcataccatcttgcagtggcttggctgacattgcctctttgtcctggcctctagttttcttttgatatttcatagctctccttagtttactctgcctggatagaaagttgaccactaactgcaggtttaagtactaaactgcagccttttctgtcgccagcaattaaagaccaccaatcttgtttgtccatctacatggtttgtcggggacatttaactcatggaggtgctttagatttcaacatcagatggttgaagctggaagtttaattatatgtagagtgagaaggcagttccagttttagcacagatttgtttatgtgttcagattttaatagagattcaaaaatgactcatttttaccaataatgttaaattagttttggttgtgctagcatgaattaataaccaccattttataccagtatcatcagtgaagaattgtatttcaagattcaaacaataaccagcaattaaacttttttctacaatgtatttgtttgcgagtaggacttgggagtcattgggaaaaaaaaataataaattttccccttcattaac

SEQ ID NO: 9932 - DNA, 495 bp, Homo sapiens
cggcggggcccaggcagcctccgggcgtgtgaagaacacctcctcccgaaaaatgtgtggttcttttttttgttttgttttcgtttttcatcttttgaagagcaaagggaaatcaagaggagacccccaggcagaggggcgttctcccaaagattaggtcgttttccaaagagccgcgtcccggcaagtccggcggaattcaccagtgttcctgaagctgctgtgtcctctagttgagtttctggcgcccctgcctgtgcccgcatgtgtgcctggccgcagggcggggctgggggctgccgagccaccatgcttgcctgaagcttcggccgcgccacccgggcaagggtcctcttttcctggcagctgctgtgggtggggcccagacaccagcctagcctggctctgccccgcagacggtctgtgtgctgtttgaaaataaatcttagtgttcaaaacaaaatgaaacaaaaaaaaaatgataaaaactctcag

SEQ ID NO: 9933 - DNA, 3431 bp, Homo sapiens
gcctagattttaaacctgggctgatgtagcagaccagctcgccgacacacagtgggtatttgtgttcgctgatcaccgtggagaaggaaagcgatgtcgctaaaggctgtcttgttatagactggcctcccaggtcctgggacacttgtaaatctttatgcaaagtaatgtaaaaaggttgctattttactggtgcataccagaagttgccctttctttgggggaaacagctgtttaaaaaccagtggcagtgaatttttatgcttcatacattgtgctagactcaatatttaatgactggcagtatcctgtgcatttacttgtacagggaaatggtggtttacttacaaattcagttcttcaatatatgttctctaatactggcatctgggctcaaattgccatcaacagtaagttgaaggcaatttcaacttactgtttctaatttgaagagggaacattaagaatgcctctgtaatactgtaattatgggaagaaagcaccagaggcaacattttatcctgagcaccagatttagatcctgttaaagggctcaaacttaaaagggctggccgggtgcggtggctcacgcctgtaatcccagcactttgggaggtcaaggtgggaggattgcttgagccagaagttcgagaccagcctgagcaacatggtgaaaccctgtctctaccaaaaatacaaaaattagccgggcgtggtggtgcacacctatggtcctagttactcggaagactgaggcaggaggatcgtttgagctcaggaggttgggtctgcagtgagctatctatgatggcaccactgcacttcagcctgggtgacagagtgagaccctttctcaaaaataaaataaaataaaataaaataaaataaaataaaataaaatggctgtataagaatacttttctctccacaacgagtgcttaattttctagtcataatgcctaatgaagttgactattagtttttatttggaagaaataaataataaataaataataaataaataaaaaagaaagctcctggtgaaatcaagaataatcagattttctaaccaaatctaaatacagagtagagcagacgtataagaactggaaatatgatgacgtaaaattttgttgcctaagttgtgagaagtaataaaacaggcagcatggaaaacaatgtaactttagaacatttttatttcaagggaaaataaatacataaatagagatgctacagatacaacaatatttttatcttgatggtgttgttttaaatatccacacaagaaccctcacccagttgtgtgcctgtgccaggctctctgggaagccgtggctccgggagtgctgggtcctgaggagttctgttgcctttcctgctgctcaccggttgctaagaggaaacaccgtgatttcctgatgctcttgccttgtcatcatgcctgaaacagcttattcccaattctgtaattccttttacataatccttctccaaaaattactttcttactaatatagaccatacagttttttttccatttagtaagtcactctgcaaaataacccttaagtaaatagacataatatccatttcacataccatttttgttaaagtatataataaagttgaaatctctgtgtggtagcagaataactctagtatgaatgctgtaaatgtacaggtaaatgtgaaattaggtcatattaactggccaagtgttggattgattactttgaggtagcagtatacgtatattaagttttataaactagatgaaattgcattctgtttgagactgaaatttaaaaatattgagaataactaagcgacttgaagtgacctcttattccctgggtatacatacagtgtgaccctctcgtgaagtgtggctctgcctggggatcagcacagggtgaatagcaaagtgcgggctgggggtagcacctgtgcccgctgctgagtctcactgaacaggaagggaagcagccagacacgggggcctcctggtgtgatgtagcaggaagtgcagggcgccacccaggaagcatccacgccaaagaaatggagattcagctggacaagtttctaggttcgctactggtttataggaaatatgtggtatacagggagatgtcaaaactccatgggggctgggcgtggtggctcacacctgtaatttcagcactctggggaggttgaggcaggaggattgcttgaggccaggagtttgagacaagcttgggcaacacagtgagatcctgtctactaaaaatcaaaaaacttagctgagtgtggtggtgcatgcctgtagtcctagctatttgggaggctgaggctggaggattgcttaagtctgggaggttgaggctgcagtgagctgtgatccgccattacactccagcctgggtgacagagcaagacttcataacaaacaaacacacaaacaaactccatggggatgcagtcagcaaaatccagaatagagtgaggtctataggaccaatgtctcgggtttccaacaaaacaaatacgtgacaggcaaaaaacaagaggaggggccaggcgaggtggctcatgcctgtaatcccagcactttgggaggccaaggcgggcggataacctgaggtcaggggttccagaccagcctggccaacatggtgaaaccccatctctactaaaaatacagaaattatccaggcatggtggcgggcttctgtaattccagctacttgggaggctgaggcaggagaattgcttgaacctgggaggcagtttgcagtgagctgagatcacgccactgcactccacctgggcaacaagaacgaaactccgtatctaaaaaaaacaaaaaccaaaaagcaaaaaaaaaaccaaggggagaggagaactgttacagatgaagcaatataggagacatattaaccaagtacaatgctggacttcgtttgaatcagattcaaataaaccacttgtaaaaagacatttaagagataatttttaaaaataaaataaaagccaaaaatattaattcttccaatgcatgaaaaaaagagagcaactcggggaaatttgaatgctgactgtgtgtatttgatgatatttgggaattactgttaatttttttgttgtgataatggtagttatgttttaaaaaaagagactttatctcttggagatagctcttaaagatataaatgtttatggctgaaatgttatggcatcttggatttgctttaaaataacccagcttgctgcaggaggtgggtattgtgtgtgtgggaaggtggggaggctgcgggaggaagagatgacccaagattaggcagatgttgttaactgtggaagcagggtggtgagtgggggctcatgacattatgctctctactttgtgtacgtgtgaacatttccgtaataaaagatgccttcag

SEQ ID NO: 9934 - DNA, 306 bp, Homo sapiens
tgcttaggcagggtacttcgttcaagaccggcgcttggcacccttgttggaaagggattttcagcataacattttccttccacctctttgaccttccctccagcgttggccaaattgtgctgaggaagatgcatcaagggcttggctgtgccttcataggtcatctagggttttataaaggaggaggagacaatattttttcaaactttttggggagtggggtcatttctgtatataaaaaatgttaatatttaaggtgtatttatgttaccgttctgaataaacagaatggaccattgaaccagt

SEQ ID NO: 9935 - DNA, 3016 bp, Homo sapiens
cagccagtaacctctcctgtgcctctacctagctcccatctattcattcaccttctctctgactgcacttttcttttttataaaaaaagagagatgggggagaaaaaagacaagagggaaagtatttctcttgattcttggttaaatttgtttaataataataatatcctaaattttttatatttaatctttttttcccttacaagaacttgaagtttttttttttaatttttataatgtactgatgtggttcagagagataaagcactttagtacatagtcactctttttagtacaaacaaatcatttggaatacctaaagattgtagagtcattccctctatcactgacacatcagtgacgatgggaagacatggaaaacaaggagaagaaaatgatgtataatttgtagtttttagtgatagtatttaaaatatatcctcatttgtggggttgagccctaaactttagtttagggtaggtactcaacttaaagaatataggtttcttcttatatctgtattctttagatcctaacctctgtctaccaacctttttgctcagtaggagtcttgatagaagatatgaatctctgagaggtatgtttatttgttaatcctaaccagtataataagcaaatacactataatagatccacgttactggaatctgtaaaccttgagggatagctttctgcttaaaaacacacacacacacacacacacacacacggaaaacctttattttaaagtcaagttgtgagcaaatagaaataaaagacaaaaggacatcactcttatcaaatgtgtgagcagtagaagagaccacatttacagtcaatagaaataatgaaaaaaaattaggtgtttagtgtattttaaacagttttgttttgttttacttgagggggacgtcccaaaattaaaggaatggagaaataatcaaaatcatgtataccatcttctatttccagctcctgattccccataggtaacatcccttaggagcgaagagttcaattagtaatgtttatgtgttatgtcaggagatgaaacccttgttcttaggatcacagaatactaaagcacctcaaaaaaacaggtatcatgtgaaacagtggttgccaaaagtggagcgaggatgatttcactaggcatttggcaattcttagagacatttccggttgtcacaattggagggatactagtaacatgaattgggtagaggccagggatgttgctaaatagattataatacacaaggaaagcagcctcaaagaattacccctcccaaaatgtcagaagtgctgaggctgagaaaccctgatgtaaagatcagtcccagttataaactgaaaacagctatttacaaagcagtaaatgcaagaaagaaaaggaagtcgcaaagagaaagtgatgtaatgcaaattgaggattttacaagatcagatactgctgctttaagtcaagggtgaataatctcaacaaacagcaaatagcaatcactttaccagctgcatattgcacccacataggtaactcttcattttaggaacaaactgaatttgaacactgagccttttgaactcagccatctctatatattctttccttaaaattcatgattttgggcaaaaaaaaaaaaaaaagcatatcaaaacaaaattttaactactaatgggaaggttaaaaagctgccacgtatttctagtacaatgtatccaataagagcaaggacattgttaaatggaacaagacagctgggaaaggccccactatctctaatagaattgtgctactataaaacatgaagatatcagcaatttggccacttgcagtttttttcagcatgttaaagcaagtgctaagtactttattagtactttatttagtactttattttaaaggtctagaaaacaacagtcttcctggaggccccagaatccctttcatgggattcataagggactcaggtattcttattttctgccaaaaggtgtgcttatttagggactcttttacgatactttgtttctgaagttaggtagatcttggtttactgtgccaaggtcctacctagcattccctgtaggaatatttgaaattccactagctagtctaagaagtcaaagcacaaaattaattgtcaacgcttctctcatattcttaaaattgaagcagtttgcagggaagaacaagaatgaggtgtccctgccttggtaaagcaactgccaaattttgttctagaaagaatccccaagtgtgtggatctattataatttctttatcttttatgaatgagggcatcttttctacttgagcaagatcatggtccttgaccagtgggcttttccttcatatctgtcttgtgtagttgtgcttttcctttggctcgtttttggtctgtcagggtaaccagcagtgcacaatatgagacaaatgctctttagagagaaatctggtgagactgtagaacccagagcaaaactgtttttttttcagtctctgttttcttttctaaatgctatagaaaataaaggcacctgaaaagaaactactactttaacactgctgtggaaggcctttgctttataagaaaaatattattagctatgggaaagtaatgttctttatgtaaagacttaaaaatagactaatagtttacagagttattatataaaatacgatgtgaatttatttcaaacaagttgtgaaggtaccaaaaaccacaataaaagttaatatatataaaaactactagaacaaaaaagcttgaaggtgtgggggtggagggtatggaagaccaaaagtaaatttaaaaaagaaatttttgaaaggaaacagctttatcaggggaagttaaatataacactccgtttttttcttctttctaataatgatatggatcaacaaatgcaatttgaactttttaagataactctaaatgtgttttgtttcttaaatgcacaattgattcttctatactgtaatgcttctttgctgacgctggaaaatgg

SEQ ID NO: 9936 - DNA, 230 bp, Homo sapiens
ccttgcctggaatgtgtccccatctctactctaagaaatgcgcaatggactctttggagaaagaagatattttaaaacatttttagtgtgtctgtaaatggttcagcgtgtatcagatgttgtcataggactcacatttctctcagttatatttaaaaccgttgtgtactttgtacaaaggaatactagtcatacttctataaactttacacaataaaatttcattctgg

SEQ ID NO: 9937 - DNA, 855 bp, Homo sapiens
aggccctcttgcgcagctgcctctcggcccctccgccttctcccctcctgctgtccatgcttggccccctcgtccccatccacctgtgccctccgcatcttaccctccctttctctttcctcattgccttctcccttcctgttccctcatctctgccttccccatgtctctcctctccttggccgtggcttctgtctgtgaggaggcaggagctggggagtgggagcctatgaccccacgtctgacagccatgtccacctgtgcccacagcttccgcccacagacctccagggacaggagcaaattgcaccacagctccccgcctggcctggccctccccaggcggctcagtggctcatgctgtcctgtgagagcccctgccccagagcggccccactaagcgcatgtggctcctgggctacccacagccagggcagcctgctggagccacagggccagggccatgcagatggaggcctctgggagccacctccaatccctcaccactcactcaaccagtggcacagtgtccttgtgcccacactgagccagcaagtcctgctgtccacacccacaagctacctggagggacaggacccacctccatccttcggaaggccttcctggaatcccaccttggcctccgccctcggttccgccccgcccctctccccccgaccttggggcttgtgtcgagcccttgggtggggccaggaggaggtgatggcgtcagaggaggtgtggtcagaggtgacttgttcccacctccagggaggacgcttcgtcttcggccagcgcagacctggtgtttgtttgttgggctcacgcttgcacaatgaaggcttgttcacacaa

SEQ ID NO: 9938 - DNA, 2617 bp, Homo sapiens
ataacagtaggtggacaaagtttagggagccacatttaccaacttctgtgaatatacccaagaagattctggcaaaacatagattcaaattacagttgatgctgtggatggctatgggttaactactcttctactttgacacggattatttgttgcttttatgtttctaaattctcaattaaaaagaagtgtatccttaatctggccaactgaaagtgaacttgttcattcacctctaccttgctttcaaaaggactgcttaccatggaagtgctccagaagaatcatttgaaacatcttttgttttccttcttggttctgcgttttcttccttaccaggggcttcagtcatggcttctctttattcttggcctgggttgtctgctggcactaatacatctattattaacgtagtgtaggtactggcctttctaatagtcttggtatttagtgccagactcccatcaatcttttgaatgtcttttctttttctttttgcacttttctagcttttcaagtgatgactatatactgcttttcttgactgtatatattgttactgaattgtgaatatctgcagaaatgtttactagagaacctgtgactgttgaataacatgtgcccgaacatacacacacacatatgtacacacacacctcagagtactctttcttacagcggactttgctgctgctttctgcatgtgtgggacactggtatctcccgtctcagacaaatggctgatgttctctatgatattggtgttaatatcaaagaattgaatgaatacaacagaattgaggttgaaaaatatttgattgccacattcctttaagcatctttgatgaatactctgcaaagtagcctttaaaaaaatgtaaattttttaaaaagtccacagaggagaatttgctggttagcacaaaacatactgcaaaattgcttctttctggttattataactgaagaatatagaagattgacacacattttatacaccctcaggcagtgttttggaataatattgtaccttttcaaattgttatcaattaactgtttttctccatttcataattctcaagatttttctaaatacagcctttaaatttgactcaaatggaaattgtgcactttcctgtttatacccttccccacgttattgtaaaagagtttaacagcagcctgatatgtaagtttcagcaaaacttatacctgtatatgtttttatttgactcaaaaattagatattttaccatatagtcataagaatttgctcactttgatgccagaagtacttaagaagttacacggcactaattttatgagttgtatgcctaatttcaatttctaacctatttgacagtttcttttaggtcagcctttgttggtcttccatgtaaatacaagttggtacaaatcaatagaaaccattttacctacataggcaaagtaaatgtgtgacttagagactgccagatttatggtgcatctacctttttatccatttgagcttgcttttttatgtttgtgtattggttgctcctgacactatacatttcaaaattttttataacttgaaaaacacttctgtgctaccactcagttctgatcaaatccttacattttgcaacactcatttctgaattttcagtaaagaaatacacattacaaattaaaggttaaaggcccctttacatgcccttccccagtctcctcttcctcccccggaagtgtccattctgctgaattcaggttcatcattgccagacaaatgtagtaagctagtgtttcacatttccaaaatcagccttctggcagacttggaagtactcttgagaaaagaagactcgtgaccaaattctcccacagatttgtaataatgtacatattgaaaggactgaaggctctcagactgggaaagaaacttacccattttaaaattcagcattgctcaacttacctgactgccggaccccttcacccatgattctatgcactgtattgttggaacatacattgtgaaaacactgccctgcctaggcataccccctttccagaattaactttccatttaattctatagtttttcactgatgtaactttctagactggacaacaaagatgactaatagtaatcactccaagttgatgttgactgttgggttgtggtgaaatcattttgcattaaaggaaggtaaaatactaataaattgcatattccttgaccagagcacagattacttatgcttcttaattttttaaaatcttaaatcctctgtccaactggagtatctggctatgggccatgggtactcatataccctttgtcttaaactgatctgttacattttatgttcttgtggctagaagtagcctgagtttgctgttaatgtttaacacattttcttgagtaacagttctgttaatattgtacaagatggtacttgaattctttgtttgccttttttcttcctgtattagaaaatcttggtgctttttataagttttgtataaaagaattttttttaagatttgttcataaaatggtctgatccaggaaaaataaaatgggaacatggacaccatttctgaccttcaaataaaacttattatgtat

SEQ ID NO: 9939 - DNA, 2089 bp, Homo sapiens
aagctggaactgagtaccctgaggcctctctggacagtatgtaagaacttcttgtggactcaccaagagaaacaaaaggaagcctgcaccattgtagccctgaactcttttctgggcacctgaatcccaggaaccctcaatgaggtcttcaagatgaagagactgctgccagctaccagcctggctggccctgtcctgtccaccctcattgccccaactcccatgttgttttgtgaagataaaagctgggatctttttcttttttttaagtctcacaagacatggggcatctccacaaatttaagttcctgtccatttggaaatttgtttctatgtgtacagtttgtcagagaaaaacaaagtttttgtatgaatacagaatgtgatttacgcaagaattgacagaaaactagttgtgaagtgcttgccttaaggaaacctttggtttccatcgcatcccatctgccaaggaatgcacggttgttgctgatgttcatgagcatattaaccactaggttatctaaattaatctcagctgtgaactttgtgtttttcaacacattctgtcacaccatttttgtgacagaaaaatacttgaaaattattctaatgtagtttgtagtaggttcaaatttttattcagacatgctctgacagatggaaaattgtactctgaagagaaaatgcaatcttctggatgtccaacgagggagcttccccttggaagcatctcctaagaatcacagtttaggtttgaatcgccttgttatgatgaggagaggaacttgatgttagtcagaaataaagtcacatgccctttagataacttgaaatcacacatggagttgataaggaatggaccaaaataggtcctcaaacaattttgcaacacttaattaagttttcctctcttcctcttccatactatgtggaaataccagtgttacggcagggcgtacttctaactcacagtaagccagatagatcttgtccatggcaaattccttgtttaaaataaacataccatttagcccagtttggattggaagccaaaaattcagtttgttatataccccatgatactttctatactgacctttattttggttttacatggaagcttttattaaaaggactgtcctatggccaccttaacatttcattacattggcagcttcagttttggcatcagtcaaatttatttggcaaatttagtggtgctggaagtttctttttttcttttccttttttgacagagtcttgctctgtcacccagccaggagtgcagtggtgcaatcacggctcacttcagctttgaccctgcctcagcctccctagtagctaggactacaggcatatgccaccatgcccagctaattttttgtgtgtgtgttttttgtagagatggagtttcaccactttgtctatgctggtttcaaactcctgggctcaagcggtccacctgctgtggcctcccaaagtgctgggattgcagatctgagccacagtacctggccgctggtgctggaagtttcaatggttgcttagaaaaggcatactgatatagtttaacaggatatgaaaatttaactggttctctatgaatgtaaaaaacagcaaaagctaattgatttctgtggagtgagaaaatgtcagccatatacactgcttttcagtgttagaatctagagactattttttttttaactttgaaattacagcttatttaatcagcgctccaccataaacatgctattaggaggctcaagattgctttaggttatgggtatttcttcactcacccccaactggtatagcttaaagagagagaaactgtaatcaaatttcatgaagctaaaaccggatccagagaccaaacccatatcaagattagactttttttccctgagattctagtggaaaaattttcattattttgggctttaactttagaaacatagtatctcagtaagcagataaccagatcacatttaaaaattttcattttaccttgaagctctactggacttgacagatcacattttgagagtgaattcatttaaacaataaacctctacattatacttat

SEQ ID NO: 9940 - DNA, 1441 bp, Homo sapiens
tctccaaacatcactgctgctcggagaaaccacatccccaggcataacaccaccttcccactgtctggggctgacttgcacagaaattctgttgaagacagttgagaattcctttggagaaaacagcccagcttggcgtggggttaggttgctgtttcaaataactcacaggcccaggtgacatggaatcttggagcagccttgtgcagtggcagccagtggcttcctgaacgtgcctctgcgaagtgtgagatgaggggtcacataaccacactgttgactacctcattcctggtttttggcctccacatcatcttttttcttaatatttcatgttttaatttcagggtgtttatactttttgaaactagaccagaagatagtagactttatagagaaagaccagttttacctagatactaaaggaagaattaaaccgctgttagtttgaaatgctttttttttttttttttaaatggagatagggtcttaactcttgtccaggctggaggagtgcagtcgtacagtcatggctcactgaagtcttgaccccgctgcctcagcctcccaaataactggggccacaggtgtgcaccacaactctcagctaatttttaaaattttttatagaggtggggttttactatgctgtccagactggtcttaaactcctgggctcaagtgatccccctgccttggcctcccaaactggtgagattacaggcatgagccaccacaactggcctgaaattcttaaaggatgggagtgtcgatgacagcaccttggcatcgttgtgcctaacctgggagacggaagaagcacgccatgggaagtgtttacacttggggacaagtgctaagtattgtggagcccatagccccttgagatagatggctactttgcctttcttcttgaactgtcttgcagaatgtggatttggggtaagtggtcttgaaggattcatttagtcaccctcaaattaagatttttacttcatctttcttgggcctgcacctccaagataacaaagaagaagcaatggtcgtgccaaagaggtccacaaccaggtgtgcactgttcactgcagcccatttgctgtatgaactgtggttgttgtgtgcccaatgacaaggctactaagaaattcatcatttgaaacgtagaggccgcagcagtcagcgatgtttctgaaatgagcatccttgacgcctgtgtacttcccaggctggatgtgaagctacattaccatgtgagttgtgccattcacagcacagtggtgaggaattgagctcatgaagcaggcaaggaccgaacacctccaccccaacgtagacctgcaggtgctgccccatgacctccaccaaagcccatataaggagcggagttgttaaggactgaagaaaaacttctctggagaaaaataaaattgcaattctactt

SEQ ID NO: 9941 - DNA, 3463 bp, Homo sapiens
cacacggctgcatgaccagtcccacccccccgtggccaccaatggctatgacatcattggagcagatgcctcctcttcctggtccagttacttctattactgcaccattttatgatgctagcttccgttgccaagtctgcctcccgctgactgagggagggtagggttaccttgaacgaaacagaacttgaggggcccaagccttatctcagcctttcctcaatatggggttccgttggattggggctcctccatgactagtgggaattactgtgggttcagaagacccttgtctggtatttgccacatggggtattggccacacgctggaagctgaaattgatgatccctgaaggttgaacccacacacacccctgcagcctccccagatgaagtaggtgtattcccctggcagtctgggcaacggagaccaagaaacatttttaggttgttttaaattcctttttttaaacttccagtttattgcgtaccaagagttgattacaacctccatgcttcataagcggacgccacgttagggttggacgtgggcaccacgagtcctttgaggctcctggacagagacccacatcaagatcggaagccctttgggtggcgttgcagatctcattgctcagtaggccgtgaagattttcatcctcatcccactctcagttggattttctggcactcttcctgcattgagtctcctgattactgaacagagctccgtcatgtagcctgctgaggaatggaatggaatggagatgcccacaggaggtcctgatgtcatcactgcacgcaggtgtgagaggagagacctcttctgcaccgcctggctacctcactcctctgctggtagcagtgcctatagctggacctaagttctcagaagcgtagatgtgcaaacaagcgattgagttgggctttaggaggacacatcataggagagaatccagggtctgtaagctggttttcttttcaggtgacatcctgaggggcctgtaagcaggggagctcctttttctagtttgcctgtagaggtgggaagactgttggtgtttctgtcctttacaggacattaggaaacagttgtgtaattacacaaggtggacctttatcttgcctgacatgctgggaatcttcaccccaccagggcaaatttccaaatagctcattttattctaggtctttcaaactttcatgtgacatatttccctttcccattgttgctgatttccaaatcgctgtcagcaattttttcctctctccttgcctattcttcactcatttggtggcaaagttcatagaactaggggacttggaagatgctttgaaaatattgttacaaaggcactgctaaaatgattcacagggagagtggccagttggaagaaggatcctaaggatgtgacactggttttcaacaacatgcttagagaactcatgaagtggattgggtgtcaacccagtgaacatgtttttatttaatttattttttgaagtttatgtggtgatggtgtggctttccgaaatgggcaaatattcagaagatcttttgcattttcttctgtcaggaatggggaaggggagtgggggcacaatctgagaaaggacacctgtgctgttctaggcatcgctggcaagtttgtgggaagggatgggcaagggtgagtgggtttgctccacaccgtcctgtgctgctcgagaggacctgggacgtgcgagggaaacgtgggtgacggtgcctaggctgcggcccttcactgctgtgctgggttcctgcagcctgctacgtttcccttggcaatgtaaatgaagatggaggggtcgtttcgtgatttcctgctgctgagaataaatgtcttgttaaaaacgtggcaacggttactcttaggtgccatggatcgatgtcagggtggtcagctctggactaagccacccacctccaatttgtacaacagtattgatacatagggctacactcattactgttcaagtgttctatgttaagagttgtgtttaatttctaaagattaaaaaaagcaaaaaaattggtgctaaaccttcacccctgagcacgctcagtgagactggtcatgcaagcatttacagtgccatgctcctcaagccgattttttcttgtagaaatgttgccctatttgtcttctccaatgtatggtatgttattttattttattattttattttattttattttattttatcgagggggggtacgatacctgccatttaagaaaatgaatagaaaattttaaaacccgagaaatggggaaaaaaaaatcagtgcacaagaattgggctggttaggcccagcaccacactgaagtgggctcagtggtttttggagtgaagaagccttactccctgcacattccctcatgctcccacacaagtccagcaatggaaatgcttgggttcctcttgctttgtcaggggactcaggagtcgaccaagggaaaccatttggccccgtgaggaatgggcattgtcagtatccgtcctgaacggggcctagtcaggaagcggtctagaagtgtacggtcacggtcgcctcatgaaagtgtgtagcaggtggctctcaggaaaaataccaagtctggatcatccatgtggcagctttgcatagggagaggatagctccgaactggaactgaactgccttctctgcacgcttgaccaaagcagtgatgagggcggccagtacctgcggtgtgcgtggtaggtttaaagaaaagggaatgttttctgctgagtgtttcctttgtccttgggctgctcgagctggacagtaggtaaccactgttttcaaggaccagcccaatttctctggcttggttcggagttcgtttcatccctagctgtgagtgccttttggtctggaaagttggcttgtctcataatacccacagctaggacattctctctgtaattatgaattgtccttgttttacattaaaagagaatgtctttgatcactagagtctgtcggtgttggattatttccactgtgagattcttaaaacttttttgcttcataataataaaacaactcatgttagagaccctttcaacatgaaaggtttgtagttgagacattacatatattttattgtttataataaaaatcatctatacaaaagaagtcctgggtgttaatattttgcacaagatctgttttccatgatgtgttgacatctacaatttcactaactgttgacgttattttctattgagattctggagcctagggagctatgtgttctttttgttcatttcgttcttacttccctgaagcaagagactatatggccttcagtgcaaagacttcagaccaattctttgtattacacttggttgcctcttggctatataacttctgagtgcaaatcattgaacactttaacgaagtattgtagagaataaatcataatggataaaa

SEQ ID NO: 9942 - DNA, 783 bp, Homo sapiens
acccagaacaatcaggagattggaagcaaatttatgaagaatgatggtgggggtggggggagggttttggttttttccaaagtggaacattgaaataaaggaagtgttccttagttcccgtgtgaaagcagaggaacccatgacatccaagggcgtgaaaggatcagagctgactggacatagtgagctgccttcttgcgttcgggtgcacccctgttaaacctgatctgtgtcataagtgactccggatgcatcagtgtccaccagttggaagcaatgacaaggatggctggctggtgtttttcagccttccggtttatagactgtatttatctagtggattcctgcaggccccatactgagcctggactgaaagtatccactcggaccatctgttatctctctacactgaaaataaaacctcttccacccaccccattcggttcttctgcctgaccttcaaatgcccatgttggccttttacagcagtgccacggcaccaagcgagctgccacatctcacactctaaagggtttgaactattagttcttgtcattttttaaaaaaaaccattcccaagtgaaattgttatatcgtctgtcttgcgtgtgtcagaactgggtttttgtggaggttcagagcaggcaacaccataagttgctctcagatccttgttctgaagtacattcttggttatctgtacttctgtagctggtgtgatgctgttaattgtatgtaccacacatctccagacgttaataaaggactcaaagaggtttttgt

SEQ ID NO: 9943 - DNA, 2682 bp, Homo sapiens
tggcggtggtggccacggggaggcctcttggggggtgtgggggataaaacaggacagacgacaggtccacccaagactgtcaagggatgagcatcccaaacctgctccacagaggtagctgcgtcctgaaaaaaaacagagcagggatgtagtggggctgggcagggatgggggcttgagaaatcaacaggtgcagcccagtgggtcagaggaaagcgtgctcgaaggatgccatggtcagggcagggcctccagagcaggtgttgtgcctggagctgctctcctggcctccttggatttatcgcaaaaactgaaggtttgcgcaagagacgaggacagcggaaagtggacctgccaggccgggagtgtgtccctcaccaactatgcacacagcactcgctcttagctcctctgtccgggctactaggagtgagaccagcttctggcaactgccccagctccaggccatcccatagcccctcctcttctggctgcccccaatgccccgaggcctggggagcccccagctcacccatctgtagctccctcaaagtcagggcccaccccatctgaggcagagaagactcgagtccagcccccaggaagcctgctcccctctctggcccatggtcctgcttcatgctttgggtcaggaggccaaagctgatgttcaggccccacccactccctacagtcctcagaccaaggaggggtttgggtagtaggcccgagctgcattgccggccttcctcgggccaactggcagcccaggagtggggaggctttggccagggatgctgccacttgtgcgtgagtccgcggctggcccttggaggtgaccatccaggcaggcctggctcagactggaagggctggggaccgagggctcccctgcctctgttctcctttctgacccactgggatttgctagcaggctgccccagccccatcaccgaaacacatactcaagagctcaaataccactgctcccaccagcgtacggattaagttcatcaggcttccatcggctggagcatgggaccatagcccctgcccaggagccgtaccctcggaccacagtggctctgtatggccaggaactgggactcgagctttcagattctcaactagccttggcaaaacagctgtaggtggcctccctgacaacagacactcagccctccccaccctggctctccttgcatttccccatgctccccaccccctggcaaaaggctggccatgctctgttcccagcagccgcgcaggtttccccactggctgcaatggccctaccaaaagccatgttgcatatccgttgtaagcacgtgccctgtgccctgtccccattccttatgccctaggaggccaagctggtgtctctaggagggcccacacaggcaccctggatcccccagagagtagattggtgtgctcaggccgcaggctgactcagaggtagggcagtgggctctgcaggccacctggctggggttggtgggggtcctctctcctgccccagcttccactcagccaccacagttgccacaccatggggtggagacgtgggtcaccacgggcttgggagcaagcgccttctgcagcacaggaagccgaagctggggtcaggtgaggtcgctacccctggaggtctggcataagggccccaccctcaggtctcctacactggccccattttactttggggtccaaggacaggatggtcaacagggcagggtggacagcgtgccagcgccgcgcagggccacctccctgggtggatgcatcacactaaggaagtgagtgccaaggggatttagtggtgtggttctttcaaagggaggtcagggtcaatgggaatctgctcggacactcaacatgggggtgggtgcactccttggaggaggaggaacacgttcaggggattgtgaggtcttgcacaagccacgtggggcaccttggcttcccggcaggaggtggacacccagccagaggcctggctcaaggtgacctcaccttcaccatgggcttcctgggtgcgcgggcctgagcgcaggttgttttgtacatattggaatatgtgttaacttatgccccgcatcccaactcacacggaagcacgggtcttgtctcagtctcttcgctgcatttggaaagcagtctcctctcgggccagcgccgggctgaggtgtccagaggcggcggcagctggcagtgccctcagcccccaagtgtccagcctggcacttcccattcaggccacctgctttgggtcaacagttcctttgccagcagcatctcctaaattgtaaggactctgtccaccggggccctcccagggctgtgaggacggaaacaggcagggagtggagctaacagcttagtcaccaggacccccagacctgcaaacgtcccctcctggaaggggaagccaggaacagcagaactgcccacaaaacaaggctgtgaacttttcgggaactggaactgtttaacttgaacccaggattgtttaaagctttatttatttatagcttcttcttaaaaaaaagtgttgaagaaattttttggttattcatacaaaaaaatgagttgatgatggaaaagcaagtcataatcatctaattgtttttgtctaggtcgagaatgaatgttagctgatgaaataaaccctgacaagga

SEQ ID NO: 9944 - DNA, 266 bp, Homo sapiens
gctacccgcatctggtcagtgccaggcccaccaacctgcagctggagattggctctctatagcatttcctgacacttccgctacttttaggcctggctaaattccaagatagataacactcaagatagataaagtacttgatctccaaactgacaaactgtttattttctagctgttattttgctatttggcatttacataaaagcacacgatgaagcaggtatcgccttacctgttgaaactgaaaataaagcttgtttatttcc

SEQ ID NO: 9945 - DNA, 1148 bp, Homo sapiens
aggtgtcagctgccttcagagcaggctggagggatttgccacacagccccacccttgggctgagaggacctgggaagcccctccaggagggaacacggtcatcctcgggcttctggagcggggttcctgcagccgcagaggcatctggaggaaacgcaaccaagaaaggaaggcaggtgggccccagcaaaggagtagctgccagggctcaacagctacgctctgtgacagcgcagagctcagcggcggcctttccctccctccgccaaggactcacggccaagccagctctcggggccttttttccactgcccatttggctactctgctgcaccaagcttgggagccagcctgccaacagccacctgggcctggcctccccactggctggccttgaggttggcagagtgggttgtggcgcttcctctctctgtgtgggaccaggacagtggcttaagtctccactccaggaaagaatcaaagtttctagagttgtgagaaaaccagagagtggctgtcctgattcttcactgtgaggggcgttcttcatgttctcccagctgttccaagactgggccgtagaattccatgtttcaggagcctaagaccctcccagagcccaggggcttcaccgcagaccccaagccattgagcacatcacccaaagcagtggccaacatcgcggacccctgtgccttgtcacagatgggtgctggtcctcaggcgttggggacactgctgggtcgatggggtcggattctgccagtttctgctctgcagccaaagatggtcagaagcattgtcacttcagtaacatcaagtgctcaaagacatggcaaccgttcagtggtacttaagtattcaaaatatacaactacagattctctgacagaaaccagcacggggtcttcaccttcattcaccccacaggcgacatgcgagggagaacagcatctcagtggtgatttccaaaccaagcctttgttttcggtgtggggttttgggggtttgctttaatgtttttgaaattgtaaatgttgggctttgtattttgatgtaaactgagcataatggcattttagggcctgtgaccaaaaatgaagcttgtaacgaccatggatctgaataaacatgtccttgcttctgag

SEQ ID NO: 9946 - DNA, 83 bp, Homo sapiens
ggggagggtgtggtgggttctcccctgccacccctaggatggctgctttcaagttgtttgcaattaaagattctgtataaaac

SEQ ID NO: 9947 - DNA, 877 bp, Homo sapiens
catgcgcgcaaagaggcagggcagcgagcacagctgttctccgacatggctacgtgatctcaggccttcttccttcacaattagctcttgcccctaccccacgccagctaatgccccttctgtgtccctgctctgcatgtttccattttccttaggtgtgaagtttgaagaggcaaacagtaattttgaaagccactactttgaaaccattctaaggcctgagttcccataggacacactcacataggcaggtacacgttagtcaacaattggaactgcctcttggatcactcagctgtgctttcatggctggatgatggaacactgtgcgaagagagatgggggccaggaagtagcgcttcatgcttagtacatcctccaaattgtctttgctggaggagaaaaccgtactcagccaaaagatcaggacaatatgacttgagtccacaaggacacaaacacctgagtagctgggcagcccttggcagggtctaagccaggaagtaaaaatgatctggcctagatatttaagggaactctaggaagaggcctaggtttttaaaatcctgtctctttgtcttaccataagaggctgagcctctcttcatttttttgaagggccacttgtgttttctgttctgggaacttcattcatttttctactgggttgttgatctttgcagtaatttctaggagctgtttatgtttggaggtaattggtcctttgtccatatatatgagatgtaagtcttattttccagtttatctttttgcttattttttttgactttttattgtaaaataaaacatcaaactgcacagaacagttgaatagcttaatgaataactacagtaaaagctatggtaaccactaccc

SEQ ID NO: 9948 - DNA, 4576 bp, Homo sapiens
gtttgaggacggagctgtgcagtcacattattggggattccacagctggtgctgcaggccttgcgcctccaaccaggactttcttcttaatgctctcgacacttagctaaacacgactatatcccggcccagcaggccccagcgccgttagtctccagctgactctgtgggttggtcttaaagcaaattctgttttgtggactgcctggcaattttttagctaactgtaatgataaaaagggagtattaatctattctgaatcatatctagttgaatgcatgtttaaaaaaacaaacacaaaaagcttgctcaatctacctgcagtgactgatgcaaaaccatcatatgcaaaatccaaaggaatggaaacgtattttacaacttgtatcactaatgcactgttgtaatgtatgcaaagtcttacagttataagtgttaaagtgaatttcttcatagagcatctgaaatatcttagatgattcttcaaccttttggggttgatgtgggttgccagttagggatgtggacattttagttttcagcgacctgtttctttggcactgactgtcctgggagggagttgcgaggtttgggagagagtagggaagccacagctgcttgggtgcagctggttcatggacatccctttgagtttaggcttggtggagtcagtggaacagggacatgcttaaagctcatcatgaaagattatggtagtgtggccagtgaaatttggggcgaggggggtggtttatgtgtcagcaaagcagtttctctgctatctaaattttcattacagttctcttagagagatgatgtttttatatgtctttattggaaaagtcctatgtaaaactaaattattttcctgggatggaagaaatgtgaaagagaaacagccatgcttgcaggaggtattgtcctctgctttatttagcttagaaaatcattcctttttttttttttttcctggagaaatgtttgaatcagctgaaaacaggtaggcattgctgtttttccccaacaaagaagggcaaaggtttcagctgtatgttatgaagaaagtggtatatttaagaatgagttaaaagggaacaaaactttatttaaaattcctccaatttcttgtagaaaggcagggccgtggatatgtctggaaatgtagaaacctgtagctgcttctgggatcacccacctgatggtggtgacttgtctgctgaggccggctggaggggacgcttagagatggggcgagggggaggccagtgtctgttgtctgcgagcctctcctgccatctcttttgcagctgagggcacttggcacaaagcaagcacagacagcagagagggccaggcagtgctggagtgcgtttgctggcagggtttattgtgggagaggaatttgagtttaggatctgaatcttgtacataagaaatgaaaaggcttccctccaccccgcccccaaaatatgcccgtcctgtatccatgagagtgcatgtcggttctcagtgagggtcagagtgggggtgggggatgtaaggcctgggtccctttcagcggcctctagggcaggagcgtgcgtcttcttcccagtgcagtggtggtttgagtgctgtgggctctggtggggagggggctctgctcctcttcatttgctggtagctgggtcagggcactggcgcccagtgaggatgcccactagcattctgccccagttggttggtggggggacacctgaccactgagcctttggtaaccttattttttatagtaagtacttcttataattttctttttcacatcttattttataagaagtttaggaatatttttgcatggatcattgtaaacagcagattctttattcctgatgtctattaacatagaatgtttactgataagtactttaaattgcttcatgagcacttaatccatcttagtgtctatgtgtgggggcagacatttaccgcaggcacacagtttgtgcccctttcttcaagtctctgttggtaattccatctgtttagtggatggttggcaggattagtaggttctaacggttccaggggttcagctgaccaagtagcagagaagtcttttttcccaattgagtgctaatagattaggataaaatactcacaatgttagtgtatgcttttaaaaagccccacacaacaaaatggaaacatacatgtacaactcctgtgagggctggagtcttggggttcaggaggaggttagaagttacaggcatctcttcaggcttgcttggtacttggcacacacaggatggtgttttaaagagtgggctgcaccccccacacgccatttacatcagcttcataaacacttttcttcctccctgtaacttaaccttttttcccttttatgaagttgagaggctttatgaaataagtttgcattgcacatccgtgcagaaatctttctgactttgaaatttttaggacgtcagctgtcagatacgaaaggtagatatcaggtaagaatctggacttaggaaatagtcacaaaactgtcataggttgtaattttatcaacattcgcttctagtaaaattaaagtcaattaagaaatagaacttgggtcaaaattctgttacaaagcttcataatttgtcccgaagcatatggtggagcattctgagaaatttgctttttgtgtgtttgacattcctaatttgggagtccttcagctgaattactattcttttagaagttgagacagcaggtaagcaaaggacctagttcatgtaaacatggacatcatgatggctatttaaaaaatatttgttctacaccttctcccctgaggcttggggagtgtgttcagccgctgcagtttctctgctcatggaggtcttgtttggatctgtgctggcggctgagcatttagtgtgagccagtgacccatgaacttgccgctctgtgagggccagagtcagggccagtcatggtaatgggcctgaaggcacttccagaaccttttatgtctctcgtgagccatctgttaagaacgttcttcttggtgtggtttgtaggcctacctgtcgctattctgggaaaccttcttgagtgctatgcaaatgtgttcacaggcaatgggggtggtcctgagccttggggtgggcacctggtcagtgagtgtcttgcccttccccagctgggcatacagtaccttgctctttctggtggcatcatctggctgtgatgaatgaggtctaggaaataatttgcatgtgtcttgggggacacaacagtaacgagaggaaatacattattacagcaacttgcgacgtactaatacctgtcagtgttggcccccgtaaggtatgtaaggcacctgtgagtgccagtgagtgctggtgaaaggccaacatgtactagttatgtaagtattggtgtctgctttaaaaaaggagacccagacttcacctgtcctttttaaacatttgagaacagtgttactctgagcagttgggccaccttcaccttatccgacagctgactgttggatgtgtccattgtcgccagtttggctgttgcccggacaggacaggacctccattgggcgcagcagcaggtggcaggggtgtggcttgaggtgggtggcagcgtctggtcctcctctctggtgctttctgagagggtctctaaagcagagtgtggttggcctgggggaaggcagagcacgtatttctcccctctagtacctctgcatttgtgagtgttccctctggctttctgaagggcagcagactcttgagtatactgcagaggacatgctttatcagtaggtcctgagggctccaggggctcaactgaccaagtaacacagaagttggggtatgtggcctatttgggtcggaaactgcatgtttcagaaagtttgtctctttttcctactcattatttgaagaagagagagcctgtggggatagccttatcttggtccacaggactgaagtgaagtcacttgggaaggggagacagaggatgagcggcgtctgtgtagggacccccccccgggcctgcagaagggtggtgtgctcccaggactggcatgacaggtgtctcctcctcaccacaggctgtgcccatgagtccctgtgcagaccagtgggcaaggcagctgggccagatctcaggccagccgtttgtgctcctagcagggttgctgtgctggccacacggagaggccctagagagcctcatggattgtaactaaagaagaaacggttcctttttgtttttttaaaaatgatttttaaataccgttttttacaccgttctctcggtactttttttaagctaagtcagcattgtcttccagtgttaaaggcatccctcacctctgcattgaacttacgtatccatgccaaggaatggaatttccatcctgagccagttcagttaggtgtcaattgatactattttaattttttatgcaatctgatgagatgagctcagatttaaaaatctcaaaagcacgtttattgtaacaagaattgttatgtattaatactgcagttttcaataaagattgacttgtgttgc

SEQ ID NO: 9949 - DNA, 202 bp, Homo sapiens; identical to SEQ ID NO: 9387

SEQ ID NO: 9950 - DNA, 1281 bp, Homo sapiens
agctgaaggagatgccaccccctcctgcattgttcttccagccctcgcccccaaccccccacctccctgagtgagtttcttctgggtgtccttttattctgggtagggagcgggagtccgtgttctcttttgttcctgtgcaaataatgaaagagctcggtaaagcattctgaataaattcagcctgactgaattttcagtatgtacttgaaggaaggaggtggagtgaaagttcacccccatgtctgtgtaaccggagtcaaggccaggctggcagagtcagtccttagaagtcactgaggtgggcatctgccttttgtaaagcctccagtgtccattccatccctgatgggggcatagtttgagactgcagagtgagagtgacgttttcttagggctggagggccagttcccactcaaggctccctcgcttgacattcaaacttcatgctcctgaaaaccattctctgcagcagaattggctggtttcgcgcctgagttgggctctagtgactcgagactcaatgactgggacttagactggggctcggcctcgctctgaaaagtgcttaagaaaatcttctcagttctccttgcagaggactggcgccgggacgcgaagagcaacgggcgctgcacaaagcgggcgctgtcggtggtggagtgcgcatgtacgcgcaggcgcttctcgtggttggcgtgctgcagcgacaggcggcagcacagcacctgcacgaacacccgccgaaactgctgcgaggacaccgtgtacaggagcgggttgatgaccgagctgaggtagaaaaacgtctccgagaaggggaggaggatcatgtacgcccggaagtaggacctcgtccagtcgtgcttgggtttggccgcagccatgatcctccgaatctggttgggcatccagcatacggccaatgtcacaacaatcagccctgggcagacacgagcaggagggagagacagagaaaagaaaaacacagcatgagaacacagtaaatgaataaaaccataaaatatttagcccctctgttctgtgcttactggccaggaaatggtaccaatttttcagtgttggacttgacagcttcttttgccacaagcaagagagaatttaacactgtttcaaacccgggggagttggctgtgttaaagaaagaccattaaatgctttagacagtgtatttataccagttgatgtctgttaattttaaaaaaatgttttcattggtgtttgtttgcgtatccagaaagcagttcatgttatccata

SEQ ID NO: 9951 - DNA, 1490 bp, Homo sapiens
agaaacaaaagacgatcccgagaatagattatcgaaaatttccctagagtcattcaataaatttaacagcaatactgtgattttattagaaaaagagaagaactctctgaacaaggttgaaggacagaaggaagaaaaagaaaaaaatgaagagacatctttgagtagttcagataggcctggggtagacaacttggaatctttgagtgattctttatatgatagcttctcttcctgtgccagtcaaggttcaaatgatgtataaaggacatctcttcccttagtgagctgggactggagcgcttaagaaatgatgggtggggggtggggggtgcaccgcttgatagagataacaataaactattgcagtaccagagccttccttgtcaaattcacagcaggcaacccaccagagcttatttctctgacagggcaataaagatagactccatttattgtgtttcaagaggattaagcgtaaacacatctatgatacagaatccttaattttgcactttttttgaatatttgtacagaagttgtaaattttttggaagagaaattatatttgtagcaaaaaaagacagcaataaatggaatcagtgccatgctcttgaaataatgtactaagtcttagaagttgatgataatatatattttttaaaatcccaactgaagtttttgtgaagttcgttgtcctggtcctcaaattgtttgtgggtacactctgtaaacctacaacagggcctgccaaaaaatcggagggttcctcctcatctccatctcacaaatctcaatttgatggaaatgttcattttagtgtaatttcagattcgttgccagagattcaggtgatagtaataagtgtcattctgcttctgctgaaaaatgaaaagggtcctgaagtgtggacactgattgggagtgtgacattgtatcagaaatgaccgaattctattcccaataccagtttttccttccagacatttctttagattgtcttttacttagtgcttctctatgatcctgaatattatttgatttttatcttcttgctctttttattaaaatctgggcactctaaaaatgaaaacaaatttctatttgcaatgttcacttttaaaaataaaattaatggtgctacgaagaattctttttaatatccttttttttctacaaagactgtttatatgtaaggataaattctattttaaaggttatgtgtattttttctagatgtgaactatttataattacttatgtacaggagcttgtaaactaggcccaatagaaatatttttaggatctatatggctactttagcacataattgtttctttaaagagtattgtatgatcagtgttatttggttaatttgtgcaatttgttttattttatcttaaatgaaaattatgtaaaatgtccttgtctttcagactttaaaaaatctttttgtttcctttctgaataaaagttatatcacatttgca

SEQ ID NO: 9952 - DNA, 727 bp, Homo sapiens
agggggccagcatccgcatgagaccatcgagatgaggagtttccacataggcaaagggtgccaatatttaactgaacatctggtttctttttggaagttttctttcacatggtttgtcattacaagacaaggtctgcccagccaggtggatctaccttgcccccatcacctgccgcccccatcaaacatgttgggacaatgcccataggaatggacctccttccccgtctccagctgggactggcgttttttagtctctggagtatgatggttctcatgggtaggatgagatctttggcagaaaggtcttcggtggtgctctgagcctgcgctgcataggactgagcagacccacctcctccagcttgggtggccctgccactcctggttccaagtctctcctttcctggcaggtcttaagggaagattgtacccctcaccctttacatacccagaatcatcagtatgtcacttcctaatttctatcagtgtatctcattatttcatactgttttactaatcctaagtctaaacagatttgctcaaaaggagaccattctattttttaaagtacttagtgatacacgtataagctttgcatggacgaattaaataagcacattgaccttttcttgtacattcagaacctgaacatccatgtgaaaactgggtccatttttgagagatgtgaaactacagtttatttgtaataaataaatataatcta

SEQ ID NO: 9953 - DNA, 147 bp, Homo sapiens
atatacatcaagactttcttcccagttccactgcagatgctcccttgcttaattgtggggaatgatggctaagggatctttgtttccccactgaaaattcagtctaacccagtttaagcagatcctatggagtcattaactgaaagt

SEQ ID NO: 9954 - DNA, 336 bp, Homo sapiens
agtagaaaaatatatgaatgaatgacaaatggtttacatgtggaagactttaatacagaagttttccatgtttgtttaatatatcgagagtaaaaattttcagaacaaaaatcaagaattcaaattctcttctactaattacttttagtattaaatacattttgaaagtacttaacagaaactaagatacaatactgaatatttctgtggtctttttgatttgattcagactcgcaattatgtttcagcaatgttttgtaaagctctttacccctaatatgcctaatcactgtattgtgcatagattgtgtttaaaaaatgtactctcaattacct

SEQ ID NO: 9955 - DNA, 479 bp, Homo sapiens
tgagttaccacctcaagttctatgaagcaggcctagtttcttcatctatgtttaccggccaccaaacaccttagggtcttagactctgctgatactggacttctccataaagtcctgctgcaccgttagagatgactttaatcttgaatgatttcgacttgctgagtaaaatggaaatatctccatcttgctccagtatcagagttcatttgggcatttgagaagcaagtagctcttgcggaaacgtgtagatactggtctagtgggtctgtgaaccacttaattgaacttaacagggctgttttaagtttcagagttgttaagggttgttaagggagcaaaaaccgtaaaaatccttcctataagaagaaatcaactccattgcatagactgcaatatcatctcctgcccttctgcaagctctccctagcttcacatcttgtgttttccagaaaataaaaacagcagactgtcctttc

SEQ ID NO: 9956 - DNA, 1201 bp, Homo sapiens
gatagtgaaagtaactgaccagagctgaggaactgtggcacagcacctcgtggcctggagcctggctggagctctgctagggacagaagtgtttctggaagtgatgcttccaggatttgttttcagaaacaagaattgagttgatggtcctatgtgtcacattcatcacaggtttcataccaacacaggcttcagcacttcctttggtgtgtttcctgtcccagtgaagttggaaccaaataatgtgtagtctctataaccaatacctttgttttcatgtgtaagaaaaggcccattacttttaaggtatgtgctgtcctattgagcaaataactttttttcaattgccagctactgcttttattcatcaaaataaaataacttgttctgaagttgtctattggatttctttctactgtaccctgattattacttccatctacttctgaatgtgagactttccctttttgcttaacctggagtgaagaggtagaactgtggtattatggatgaggtttctatgagaaggagtcattagagaactcatatgaaagctagaggccttagagatgactttccaaggttaattccagttgtttttttttttttttaagtttataaaagtttattatacttttttaaaattactctttagtaatttattttacttctgtgtcctaagggtaatttctcaggattgttttcaaattgcttttttaggggaaataggtcatttgctatattacaagcaatccccaaattttatggtcttccaggaaaagttattaccgtttatgatactaacagttcctgagacttagctatgatcagtatgttcatgaggtggagcagttcctgtgttgcagcttttaacaacagatggcattcattaaatcacaaagtatgttaaaggtcacaaaagcaaaataactgtctgaggctaaggcccacgtgggacagtctaatacccatgagtactcaacttgccttgatgtctgagctttccagtgcaatgtgaatttgagcagccagaaatctattagtagaaagcaagacagattaatataggttaaaacaatgatttaaatatgtttctcccaataattatctctttccctggaatcaacttgtatgaaaccttgtcaaaatgtactccacaagtatgtacaattaagtattttaaaaataaatggcaaacatt

SEQ ID NO: 9957 - DNA, 632 bp, Homo sapiens
attcacactttgccacttaactccagtgtggatgacagagcgagaccctgcctcaaaaaaaaaaaaaaaaaaagaaagccacacttattcttttcagtaacctgctagtgcacaggctgtactttaggtacttaaaatatgcactagaataaatttgcaaggccctaaaatatcactgttatttttggagtaattcagtataggttcgtttaaaagagatttttataacttcagacatgcatcagtaggaaataacttgagaaattcatatggttatgttacaaattcatattctgttactacagtaaacgttaagagttttaaacagttaagattgtacaatttttcttcttttctatattacaagggccccagtgttaatgtcttagattttcagtatttgaacttatttttttaaattctgtcattgagataagaataattcaggtagcatctgaaattttaatgaatgtataattggcatatcatggaaaattaaccagaaagtatcagttcttaaaagttatgcctagaaattatgtaaagctaaactactggttagaaagtattcagtgtaatattgtattaatttgttaaattctaaacttgaatttcaataaaattttaaagct

SEQ ID NO: 9958 - DNA, 519 bp, Homo sapiens
cacagatgtaaaagacttttttttatacgataaataacttttttttaagttacacatttttcagatataaaagactgaccaatattgtacagtttttattgcttgttggatttttgtcttgtgtttctttagtttttgtgaagtttaattgacttatttatataaattttttttgtttcatattgatgtgtgtctaggcaggacctgtggccaagttcttagttgctgtatgtctcgtggtaggactgtagaaaagggaactgaacattccagagcgtgtagtgaatcacgtaaagctagaaatgatccccagctgtttatgcatagataatctctccattcccgtggaacgtttttcctgttcttaagacgtgattttgctgtagaagatggcacttataaccaaagcccaaagtggtatagaaatgctggtttttcagttttcaggagtgggttgatttcagcacctacagtgtacagtcttgtattaagttgttaataaaagtacatgttaaactt

SEQ ID NO: 9959 - DNA, 41 bp, Homo sapiens
tcttcctgctgtggtggaaatgagggatacatatgtatttg

SEQ ID NO: 9960 - DNA, 1759 bp, Homo sapiens
tcagtgatatcttttatatgctgtataaatgtataaaatataaggattacttttgtatgttccaacagtattatacttgttttggcatcagcattacctctttctttatctttttcctggttaattgttttctgagttttttgggttttattttttgctgatgactattgattgaccatttgtatggtatttttatgaaaaagaactgcactacagtacaatttacaacaatgctgctgatatgacacacctttgaatttgttaaaattaaaaacaacgtattcctttgtagtgtgaatatgagcaatctattttatatgaacttttttggttgtacttaatcaacgaggagaatctctgcacttttccattatacggtttgaaggctgtaatacagtgtcatattatttttctgtttaaattgatggaaaaatgattgaatggtcaactctcttctttgtgcccataaagatcgattcagactctgctgaaaatatatagctctcacaagttcagcatcacctgctttgaaattagccttagattgccaaccaatagatgagaattttgaggaaaaaaattaaaaatatgtaaaattaataatttgcatgaacacagatgactacattttccaaaacttagtggactctatgtgatgtactaaatgtatacaccttgtaagcaatagttatatttaggtggtagaacatagcaaaaatataaccgaaagttggccgactgcacttgctatggaataagaccttttattctccctcagtctcgagataaatagccagcctagagcacaacagggcattgggtacttgcatcttaggtatttcttcccagtcacatccattttgtggaagattaacccaaccccttacactacactgaacactaaagaataatatataagcacacaaattggtgacagaatttcaattacgtgaacgcatcctctttgctaggtcaaaaaacaaagggcaaagcagacattttagtatacagagtgattggcaaatattttcaagatttaatatgagcaacccattatttgccctatccaaaatatattcaagggccttccaagttgtagaagaacaatgatcttcccataatcaaaagtggagagtcgaaatgctgtgccagttgctctggtattcaggtttctctgggttttacagaacgcatggaccccattcacgtttggtttgtttatcttcaaatttgagttgaaacgagtgcgatttatttaagttgtatataaaaataaaaggatagcatttttatacaaatatctttaaaggcacaaaagatttattcacaagttttggagggctttttgttcctctgatagacatgactgacttttagctgtcataatgtattaacctaacagatgaaatatgttaaatatgtggttgctctttatccctttgtacaagcattaaaaaaactgctgttttataagaagactttttgttgtactatgtgcatgcatactacctatttctaaactttgccatattgaggcctttataaactattgatttatgtaatactagtgcaattttgcttgaacaatgttatgcatatcataaactttttcaggttcttgtttaagtacattttttaaattgaacagtatttttcattttggttataatatagtcattttgcctatgtttctacaatgaagtgttaaatactttataaaaaattgttgactgacttatttaaatgaaattctacatat

SEQ ID NO: 9961 - DNA, 1038 bp, Homo sapiens
cagatggggctaagtcacaaacttgcagcctaaggcagaatctgaagaactttccagagtgtgcccatatttacctgatcagagagaaaagaaaatctgcagaggaagctgagcctggctgcttgtcatagctgacacagagccatctgccacaaacctgtggcggcttcagatctccaatccctgccaccaccccaactcaaattaaatacagattcctagagacgttatgatggttacacatgtcctcggcatcacatgtaggagactgttcaaaaaaaatatgtggcctgttgtataaccgcactcatgtatcccatatgtggtgccacattgaatttccggttgaatccgtttttatcctttgtactggatgacatggtgcctgaattctttcttttcgccgacacgatggcagccaaactgcagcttcaaacgctcacacttggctgggtttctacctaggttgccaggttatcatcggagccttcttgtgtcctcaaagggccacgaggcctgaaaggaggatcagaatgctttgggattaattgggcagccatcgcagaattgtttgtgggcaaagggctgctttagcacttttcttttagcaaattaatgactctcaggcacagggggttttaagtgaaggtattaataagaggtctggcaggtattcccatgattcacagagttacatttgcatttaattaatcttaaagttgcaagataaacagctgtaattcggacaaacatgacaaacacagtgaagccaactatcccataaaatgaacactgacatacttgttttaatttttttcccagcgtaaaaatagaaaaatcaaaatactcctaacaaaaccagtgattttgatagaaatatttctccaatatacttgcatccacctacaaatataaccttttcaagataaatcgcttatgatttcaatagtcaaactgctgtgtttgttgatgtaaagatgttttgaatggctagatggtaaaataaattcttaataaagtacccactgcaatttttaa

SEQ ID NO: 9962 - DNA, 1433 bp, Homo sapiens
taaactactgcattttaagcttcctatttttttttccagtagtattgttacctgcttgaaaacactgctgtgttaagctgttcatgcacgtgcctgacgcttccaggaagctgtagagagggacagaaggggcggttcagccaagacagatgtagacggagttggagctgggtattgttaaaaactgcattatgcaaaaattttgtacagtgttaaggcctaaaaactgtgtggttcagagactaattcctgtgtttaatagcatttatactttaagcacaactagaaaattgtaagaattgcactctacttatgtatcactacaaactttaaaaaactatgtctaatttatattaatacattttaaaaaggtgcccgcactaccatacatcagtatttttattattattattgttattcctttttaatttaatgtgctcgcactacaatgcatcagtattatgattcctctgtactttcctttcgctattcatcaatttcccattttttttttcagcttaagtaaccacacaattttaggcctcaatttttttttttttctgtgaaggaacttgaagtgatgcatgtgtgaatttaagataccgaagtcttaaagtgacctggacgtgaaggaaaaagtaagatgagaaataaagaaagcctttgtaaggtggttttaaaagccttatatgcaaaccttttaatctgtgtttctgcaagtgccatccttgtacagtgttaagagggtaacatgggttacctttgcaccagcttcagtgttaagctcaccctgttctttgaagcacccatgtcagtattagaagaataggcagcagttccttagtttacatatgtttgtgcaattattttctgtacttttttgttcattaattttgtcagtattacaccaaactgtttttgcaacaaaaaaattttttttgcattcatttaattttaggtcaaataacattttatttatgtggctcattttatatttcctaattttatttatttcatactgtagtgtacagtattatagttcttcaatatatagatatattttagtaaaaaaggaacatgacgttgatcatttgggcaaattttacgtaaagagaagagcatttattgtgttttggaacattaattgtgagatgggatttttcaattttattattttatttttgtttttttccaattactggaaattccaaatttgggaacttttgatacgatcttgtgaaaacactgtattttcgactgaaaattccactttcttcatcttgttttttagctaaaaagagggactgttaaatacaatgtatgataccatgacaaaaatctttcctgaattgtctttgtaaaagtattattgaattttcaatttgtaatttcttttgaaaatgaccatgctcgaataaaaatgtagccaaact

SEQ ID NO: 9963 - DNA, 1346 bp, Homo sapiens
atataaccagtgacttcaactttggcatttcattcatacttctgtagagaacggaaaactattgtccattaacatgatatgctaaacattctataaacattcttgtatttatgtgagacttgcccatctactgtcttggctgtgtcttgccttttaatcatgaacagttacatgatttataatttcactgattgagattactttgtaagtagctgttcagaagaataaaatatgactgttttagggactagaccatgtgcttttttaacacttatatatataatggtctatttgaagagctcacttcaacctaacagctagatgtctttacaaaccttaaaccaaaggagtaaaaaaaacaatggtaagcactgaagtataataagtaacctttggtacagcaggtttgctgcagtgtttttttctgtccacatgcaaattttggattctatcccagacccaggttttctagttcagaagactaaccagcttagtcagaagatggttccatggaagaaaaaggccaaggagtttgaagatttttcttctagacatctcaaaatgtggtactcataccatccacatcagaatcccttgtaggattttctaaaattacagattgttgagcctaccataggtcaaaaggactggaattttccttcttaacaagtatagtcatggcaccacgtaacattttggtcaatgacattgtataaagggtggtctcataagattataccatatttttactgtaccttttctatgtctaaatatacaaatgttttaccattgtgttacagttgcctacagtatgattacagtaacattctgtacagtgctatagctgaagagtaataggctaggctatctgtatagcctaagtgtgtaacaggctatatacatatcatcagggtctgtgtaagtatactctgtgatgttcatacagtgatgaaatcacccaaagacacatttctcagaacgtagccccatcatgaagtgacgtgactaccagagatttctggaaaagcactcccaaaagtaatgagatgtgtatggcaatgttaactgaacctgtttgtattaaaaagtaaatccctatgaggaatgtggaaatgtccgtcaaagcattgtcttttaagtaagttccaagatccatgaattaacagaggcatatatttaaaatgaaatttaatgagcacttagtgacttcatttgttcaagaatatttgatttcctattgtgtgcatgggaggtttacaaaagacagactgtccctatgcttgtgcagcttacaatctatttaactattagaggccctgtgagatgtaggcagttatttacagatg

SEQ ID NO: 9964 - DNA, 337 bp, Homo sapiens
cagaaatatccattcatttgctgtactatttgtatgtaatatttgggttgatctataaacactgtcagactaaagtttttaaaatatatttatttctaagtatttatttcagcatttatgaatttacaacattggcaagtgatttgggattttaaaattgcaaatgttcatttattcatatcattgaatacacgttgaacacatccacattgtataggatgtggtaattagcttgtaaccagggtatgatctgctattgttatttctcctctttattggaaaaaggcctcagttttaattattttcttcccaaaataaatcacacatttggttacaa

SEQ ID NO: 9965 - DNA, 1789 bp, Homo sapiens
atctttcattatctttaatgaagacaaaggaatctagtgtaaaaaacaacagcaaacaaaaaggtgaagtctaaatgaagtgcacagccaaagtcatgtataccagaggcttaggaggcgtttgagaggatactcatctttttggaatcctgaccttaggttcggcatgtagaccaagtgatgagaagtgaatacatggaagagtttttaagtgtgacttgaaaaatatgccaaaaaatgagagatacaaatgagctagaggaagatgaggggggatgcgagtacctccaagaagaaaaatcacactctgaatggtgcttgcatttttgggttttttttttttgttataatctattcatggatctccactttgatttaatttttaaatgttttaatctcctttacaaaaagtatacgttaatataccgtcctcaagggggaactggcactgtgaccttagcatttagttttctagaggatgtgatctaatttctttctagctcatcattaaaaaggaaattgtatcaggacccatgggatatatccagaggcaaactttatgaggctttgaaatcttgccttcctgaagatagctgagtaggatggttctaaggaaagcctttgcaatcttgcaagatttgtagaccagcactacaaagatcgcatagatcaaataggaaaaaaaatgtcgatttttattcagtctgatggttctgttcttcattgtgattgtcattaaaaagtggtaaattgctcaatgtaatatttttgtgcgctgtttagaagttgtgtgattttttgccatcgttgataaaaatgcaaagtcaaataaaaggtgtcttggtttgatgtcatagaatgatccaaggagagaaaaaaggtagttactgttttcaccagaaaaggtaatgagtgaaggaaagaatagtagcagaaagcacagtttgtgagtaaagctgtctggaattaagttaccaaaaatacaaagcaaaaggactattattttgggttgaagctccaaaactgacagcatctgataatctgttggtttatttcacttttcattaaatgaacattgatgagagaagatgccacttacccaagctttagagaatccctagtggaagattatatgataaactttcagtcctgacataacactagggcatttctagagtgtcattgctaaaacctcactgaacagatgcagccaaggtctgtgttcagcacttggtctctgttgttacgtaaaataataagcatttaaaatagtttacagatatttttgaccagttccttttagagattctttcagagaagaaaccagatctgacctgtttattgttggcgcttgttgaaaacgagctttctttcccatgatagtgcttcgtttttgaagtgttgaagctgtgctccccttaaatcgtggcaggagagattaaggtaattacaacactcagttctatgtcttacaagcactttgtcttgtctctgcaagaaaattcgattccagtcatttcccataaaatacagacattttaccaacataatatgctttgattgatgcagcattatgctttgggcagtattacaaaatagctggcgagtgctttctgtatttaaatattgtaaaaagaaaataagttataactgttataaagcagaacttttgttgcattttttaaactgttgaagtcactgtgtatgtttgtttggtcaatgtttccgcagtatttattaaaacatactttttttttcttcaaataaaaaagtaaccatgtctttgtct

SEQ ID NO: 9966 - DNA, 1510 bp, Homo sapiens
taaaatctcagcaatatagtcataagggctgctttctcttgctgagcagtgaccattgccatgaatgaggctagctttacacaccgtatctcatgaatccttatagtcatccttctttgtcagtgttgactatcctcatgttacagcggaagaaactaggatttggagaagttaaaacacttttctgaagttatccagttgacaaagaatgaggctgtggcttagcccagtctatctgattacacagataatatctaaggaataaaactttgaaaaaaactcaccaaacttttttttttttttttttgagatggagtctcgctctgttgtccaggctggagtgcagtggcgtgatctcggctcactgcaacgtccacctcctgggttcacaccattctcctgcctcaacctctggagtagctgggactacaggtgcccaccaccacgcccggctaatctttttgtatttttttagtagagatggggtttcaccgtgttagtcaggatggtctccatctcctgaccttgtgatccacccgcctcggcctcccaaagtgctgggattacaggcgtgagccactgcgcccagcaaactcaccaaactttgaaggaatcttactttctctgtaactccaaattattagagaataataattattaagaagtagccttaacatatgagaaatttgaaaggtgattattatgccatgggcaatttcttaacatttacagtttgtgtttactccgtgtagaattagaatactggcaaaaatcactggggaaactacttagatggaaagcatatcttatgcaggtaatcattatttgactaaattctattgtttcaaggctgctggccacataggatgtttttactatttttttagcctaagtgcttacataaaatggtgattcttttataattgtgcaagttgataatattaattgagtcattcttgtcacatccaactaaaacagactcaagaagctagggggaaaaagtacttgggacacataatattgctccaagaatgtaattctctgtgagcctggctactgaaactgcttgctgtaacctgagaccagttttgtctatagctgctgagataacttgctgtaactctaggactaattttacctatggccattgcccaccagttggagcttgccagctccccagggctttactaataccaatgaactttctcttaagatcacaagttggccgggcgtggtgactcatacctgtaatcccagcactttgggaggccgaggcgggtggatcacaaggtcaggagattgagaccatcctggctaacatggtaaaaccccatctctactaaaaatacaaaaattagccgggcatggtggtgggcgcctgtagtcccacctactcgggaggctagaggctgaggcaggagaatggcgtgaacccgggaggtggagcttgcagtgagccaagactgcactactgcactccagcctgggtgacagagcgagactccgtctc

SEQ ID NO: 9967 - DNA, 222 bp, Homo sapiens
acttaacagaatcatgaaaactatagctttttaacccggattactgtaaatgtttgacaaaaatgaatatgcttttccttaaaaaatgaaaactttaatttttaccatccatttatgtttagatacaaaacttatttccatgtttctgaatcttctttgtttcaaatggtgctgcatgttttcaactacaataagtgcactgtaataaaaagttttgtttat

SEQ ID NO: 9968 - DNA, 419 bp, Homo sapiens
gcatttcaaagcatcacacttgtctgcaggacttacagatcctgcagtcaatgtttcggtttagactctccactgttacctaagttctcaagctgcctatggtttttctgtgtcaatgtgatttatggtagtaccatcctttctcctttgggttttaaaataagttgcagaacagacactttaaaagcttctgcaatattatttctgtgcctagagtctttctccattataaacatgttttaacattatttcttttctaaaacagggattttgaatatgccaaacacattaaaggaaaaatagcagagatgttcaccttttccttgctgattgctaatgcttattatttctaattcagttctgaagttataaacttataatcaatacaaaccagcaactaataaaacctctaattctgc

SEQ ID NO: 9969 - DNA, 2310 bp, Homo sapiens
tctctactgacctcttctcatagattttgtataaatgaagtgctggactttacctgaaagctgcaaaaattaatggtttagatatatttataataaactgatttaaactttttctataagaagaaaaattaagaccacttatttgaaaacaaagatgaagtctcaccttccagtttgctttctcattagttttttccaaagtaagttattgaagctgtgattgacatttttctcataatgaatcctctcaggacattgtgtagcctatggtaagtacaaagggagaggaagacattttgaattttaagagctttattatcagtttaaccctccctagttgaatgttattttcttcttgttccattaagtcagaatacaaatcagcacagatattcgaatgtttccaatattttaaaatgtaatgttacttatgaaaagtattttgcttaaggttgtgtgtgtattgtgtatatacctcaagttcaagttaatggcattgatttatgttccagacaaaaataacacaaataataatatccttcgttataaccacaatgagataagtattggcattagtgttcagtgccattttatactttctctctgtgttctctgtattgtactaaccaacctcccaaatcgctgagctgcttgtttaaaaaaaaaaaaaaggaaaaggaaaaagcatgacattgtgtatcgattttttgttgttgaccaaaatcacacacatggaaacatgtaattcaacagagtgggaaagctagcagattcttggcttagtattactaataggcaggattgtacaatgagcaactatcagattattcctttcagtggttcttatggcatctaaattactgaataaattattaatccattaatcagtgaatcaaattatgattacaattatcaaatgaatgctcagcattaattgaaaactgttttgtgaaacatgtctacccagaaaagtagcattctataaatactattaaacaacttagctatattatttttaagtattaaattatatgtcaagcagttaaagtgaatttcagagtaaaagtaaggcatgtttctgagcaacattgataatttcttaatttgcaaatttcttcttattttggtacttggaatatagtgtgagattttttatttctaaattttgttgtatcttctattacataaatgcattgacaattataaaatgcaagtgttttttgaatgattttaagaatttggcttaaaaattgattgatacaacgtattatttgtactaagaagtaacttgacccaaaacaccttttatgtttgcttagggtatattttttcagtgtctgaaagtcaaaggtattcctgtcacaactgtaaacaaacttatcctaaatgtgttaaaacatattcttgggtactctatttatgtatctttcatgccttgaaaatctgaaggttaatccaaactcacatgttttagcatatttgagaaaaaaaaactaccttcaatatcagccttttaaatttcatgaagattttggtgaggaataatagtatatagtttaagtattgacaaaactttgaaagtttctttctttaaaatgggaaatactcaatatctaaatccaggtcaggcatgggatatcagtatttaacattggatgttttatgttttatatttataatgttcaaaatgcaagcataacatttaatatttgtccacatggttttacaaaagtaaatcttaaattactaagcttttcccatatgttctcgtactttctcaaatccctataaagaattacttgttatctattaaaaatctcctttacccaaatctgtattatggtttcgccagacaaatattatgtgatgtagcccagaaaatccacaccttttgtcctttttatgttttaatttgaataatcatgtgcttagtcccttggattactgccacatcagtttaacacgatatcagcacattcccttgtcatcatcaaggtgttggctcagatttattcttaattggatgtttaaagcatgtactaccttgttacagttggtttagtgtagtggattattgacatgacatcatgagaagatgtgtaattttataccacatttataaaacatgattttgttttctacccttcaaggtaaacattaaaaataaggtggtacttgtgtacttgtacataaaaccaaaattatagttgggaaaaaaataaatttatatatgaaaatgtcaaaatcattttaaaagtattattttcaaataaaatggagaagctggtgaaaagtcatattggcaatttt

SEQ ID NO: 9970 - DNA, 1491 bp, Homo sapiens
gtctaatgaaacaaaaaatattcatctgttgacaatttgccatagcagtgctaggataaaccaatcatcttaacttggctaacatagcacagtatttactgtgctaatgggctgctgtcattttatgctaagtaaggggcaaaaaaaaaaattacattatgcccttgagtctagatggatattagatgcccgatcatatagatatttttaagtgcaacatttacatgataacagtacattttgttttcttcatagatttagacacatcaatttgtaatttagggtacttacaaggcacatataaaataatttcccatgctggaaattccaaatgaccagttccagttggaaccaatttataaaccaattcctgttggaatttgggtgaattgactagaaagtctacttgagcatgttgtaatcaactgaaaaatctggggggaaaaaaaaaaaactaataagaaaatcgaaataccaatagaagccaaatccagctttggtatttatttgctggaagctaaatttacacttaaagttggagtgtataaacattttaatatatgttaatgttgccagaatgacttttcagacttaccaaatgtattgatagtgccaaaaaaaaaatctcagaaatcttaatgcagaaattatatagtctcctcagattttaatatttttatttctttcctggcacagctgttgtattcaaagtgttttgctttttgtttggtcagtactgttagctcatttgaagttggcaaaaacaaatacaaacaagcaaaaaacctcaaatttttttcagcagtgagagagaatagtaaagagaggcccaagcatagctggttatgtgaaatataaaatggggtgttgttctccctttaatcaatctgagcacaactacatacatccaggaatctgaagtcagatagtaaggatgtggtaccaatcctcccgagtgcaatgctaaacacttccaggtgggaattcatctatttcacttaacacaaacgcagggtctgtatttcctgccaacaagattgagtatctttccattgcttctctcagtctctgtctttgaatatctgaatgttctggcccttcaacaaattctttaaatcatgctaaggaatttcgttttatgtggacacactcaactttgatattcaggagatgtttttacaaaatgactaattgaaaaaagttgaaacaaatgattttaaaagcttgcagtaaaaaataaactcatagattcagcaaatatttgttgactaaaattatagcatttttaatgcagaaaattataaagaatttggagattgagctgccttatttctaatgaacactcctcttcatcttattaagtcttcacagtttttccagtggctataattatggaattggtgacctatgttttatattatcaaggaagccttagattcactctgatctaagaaattattgaaattgaccctttttacacaaatgtcttta

SEQ ID NO: 9971 - DNA, 1981 bp, Homo sapiens
aaacaaatcaagcattttcttgaaagccttcataagtgtattattcagtccttgtgataccaacctgaaaatattaaaacttttttccctctcaactcaaaaggaccatgaataaataaagcacaaaaacctctcttattctacaaggccataaaaggttttttttttttttttttttcagtccagtttgtttgaagtcaatcttttcatcagaggcagcttaaagatgctttcagttagttttgtcttactttcagatttctctacataaatctagatactcattaagtagccttatgacaaacagtatgagatacttatgacaaactcgctctgtcacccaggctggagtgcagtagcatgatcgacagagtgagtttgtcaaaagtatctcatacttataaacagtatgagataggaggattaaaatattattttaaagaaaccactgtttccccctaaaatgtcataagagcactgaagaacttgaaatatttttttcagagtttctcacacactttaaaagtctaacttttttgtgtgtaagcatttagcttgccagcatatttctttttggctccttaaattgcggttgtgtttgcagtattgtcacttttgctctcactgttatgttgaataataattagcatataattgtctacagaagcaagagcaatctggaaggaacaaaaatgttttctgtgattaacagtgaagaccttgtaaatgcagatgtgtgataaagcatttagtcagtcccccaaacagtcatgccaactgtgaaggaatgtcccacaaaacatttccattccctgaggaaaaacattttctttcctacatgtatctctggtatttagaattgtcactaataaccttttcaagtgattttggctattctctaatgaagatatggtccatttgtttttcttcctgcaatgtggtgtgcagagatgctgcatatcctttttatgggattgcgtgtgaatttgaaccatgagacattcctaataatttgttgtgagatataccaagcatggatgataagtgtgtttttagtggtgtgttgtttttttaaagaggtgattcaagtaccgttgctaagctgtcaacataccaagctgttgaaaaaattgaccatttctttcagaagtaattctcagcctgtggaataatagcaggtgaagacttcatagaaggcgacagattgatagggaggctattgaagcagtttttctgaagcctgcattttgagttagtttatagtgctaatagattctatataactgtgagagtttggtagtaaaccagtagggattgttttctctcctaaaaatttgcacactacttcattgtctaccaactttttacatattggaaaatagaaattgcaaatacatacatgtatggaaacatattcagattgggaaaaacaatggacattagtttttaaaaagttacgtggaagcaagatttctatatttgtttttttaaaggaagcagtcattctttctactaaatccatttcaagctagttctctgaaaattttgccatttatctacagaaatttgattataaatatgttcctttttcaaagaaactttattctagaacaaaatagtctatatggtacttgatctacatttaagtggaaaaattagcagtatttgaaagctcagtttatgtcattgtcttaacttcagatacaaataactgaacagaaagttttaacctttaatatctcatgttctgttttttattcagtattttcctttatgttaattcaattatatacttctgaatggcaccttactttttggaaacaaatcttctgttatttacaaaataataatttttaaaaaacatttaaaaaaaatccaaagctgctctcgataatagtcaacatttgcatatatatggaatttcttactttttttctcccaaactctatttaataaacttattttaatgtttgtgtatttc

SEQ ID NO: 9972 - DNA, 898 bp, Homo sapiens
cccgccctctgcccccgcggcaaccgctcccacgcctgcccactttgctagcccggctgtgcccctcactatcagagactgggcgaagcaaacctgtcggagtcaattatttctctcgacttcggcctttcggaaagaagcgaccggtttctccctcgccctctgaaagtcctcatgcctggcagtcggaggagagcgcccagactctgaactcagcagaaagtggcaagaagagggcgattagggcgcagaactttggaagctgctacttacttggaatgcggggagaccgacggtgcgaaggcccttctccacccgcaggtgggccaagctctgggggcaggtggagagggcgggcaggggagagacccagcggcactgatcgccttgtgaccggaagagtgacctgttaaaagccacgcagcagactcatggggtctcacaaatccgtgtccgggtgcgctcccactcttctcctgctccccccctgccctggaggggaggggcgataaatacctttgattgtaacgtgccgttttaagaggttttgtgtttgtttgcttgaatacaaatgtttgataagtctttttctgccccagtggcctgtttgcctgcctgaggagttacagttttgtcattgtgggagaaggggtggggggagggggagcctgcgaatttgaacggggtgagttgtttcttttagtgcatttcccactgggtcttttgggaggcgtctagcgttcctgctggccctgggacaaagacccagaatagaactcgtagctcgtgactgcacggtttacgccacaaaagtgctcttgacatccgtgacaccgttttgactttttgtttttttcttatttaacatttccttaataaatgcaacatttaagcgttt

SEQ ID NO: 9973 - DNA, 1562 bp, Homo sapiens
agagacacgggctcaaggaacccaagagagtggaagaactgcaaaacaagattgtaaattgtctcaaagaccacgtgactttcaacaatggggggttgaaccgccccaattatttgtccaaactgttggggaagctcccagaacttcgtaccctttgcacacaggggctacagcgcattttctacctgaaattggaagacttggtgccaccgccagcaataattgacaaacttttcctggacactttacctttctaagacctcctcccaagcacttcaaaggaactggaatgataatggaaactgtcaagagggggcaagtcacatgggcagagatagccgtgtgagcagtctcagctcaagctgccccccatttctgtaaccctcctagcccccttgatccctaaagaaaacaaacaaacaaacaaaaactgttgctatttcctaacctgcaggcagaacctgaaagggcattttggctccggggcatcctggatttagaacatggactacacacaatacagtggtataaactttttattctcagtttaaaaatcagtttgttgttcagaagaaagattgctataatgtataatgggaaatgtttggccatgcttggttgttgcagttcagacaaatgtaacacacacacacatacacacacacacacacacacagagacacatcttaaggggacccacaagtattgccctttaacaagacttcaaagttttctgctgtaaagaaagctgtaatatatagtaaaactaaatgttgcgtgggtggcatgagttgaagaaggcaaaggcttgtaaatttacccaatgcagtttggctttttaaattattttgtgcctatttatgaataaatattacaaattctaaaagataagtgtgtttgcaaaaaaaaagaaaataaatacataaaaaagggacaagcatgttgattctaggttgaaaatgttataggcacttgctacttcagtaatgtctatattatataaatagtatttcagacactatgtagtctgttagattttataaagattggtagttatctgagcttaaacattttctcaattgtaaaataggtgggcacaagtattacacatcagaaaatcctgacaaaagggacacatagtgtttgtaacaccgtccaacattccttgtttgtaagtgttgtatgtaccgttgatgttgataaaaagaaagtttatatcttgattattttgttgtctaaagctaaacaaaacttgcatgcagcagcttttgactgtttccagagtgcttataatatacataactccctggaaataactgagcactttgaattttttttatgtctaaaattgtcagttaatttattattttgtttgagtaagaattttaatattgccatattctgtagtatttttctttgtatatttctagtatggcacatgatatgagtcactgcctttttttctatggtgtatgacagttagagatgctgattttttttctgataaattctttctttgagaaagacaattttaatgtttacaacaataaaccatgtaaatg

SEQ ID NO: 9974 - DNA, 2657 bp, Homo sapiens
actaactggaactgagaaattctcatgcccactaaaggaaaagctaattctattgccccagggtgcatatttctatgccttatttgagttatcacttggagggaggtggaagttgactctctttttcactgtagaataatgtggaaataaccctagataaaaattcagtctgataacctcaaatcaaaaagctttaaataaattcttgggcatttatcttttaaaacttcactaatatagcattgtgtgataagcactaagcagtcagtcccctgggggaatctggcataattcggctataaatgtagcaatgcttggaaaggtagtcatcaaatgagactatttgaggggactatttgaaatgattctggtatttcttttggtatctttcttcctgtacattggagtgatggaaagtctggtattaaaacctctcttacttttaaacttgattttgcagactctggcaataagccttccaaaattctgtgccttttctattatcaccaaacaatatgttaagtggctttccttggcatctacagagaaaacattctatagccctccttcctaggtgttaccattcactgaatcttctctcagagggagatgagcaattgtcagtcaggataattctgtttgctaaatgttgcctttatgctttcaaactgaattaaacccattgtgaggttgacactgggaggggctagaagattggtgggcagcagactaaagagttatgttggatagttttatttctgtggctgaaaataaaatcttgtctagcacagttaaagtcattaaaaataaaaatgacagctttagcacaattttaagaaaatgcccctctctattaccacattttctcttattaacagtatctcagaataattttctttccttagaaacctgagagaatgctagtcataactgtactagttactatgaaaatggaaataattatcttagaatattttcaaagtagagcgtgagcatgtatttttagtgggagagctctgatagttgttgggaatatataatttactggacctcagcccaaatcaagatgcttaaaattgtacttgtggagcttcactcaaaccaatgtgtcaaataacgtattgaatatttatgaaaagagagactatatttatattcttagatagtttgttccacaatttttcatttcatgcttccatatatattaccctgaactttctatcaccacagataaagattttgttttgccctgcaaataaaaagacaattccttattgtctgaatgtaatacagtcttcattgtactattcaaccctttgtttctttctttttcattttgtgaaaaactccatgttagtcctcttagatgactgcttatttatgtgtaacataaatcccacatattctaatgacaacttctttaatccttccgggtcatatattatatttccatagtatcacatactattatttagttgtttacaagactccaatttgaattcaggattacagtgctcctttcattctttcaaacagataacataaaagttctgttaccctcattctatacaacctatggatttcatgtgttacaatatcagtttccagaataaagtgagggaaatcaggtctttattgataaagttagggagaagattgatgcaataggacaatttccaatttaatttagatcctctaatctttctacatggacaagctgttttcttttctaggttactgataacccctacaattttcgacttaacttcaaaacacagtattgtgttatctatcacataacaggaccatgtttttaacctaccatcaagagcctgtattttgagttattccaacagagatgatggattcctgtagaactagaggtgggtgacctatggttatgtggcacggcaaagcaagtacctcttaagggactctaatatatgctaacgctggtcctcttagctctgtgctctcaccagacaatgaatgaactatgaaagatttagtcaacagaaactattttagggtatgtttagttggtaaatgcttcatgttcatggatgacacaatgtttttgcaaaaaaaccctgaaactattctttggcattggtgtccatggccctataccgccatcttacacgaaagccacagagttgaaagccacagagttgaaagccacagagttaagtgacctcaggtaacataatggtgatggttggccatttgagtctttgtaacctaggaaagacaaaggtctgattcagattgcatgggggatttttaacatatttgaaactcagggggaacatgattaagaacacaaactggtagctacacatgaaggtttacttgagcttttgtgattcaaagttcaggggtggtaaggactctggtaccagggaagagggagaattaatttattgtgcaaatgctggtatttcttacatgattttttgttttcctctgttgctagataaatagaaactaataatagctctatttctctgccaatataaaatctacctttcatataatgctacattgaaggcacagaatttgctaccatctctctctccccctacctaccaaactatccacaatttaaataaagaactgctgtgtctgacttactctcaataaaagtttgtgtcttt

SEQ ID NO: 9975 - DNA, 1058 bp, Homo sapiens
cggattgtggtgtcctttcaaattagcttatttcacaaatatctctagactcacccagatcccagcttggtgggaaagtgcagaagaattgcaaaactgacatcccatttcacagcaatagtgacctttatttaaattgttgtgttatagtttatgcttcttaaatcatttttcaacctaaacagccaatttctaagcagacaggaaaactaaataataagttaattaatataacaaagatgcaggttcctgctcattccagtaatgtctttgaaagcaaaactaatatttattttctagattatccctgtgaataattgagaactttttggagtcaagtatgaataaaggtgtggcagaatataataatctggactattttctataggataattgctgggttataaaatcttaggtttgcttatgcccagtagctcctgcggaggcttaataataggcaattttgaatttgttcaaacctgtaatggcttgtaaacaaagatgaccatcagctgtttctcacatctatagtgacaataaagcgggaagtataagatttaataggaggggttaaggttcatgagaaccatggaaagatgtggtctgagatgggtgctgcaaagatcataataaagtcatttttatagacagtctaaacaaaatgggtggggatgtcgtgttttttgcccaattcagcttttgttctgcctgaacattaatggcaagtctagaactctccgaatcctacagctttgtaattttttttctacaaatgtctaacatccaaaactgagggttgggaaaaggacttccctcctgtagtttttttcatattacttctcactttatatcttatattctaaatagctatcacctcagcagtcttttgcctattggttatgttagtatcacattacttctagcctttcaattactccatgttttatttaatatccattgaagtctatgaattctctgttctggtggcacagctattcataacctatattctagagtagacaatctggactatgtaataaatagtctgctgattttaa

SEQ ID NO: 9976 - DNA, 1526 bp, Homo sapiens
tgatgataattatgttaaaaagaaatctctcatagctttcttttccattttcccctttatgtgaatgtttttgccattttttttttgttctacctcaaagataagacagtacagtatttaagtgcccataaggcagcatgaaaagataactctaaagttaagcatgggcaggagttgacttcatccaatctctatgttatgtttaattttattttgaaagcaacacctcaactcatctttttatttaataaggaagaaatatattacaaaagtataaaataagctctataaaaatgttatagtcattaagtttttattttacttgaaccaagagcacatgaatgaacaggaaaagatgtaaaaacatttttttctgagatgaaaacatattaattaaacatgcaaattagagcatgctatctttaggtgatgcaatctatgtttccccctttttaagttagcaggactttttaaaaataaatattgctctaaactttaatatatcgaacgtgagagtggagctgcttagtggaagatgtaagtgaggtgggtgtcccatgtgcttggtctccccttctgctgttctcctgttcttcataatccactactgcagcagtccctgaaccactaaacttgttcctttcatttacaaaagagatacctgacatcctgagacactgagaaatgtcctgaagtcacacagctaatggcagaactggcactaggtccaaatcttgtgataatgaacaccgtaaggttagctagcttcctactttcccttgaatagtgcttttctccctatgtaatatcttttattatgatatttgtggtttagaaggcatattgagttattttgcagaatcataatggacccgcacaaaatctcagaaccatatctgttgacattttttctcatagaaatatcatggttaccccatttgttaatgagcattaatgttttctgaacacttccaaagattaatcaaacataaatattcattgtctgaaaatgtctttaagatacaattcagaggtccctatttcctttgtacatacacacttagaaagaaaagacagaaaaggaagaggaaggaaggaaatattttgagaatatattgagaagaattaagaaaactcttcaatgaagtgttaacaaccaaaccctacagacggtatcagaaacagcaaatagatattcctctaccctttcacagtgagtgagtgagtacagaagaatgctcatgatagttttgccttcattctactttctgtggacacagagtaatgaatatttaatgggacattaaatatgcccttcaaatctataattttactttggtaaacgagatttaacatgatgtcttttatgctcctaaaacatcttttttcaaactccattccttagaacattcttctactgagatgatccaagaccaaaagtgttctttggtacttgcttataaagtgatagtacatgttagcatataatgtattttgaagagtgaagtaaatgctattgataacag

SEQ ID NO: 9977 - DNA, 1082 bp, Homo sapiens
cattttcatagtgtcaagaaggaagatttgacgttgttgtcattgtccagctgggacctaatgctggcctgactggttgtcagaatggaatccatctgtctccctccccaaatggctgctttgacaaggcagacgtcgtacccagccatgtgttggggagacatcaaaaccaccctaacctcgctcgatgactgtgaactgggcatttcacgaactgttcacactgcagagactaatgttggacagacactgttgcaaaggtagggactggaggaacacagagaaatcctaaaagagatctgggcattaagtcagtggctttgcatagctttcacaagtctcctagacactccccacgggaaactcaaggaggtggtgaatttttaatcagcaatattgcctgtgcttctcttctttattgcactaggaattctttgcattccttacttgcactgttactcttaattttaaagacccaacttgccaaaatgttggctgcgtactccactggtctgtctttggataataggaattcaatttggcaaaacaaaatgtaatgtcagactttgctgcattttacacatgtgctgatgtttacaatgatgccgaacattaggaattgtttatacacaactttgcaaattatttattacttgtgcacttagtagtttttacaaaactgctttgtgcatatgttaaagcttatttttatgtggtcttatgattttattacagaaatgtttttaacactatactctaaaatggacattttcttttattatcagttaaaatcacattttaagtgcttcacatttgtatgtgtgtagactgtaactttttttcagttcatatgcagaacgtatttagccattacccacgtgacaccaccgaatatattactgatttagaagcaaagatttcagtagaattttagtcctgaacgctacggggaaaatgcattttcttcagaattatccattacgtgcatttaaactctgccagaaaaaaataactattttgttttaatctactttttgtatttagtagttatttgtataaattaaataaactgttttcaagtc

SEQ ID NO: 9978 - DNA, 146 bp, Homo sapiens
agctcatcctcaaattctatatgtaaagagcatttttctttgaaaacatgtatatggataataataattactactttctaaaatgtttgaaatatcagacatagaaatcatagcatctattaaaacaactttgcctttcttttgtg

SEQ ID NO: 9979 - DNA, 232 bp, Homo sapiens
aattgttgatattgtattatttatattttcagtgatctcatttgaatgatttataggtaaatactaatcagacattattaaaagcaaaacaggaaaaaggtaaacttcttaaatttagttacctataaaaattgtcaattttcattctttaaaaaacacatggacttactataaaagcctttttgtactagtgaaaagaatcttcagctatatagaaataaagttatacttt

SEQ ID NO: 9980 - DNA, 1284 bp, Homo sapiens
agttataataatctctttatttttttccttctaaacaaggacaaatgagaccagcaatgtgaactgtatttacataaacgtgcaaggcacatacataatgactttctttttccttaagtataaaaaaaaagtatcagaagaatgataccatttttaaaggcttcattcctacaacaaccaaggccctcggttattggtttgtgtgatttatcagctaatttaggtagaacagggaagcacacccaaagaattttcaaaggaaagggtgttatagtgcaatagcaattaaaatatatcaaatcgcactgaatactcaacaccagagctctaatgtgggaaatggttctcctttccctctcaataaatatctatttttcatttttttactttgtagtttattttttagtgaatgtatttaattttatgaattatttatgattaaaccacatccagaatcttcgttttctgtgaaaaggaagaactagaaaattgctttaaatcttgaaaatacaaggaatgttttaaaatataaaacaaagccaagttaaactgtttacactgatgtgctataaaagcaccaaaaagaaactttactgtagagttacaagtacatttatatatatatgttgctgcatcacttgtgtagttaaattgtatttcaaaacagtgaaaaaattgacatgtatatactgttcattcttgtttatattaagtcttgttttaaatatgtattatgtgtatatattgtttgcagacattattgttcatgccttagaggattgtagcattttattttcgtctgaaggtaatgatagctatacagtctgtacagtaattatcctctaccaacactgtggcgtctccttaatcttggtagtgcctgcctttgaaacagggtgtaggggatattagttttccatttttctattttgttatataattttaagccaccagggcctaaattaaagtataatcatttgtatccatgtggaataaaattgtgacaatttcctacgcacacagtattttttcatagaaacatttccctcccatttgccttgcctcagaaataaatttaaaagacgtttgtaaccactgtgttttatctactgtgtgttgtggtggcctgttggaggcaaatagatcagattttttttgtacctacgtaagagtacttgaagttttatttaaaataaaatgttgtggaaaaggtagcattctttttttaggagtgttatttttcactatgtgtggcacggatacaataaaagacttttacaaact

SEQ ID NO: 9981 - DNA, 2998 bp, Homo sapiens
gtttttggtaatcttgcactaagacatcaacaaaatgccctggcagagataacttgggaaagattttaatataaaacttgacattggatattagagctttaatggtattccttattccagtaacatttttatgtactcatctgctgtgaaaagtctttaggttcattaaaaaaacaggttttagaaatgatcttagatctaatatagtgattttaagcatcccgtcaaaggcagaatctgtcacttgaatgaaggaaagcttaaagcccaagcagataaaaataaaagcccagcctatttgtcttgcctgctgtatcttccctatttagttgacccactttagtttatatgtttattagtaaacatgaaatggggaataagtgattttaagtacatcccatacatttaaatatctttgataattgttatttttttggcagataattcctctagaatgtgtatctttttatgatttagatgaagaaaattttacaacttttaacaccccacaccaattttagtttcattacttttacacacaccattttatcacaaatgactcaagttttaatgaatgtttataaattatttgaaacaaaatatgatcgctgtgtccaggatggcatagagaaagctggcaattaggttaacacttacatattatagtgcccctttaaggatttctctcttgccaccataccttttgtactttcccctatacaagatgtatctcattctcctcaagcatttataaatttttccttcaatgacatgaaaactgtgcaagcaaaaaccgaagaaaaacacttaagtacaactgtagtgacagtgatcaaagttttcagtgcatttattgtacattttaagaaaaaggtgaaaatcatttggggagtaaaaaaatgaaaaagctgaaacgagtaattttcctcaccatcaataaaccaaaaacaggaaagataaagaatgtataaatttcacgtaaattagtcacgtatcacttatcaatggggatacgttctaagaaatgcatagttagggaatcttgtgtgaaaatcagcttgtatttacacaaacccagatggtagagcctattttgtcccaaacctacacagcatgttactgtgctgaatactgcagacaattgtaacacaatatttgtgtatctaaatatagaaaaggtacagtaaaaatatggtctactaaggaaacactgttctatatgtggtccattactgactgaagtatactgtctagaagtctgaggctcaaagaaaagtaatccctcttctgaatccacaccccatcaattatcttactttcttctggggagatagatagatatactatctcactagcttgactaatggcaacaaagttccagcttgtgtagtctctttttattgaccacatgaatcgaaaacactcatcacaattaatggcactatcattaatgagacatgagtaactaaaaagtgatagaaaactattaacagtgcggctacatggtactgaaaatgcaggcattacaccagctgttacacaagcacaagcatgctctgtaagagctttacatttctgagattttgtatagtgattgagatgtctattttattattgatagactattactaatgtcaatattgaacactaccctggaattcctgcctggttttcctacccaaattgtaccactccttgaagaactacaggcacagtaaaaaaaatatggcgtattatgtgaactaaaagagttctaaaggagttcttaaaggagtggtagaatttgggtaggaaagtgattaagtccaacttaaaaccaacagtctcaaacgtctacaactacaatgtccaatgagccactagccacatgaggctatttaagtaaatttagtttaaaatccagttttcgaattacattagccacattgtcaagtgttcaaatcacaggtggttagtggctactgtactgggcaacatacattatagaacattttcattataggaagttttattgggcagtgctgctcttaaatcctaccttccactcaactcccatacaactttcttttgtacattttgatactttctacctaatggcagctcttccaaaatagctgctttaaactctgatttaattttcaatatttggtttcatttttcaacaggccaagaggcctctggtaatgaagtgctatatatatatatatgatggagtctcactgtgctgcccaggctacagtgcagtggctcgatcttggctctctccaatctccgccttgcaggttttcaagcaattctcctgcctcagcctccttagtagctgggaccacagacatctgtcaccacacccagctaactttttgtatttttggtagagacggggtttcgccatattgactgggctggtctcaaactcctgacctcaagtgatccacccaccttggtctcccaaagtgctgggattacatgcgtgagccaccacacttggcctacattttttctttatataccagaacatctataacaggcaccttatctactcattagtgaagagataattggattacacaggcaggcttgtttactacatccagaatgtagaaactgctttcttcaacatcttggttctagctagtaataacaatataattctttggcagatattcagaataacattttaaactacattttcttagaaaattgcattcttgtagtgagcagtgtatggtctcttttgttcagaatttaaaactgataaccaatgaaagccttttctcttattcctctaccgtcatttacatgataatctgaagctaatatgacaatatttaaatactaagtggtactagggaactacaagaatactgtaaagcttaagccattgttatcactgtcatttagcatttaataacaaaactatacagaattatgtgcataccaatgaatgttttgtaccatctagttaaattttttaaataaagttttatgggttaagcag

SEQ ID NO: 9982 - DNA, 1687 bp, Homo sapiens
attcttctaaaagttttctaatttgcactaatgtgttatgagaaattagtcacttaaaatgtcccagtgtcagtatttactctgctccaaagtagaactcttaaatactttttcagttgtttagatcttaggcatgtgctggtatccacagttaattccctgctaaatgccatgtttatcaccctaattaatagaatggaggggactccaaagctggaactgaagtccaaattgtttgtacagtaatatgtttaatgttcattttctctgtatgaatgtgattggtaactaggatatgtatattttaatagaatttttaacaaaacttcttagaaaattaaaataggcatattactaggtgacatgtctactttttaatttttaagagcatccggccaaatgcaaaattagtacctcaaagtaaaaattgaactgtaaactctatcagcattgtttcaaaatagtcatttttagcactggggaaaaataaacaataagacatgcttactttttaatttttatttttttgagactgagtctctctctgttgcccaggctggagtacaatggcgtgatctcggctcactgcaaatctccgcctcccaggttcaagcgattctcctgcctcagcctcctgagtagctgggattacaggcaactgccaccatgcccggctaatttttgtatttttagtagagatggggtttcaccatgttggccaggctggtctcgaactcgtgaccgcaggtgatcctcccgcctcggcctcccaaagtgctgggattacaggcatgagccaccgcgcctggcctctgcttactttttatatagcaaaatgattcctcttggcaagatgtttcttatattattccaaagttatttcataccattattatgtaaatatgaagagtttttttctgtttataattgtttataaaacaatgacttttaaagatttagtgcttaacattttcccaagtgtgggaacattatttttagattgagtaggtaccttgtagcagtgtgctttgcattttctgatgtattacatgactgtttcttttgtaaagagaatcaactaggtatttaagactgataattttacaatttatatgcttcacatagcatgtcaacttttgactaagaattttgttttacttttttaacatgtgttaaacagagaaagggtccatgaaggaaagtgtatgagttgcatttgtaaaaatgagactttttcagtggaactctaaaccttgtgatgactactaacaaatgtaaaattatgagtgattaagaaaacattgctttgtggttatcactttaagttttgacacctagattatagtcttagtaatagcatccactggaaaaggtgaaaatgttttattcggcatttaacttacatttgtactttatttttgtataaaatccatagatttattttacatttagagtatttacactatgataaagttgtaaataattttctaagacagtttttatatagtctacagttgtcctgatttcttattgaatttgttagactagttctcttgtcctgtgatctgtgtacaattttagtcactaagactttcctccaagaactaagccaacttgatgtgaaaagcacagctgtatataatggtgatgtcataataaagttgttttatcttttaagtaaaagtaa

SEQ ID NO: 9983 - DNA, 977 bp, Homo sapiens
tttgggtagaggagaggacataaataaatacatggttgttaaagctgatgataatggcatctgtgagccagaaaactctccttggatacgttttctgagaaaaaatagcatgaagcctaaagccatttcttccaaaaacaacattgcaacccttttctttacccttttgtcttttaaaataatcccagaacaccaaaaataaaaacaaacaataacatgtttatctttacccttagcaggaagatgcttggctggaactttgtgttcacagacttagtcattgcataccaaaaccatatttactggaaaatatcccaggtttctaaatgttataaaagcacaatagagttatggaaatgtttccatgatgaactgtgctgttaggattcttatttgctactcataaaaaccagagtttgtaataaaatggaagcatggtattcttttctttatgtaattgatggttattgaaaggtacttgtgaagaaaattattttaattggtatggagagcttgttacagtggtgtaccaaggttgggggtgagcctaccctttcgaggaggagtattttaatcaccaacattgtttagaatttcaagcagatggtgataataaaaagcagaccaacttttagttagctgtattgttagttttaaattattttcagacaatacactattgcccacacatgggatggactctcctaccgcccctacccccttggtacatggctggcttggtattaaagaaattcactgtaaaatctttttagaaagtgagccattttgtaatgatgaagatgttaggacttcaaaggatttttctttactcgattagttttgtttatcaaatgatttctttaaatcgattatatatatatatggaatatttcaaaattcaaactgtcacattaagaaacatgataacctaaatgacctaaataagaacactgtacctaaaataaagaggcaacttt

SEQ ID NO: 9984 - DNA, 277 bp, Homo sapiens
taatgaggtcagagaatgccacagacaccagggtaagtaaagaagactaaacaggagtctcatctgtctttccctttacagcacagatgccattagaatgtgaattgggtcactattttaattattcttgaagtgattactggttttgaatcttaaccaaatcagatgggttttgatttattcatttccctaaactgtgatccattcttaaaaggggtaaattatgcattggttatttttcagaaagacaagaactattaaaagaaactccctattg

SEQ ID NO: 9985 - DNA, 13 bp, Homo sapiens
aactactttatgc

SEQ ID NO: 9986 - DNA, 761 bp, Homo sapiens
atgtacagaaaggtgttcttacatgaagaagggtgtgaaggctgaacaatcatggatttttctgatcaattgtgctttaggaaattattgacagttttgcacaggttcttgaaaacgttatttataatgaaatcaactaaaactatttttgctataagttctataaggtgcataaaacccttaaattcatctagtagctgttcccccgaacaggtttattttagtaaaaaaaaaaaaacaaaaaacaaaaacaaaagatttttatcaaatgttatgatgcaaaaaaagaaaaagaaaaaaaaaaagaaaagaaaacttcaattttctgggtatgcacaaagaccatgaagacttatccaagtgcatgaccggatttttgtggttttgttcattttgtgtttaatttgtgttttttttttccagctgtatgaaatgggctttctgaagtttaaatagtccgacttcacccatggtgttctgtgcttgcagtgcgagtgttgctgtaattcagtgttgccgtcagtgtctcttttcttagctttctgtctttctttcaacgtagtgtgaagtgtcttatccttttctatgaattccaatttgccttaactcttttgatgctgtagctgtttcagtaaaagttagttcaaactaatgatgtagaatgctttgaccaaatgagctggtctattatgccttgtaaaacagcagcatagggcttttaaaaggtagtcaataaaagttgctgaaattttggctttttt

SEQ ID NO: 9987 - DNA, 1036 bp, Homo sapiens
cacctcaaaataccatgccatttaaagcttattaaaactcatttttgttttcattatctcaaaactgcactgtcaagatgatgatgatctttaaaatacacactcaaatcaagaaacttaaggttacctttgttcccaaatttcatacctatcatcttaagtagggacttctgtcttcacaacagattattaccttacagaagtttgaattatccggtcgggttttattgtttaaaatcatttctgcatcagctgctgaaacaacaaataggaattgtttttatggaggctttgcatagattccctgagcaggattttaatctttttctaactggactggttcaaatgttgttctcttctttaaagggatggcaagatgtgggcagtgatgtcactagggcagggacaggataagagggattagggagagaagatagcagggcatggctgggaacccaagtccaagcataccaacacgagcaggctactgtcagctcccctcggagaagagctgttcacagccagactggcacagttttctgagaaagactattcaaacagtctcaggaaatcaaatatgcaaagcactgacttctaagtaaaaccacagcagttgaaaagactccaaagaaatgtaagggaaactgccagcaacgcaggcccccaggtgccagttatggctataggtgctacaaaaacacagcaagggtgatgggaaagcattgtaaatgtgcttttaaaaaaaaatactgatgttcctagtgaaagaggcagcttgaaactgagatgtgaacacatcagcttgccctgttaaaagatgaaaatatttgtatcacaaatcttaacttgaaggagtccttgcatcaatttttcttatttcatttctttgagtgtcttaattaaaagaatattttaacttccttggactcattttaaaaaatggaacataaaatacaatgttatgtattattattcccattctacatactatggaatttctcccagtcatttaataaatgtgccttcattttttcag

SEQ ID NO: 9988 - DNA, 485 bp, Homo sapiens
ctatatcactattcaagatcatcttcacaacatcacctgctagccacgtgggatgtttgaaatgttaagtcctgtaaatttaagaggtgtattctgaggccacattgctttgcatgccaataaataaattttcttttagtgttgtgtagccaaaaattacaaatggaataaagttttatcaaaatattgctaaaatatcagctttaaaatatgaaagtgctagattctgttattttcttcttattttggatgaagtaccccaacctgtttacatttagcgataaaattatttttctatgatataatttgtaaatgtaaattattccgatctgacatatctgcattataataataggagaatagaagaactggtagccacagtggtgaaattggaaagagaactttcttcctgaaacctttgtcttaaaaatactcagctttcaatgtatcaaagatacaattaaataaaattttcaagcttcttt

SEQ ID NO: 9989 - DNA, 287 bp, Homo sapiens
aaacgatgcagatgcaagcctgtatcagaatctgaaaaccttatataaacccctcagacagtttgcttattttattttttatgttgtaaaatgctagtataaacaaacaaattaatgttgttctaaaggctgttaaaaaaaagatgaggactcagaagttcaagctaaatattgtttacattttctggtactctgtgaaagaagagaaaagggagtcatgcattttgctttggacacagtgttttatcacctgttcatttgaagaaaaataataaagtcagaagttc

SEQ ID NO: 9990 - DNA, 120 bp, Homo sapiens
cacttgattgaagattcttttaaaatactatcagttaaacatttaatatgattatgattaatgtattcattatgctacagaactgacataagaatcaataaaatgattgttttactctgc

SEQ ID NO: 9991 - DNA, 422 bp, Homo sapiens
tcattttgtactatttactccacatacaatgtaagtgcttttaatggctgttttcctttttctatttaaatcctctctacttgactcaggggctcacaaggtaccattatatgcaaaagtactgtatattttcctaaattgaagcttgtaaggtaaaactgagcagttaggatgtaaatatacataagaacttttggttccaaatgttaaaactgccagcatctcacggcaccttattttttatttttattttttaaatcacatgcatgttaggaaactccaatttctcttgcatggagactcctatttactgcttttactaaaccagtacttcgttatgaaaatgccttccacgcaaataagaaaccaagggataaaactgttcatggatgcaactcaaattcagatgatcctcaactcat

SEQ ID NO: 9992 - DNA, 21 bp, Homo sapiens
aagccggaatcaccagctttg

SEQ ID NO: 9993 - DNA, 1944 bp, Homo sapiens
taacttctttagaaaaaaaaaatgtaatgaatgttggcacacacacataaaacctgctacatagggaatagagcccctttccagtagagtttaaattgcaaagggtactggggaagatgacgattaagttgcatctttagagtcagggtagatttggaggaaaagtgcatcaaatgagagcttctgatttgaaagccccagatgacagaaagcatatgtggatgctcagttctgttcaagctagacaacactcaccaaggagcaaggtgcaagtgtgttgatttcagaaggacatgaacctcgtgtgttgattccattctgctgttctcgagatttagttgctgtcaagtgcctggagtggtgctttattttttgtttgcctcacaattacattggtggcatgtgctaatataaagagctttaacttcaaacattattggactaaagagatgaacagttgtgttatgacagaaaaccagatttttgccattttaagagcaacagtattcctcaatcctgtctgttctgcagtattaagctaagaacaggtaaaacagggtaacggtaatctggaccttaatttctgcagttcatttcttttaatgttcttgtctgcaaaaactcaggaaagtgattgtgatttgtacagtacctcaaaggaatgtgttgaaagcactatgtactgctgagagtaataggataggcttcaatgttactttatattaaaatgtatgtttacctcaacaattggaaaatagcaaggaaaattactttgaatgtatccagaaaaatactgaagtgtgatacaactgaatatttacagtttaaagtagaaatggaaggatttttttaagttcttttactaattatggggaattaaccagagcagaataattctttatgtcaataactgcaagagttcttagtacattgctccttgataattaagtgaaaatgttcttaaaaggtacactggttaattgaaagctacttattcagtttgtgttagtgtctagacctgtcagccacaagacctgtttaggaccctgaaagtcacagtacctaaaaactatgactgcctttttattgcataggtggtagtggtggtgatggtggtggtagtttgcaagttatctcttaaaactgctgggaatggtgtcattctattcactaatctagcttatagacttgccgtgctgtttgatagaatgcagaggatagcaaccaaaacaaatacacaaataaataaaaacaaaaaccaaccaacaaaccaacttacatacacatatatatatccacaaagaacctctccatctcctccccttctttttgactccactcttgtcagtgcaattttgcttctcattttgaaatctgggctgtagtgctcctgctttatttctacctcagttttgttacatttctcttggaaagtaaagtagaaaattggaagtggacacacacactgcaatgtagcttgccaaacatgttactttgttttcttccatctttcaccgtaaatctagtttccaaagacatcagcatttgtgcttacttccacctcagtctaccagccccacccctacccatggcataagtggcatttttcttaatttcctatttttctcctgctctctgtcaagttgttctttgtatcctttaatgctttatgtgcaacctttcattgatagtgggctgatgtttggcaatgcttctgaactgtcacagagcaggctgtagctttccacagccactgcccatgcataagcagaacagcctggccttttgaatgtattttcctgggttttttccccttttctttttttagtttagagatgcagtaacaaaactgttgcaaagcactggcattttatgtattcaataaataagtgatgtacatttttaaaaaaatttaaataaatgcaatgagaagccccaagaaag

SEQ ID NO: 9994 - DNA, 213 bp, Homo sapiens
acaagccagaagtgacttattaaactattgaaggaaaaggactcaagaaaaataataaaagaccataaataagggcgaaaacattaccatgtgaaaagaatgtatttcacctgcaagttacaaaaaaatagtttgtgcattgcaaataagcaaagacttggattgactttacattcatcatttaaaattcattagttaaaattaaaccttagg

SEQ ID NO: 9995 - DNA, 1196 bp, Homo sapiens
atgttaccctgccacaccactgcacttcacttccacttcagaccaacttcatactaatggaacattttggcaaatgtatattcagatgtacactaatatattatctattaaaatattagaatttgtgttgtggcttttaatgccagaagaaaagttaccagaatttataatttatagtaattttttgatcttttttttgccttaagagttgaatatgctgctttagaactttaaaacaaggtgtaaatgattttcattttttacaaatgaaaaataattcctttgtattgatttcacttaccagcacattctctacaatggtgacttagacaaaagtataagattcatagactttatatttgtatgacatacaactaggacaaacatagatatgacatttgctgcctcagtgtagcaattggaaatatttataagttatatgaaagcctgttttgggctgaaagaatgatttagaaaactagtgataccaaataagtatattcagttcaataattattttcaatgatgaatcacttagtgtgaaagacttgccttgtgtattctttatgtaattacaaatcactgtcaattttatgggaagctcatagtattttaatattttattaacatggaactcttgtttttttaatctttagaacttaaattctacaagaattttaaatattttctgtatataattatgacattgtcacacagaaattacacattttatgtgccagaagccttaaacatctttctgtgaaaatgctgatatattgtgacagttatttcacatttgatatgtagagaggaataggggttagtttatgtttatattgaaaaactttaaagactatttggaagttccagaaattctggttttaattcaagtaaaatgataaaatagtcattatatagttcagatgctaatattctaagtaataatatatatttacattgaagctaaaactgttaagcaaaacaatgcccatttgtcggcttacagctcttccggagtctagagcctgttggtgttctgtccctactttaagaatttaattgctcacttattctgaaagctttgttcaaacaagatgatattaaatttgttttcactaaaactactgggatatctgcctcttggggatttttttttcaatttaataaaagcaagttgtatatttggggtgcttttt

SEQ ID NO: 9996 - DNA, 135 bp, Homo sapiens
gttgactgctttaaaaatatgtatgttttcatagactttaaaacacataacatttacgcttgctttagtctgtatttatgttatataaaattattattttggcttttatcaagacttggcttttatgagtagtgc

SEQ ID NO: 9997 - DNA, 2630 bp, Homo sapiens
aaagaaacaaagaattatctttgtgatcaattgtttacagcctatgaaggtaaagtatatgtgtcaactggacttcaagaggaggtccatgccaaactgactgttttaacaaatactcatagtcagtgcctatacaagacagtgaagtgacctctctgtcactgcaactctgtgaagcagggtatcaacattgacaagaggttgctgtttttattaccagctgacactgctgaggagaaacccaatggctacctagactatagggatagttgtgcaaagtgaacattgtaactacaccaaacacctttagtacagtccttgcatccattctatttttaacttccatatctgccatatttttacaaaatttgttctagtgcatttccatggtccccaattcatagtttattcataatgctatgtcactatttttgtaaatgaggtttacgttgaagaaacagtatacaagaaccctgtctctcaaatgatcagacaaaggtgttttgccagagagataaaatttttgctcaaaaccagaaaaagaattgtaatggctacagtttcagttacttccattttctagatggctttaattttgaaagtattttagtctgttatgtttgtttctatctgaacagttatgtgcctgtaaagtctcctctaatatttaaaggattatttttatgcaaagtattctgtttcagcaagtgcaaattttattctaagtttcagagctctatatttaatttaggtcaaatgctttccaaaaagtaatctaataaatccattctagaaaaatatatctaaagtattgctttagaatagttgttccactttctgctgcagtattgctttgccatcttctgctctcagcaaagctgatagtctatgtcaattaaataccctatgttatgtaaatagttattttatcctgtggtgcatgtttgggcaaatatatatatagcctgataaacaacttctattaaatcaaatatgtaccacagtgtatgtgtcttttgcaagcttccaacagggatgtatcctgtatcattcattaaacatagtttaaaggctatcactaatgcatgttaatattgcctatgctgctctattttactcaatccattcttcacaagtcttggttaaagaatgtcacatattggtgatagaatgaattcaacctgctctgtccattatgtcaagcagaataatttgaagctatttacaaacacctttacttttgcacttttaattcaacatgagtatcatatggtatctctctagatttcaaggaaacacactggatactgcctactgacaaaacctattcttcatattttgctaaaaatatgtctaaaacttgtttaaatataaataatgtaaaaatataatcaactttatttgtcagcattttgtacataagaaaattattttcaggttgatgacatcacaatttattttactttatgcttttgcttttgatttttaatcacaattccaaacttttgaatccataagatttttcaatggataatttcctaaaataaaagttagataatgggttttatggatttctttgttataatatattttctaccattccaataggagatacattggtcaaacactcaaacctagatcattttctaccaactatggttgcctcaatataaccttttattcatagatgtttttttttattcaacttttgtagtatttacgtatgcagactagtcttatttttttaattcctgctgcactaaagctattacaaatataacatggactttgttctttttagccatgaacaaagtggcaaagttgtgcaattacctaacatgatataaatttttgttttttgcacaaaccaaaagtttaatgttaattctttttacaaaactatttactgtagtgtattgaagaactgcatgcagggaattgctattgctaaaaagaatggtgagctacgtcattattgagccaaaagaataaatttcattttttattgcatttcacttattggcctctggggttttttgtttttgttttttgctgttggcagtttaaaatatatataattaataaaacctgtgcttgatctgacatttgtatacataaaagtttacatgaattttacaacaaactagtgcatgattcaccaagcagtactacagaacaaaggcaaattaaaagcagctttgtgaacttttatgtgtgcaaaggatcaagttcacatgttccaactttcaggtttgataataatagtagtaaccacctacaatagctttcaatttcaattaactcccttggctataagcatctaaactcatcttctttcaatataattgatgctatctcctaattacttggtggctaataaatgttacattctttgttacttaaatgcattatataaactcctatgtatacataaggtattaatgatatagttattgagaatttatattaacttttttttcaagaacccttggatttatgtgaggtcaaaaccaaactcttattctcagtggaaaactccagttgtaatgcatatttttaaagacaatttggatctaaatatgtatttcataattctcccataataaattatataaggtggctaattggaa

SEQ ID NO: 9998 - DNA, 978 bp, Homo sapiens
gtgttccttaaaattaagttgaaaaaggaaatattctttctcataaaactgtgactaggcatacactgtagtttttgaaaattatgcaaaagcagctaaatgtaacttattccaagtgcatttttcttatttatatctttatgtagcactactacagaaattctgcaagtttctgtttcaaagcacaataactagtaataccaaagactatttcaaaatgtccagatgtaggggaagagatgtttacagtatgatgaaaataattttccaagtaaagtgatgtttgtgtgttttgtacacttagggatatatatatatagctacattcacacactcacaatttaaaatatttcccctagttttttggggggataggaagaaagatttgttactgtatttttttaactacataaaaatagatcaataaatgtcagcattggcctctgtgtacaaaccaagagcttttacagatccagaatttattagtttaaaatgcaggtgaacttttttttgcgtttggtttacttgtctgtcaaatgtttccttaaacatgaaactgaataaggagaagagtatttttaacacttaaatttcttggcaaattttaaaacattttttagtctgtaatacactccacttgaagcacttaagtcttccttaaatgacttttcttaagtaatgatactgtgtgttttcccaaagcacttttaaaaaaatttttataaattactatctgttgaaaaggtgtccttttcctttcttctagtatttttttcttaccaaaattcactaatcttgaatgtttgtgatattaaatttcaaatgcagaatacttgactcatttaaagctaaattttgttactgattcaattataattgtaatggatttttgactttgtaatggattcttttcatcaaaaagccttatttttttatctatgtggaaaacacaataaaaaatcctcaacactattgtaa

SEQ ID NO: 9999 - DNA, 811 bp, Homo sapiens
aaataattttaacttaggtgttggtttaacaggaaatgaaagaaatctaactttcagttcttcctgttcaaaacaggtttgagctcagtgctttgttattagaagtatacccttttttctccagcagaggttgctgctgtacatcaagagaagtactatgtgaaattggtgtttcctaatggagttgaatgagagctggtctatttgactctgttttgattgggtacagatttggtgactctgtggtaaagactataattatttctataaagaatattttgttaaaatctaggtaattaaataccctgtatcttttctaaggaatattatttcaggaaatatatttaaaatgcattgttctcttttaaagtgtttttgttatattcttttatttatttatttatttttaaagacagagccttgatctgccgcccaggctggagtgcagtggcacgatcttggctcactgcaacctccgcctcctgggtttacgcgattctcctgcttcagcctcccgagtagctgggactaaaggcatgtgccatcacacccggctaattttttgtatttttagtagagatgggatttcaccgtgttagccaggaggggcttgatctcttgaccttgtgatccacctgcctcggcctcccaaagtgctgggattacaggcatgagccaccgcacccagcctgtttttgttgtattctgtgttgtttcaaaaattggaataaatctccctgtaaataactcatgaaaaagacaatatatatattttaaatatatattttaataaaggttttataaatagatg

SEQ ID NO: 10000 - DNA, 2084 bp, Homo sapiens
atgaaaataaataaaaataattgggtgacaaattgtttacagcctgtgaaggtgatgtatttttatcaacaggactcctttaggaggtcaatgccaaactgactgtttttacacaaatctccttaaggtcagtgcctacaataagacagtgaccccttgtcagcaaactgtgactctgtgtaaaggggagatgaccttgacaggaggttactgttctcactaccagctgacactgctgaagataagatgcacaatggctagtcagactgtagggaccagtttcaaggggtgcaaacctgtgattttggggttgtttaacatgaaacactttagtgtagtaattgtatccactgtttgcatttcaactgccacatttgtcacatttttatggaatctgttagtggattcatctttttgttaatccatgtgtttattatatgtgactatttttgtaaacgaagtttctgttgagaaataggctaaggacctctataacaggtatgccacctggggggtatggcaaccacatggccctcccagctacacaaagtcgtggtttgcatgagggcatgctgcacttagagatcatgcatgagaaaaagtcacaagaaaaacaaattcttaaatttcaccatatttctgggaggggtaattgggtgataagtggaggtgctttgttgatcttgttttgcgaaatccagcccctagaccaagtagattatttgtgggtaggccagtaaatcttagcaggtgcaaacttcattcaaatgtttggagtcataaatgttatgtttctttttgttgtattaaaaaaaaaacctgaatagtgaatattgcccctcaccctccaccgccagaagactgaattgaccaaaattactctttataaatttctgctttttcctgcactttgtttagccatcttcggctctcagcaaggttgacactgtatatgttaatgaaatgctatttattatgtaaatagtcattttaccctgtggtgcacgtttgagcaaacaaataatgacctaagcacagtatttattgcatcaaatatgtaccacaagaaatgtagagtgcaagctttacacaggtaataaaatgtattctgtaccatttatagatagtttggatgctatcaatgcatgtttatattaccatgctgctgtatctggtttctctcactgctcagaatctcatttatgagaaaccatatgtcagtggtaaagtcaaggaaattgttcaacagatctcatttatttaagtcattaagcaatagtttgcagcactttaacagctttttggttatttttacattttaagtggataacatatggtatatagccagactgtacagacatgtttaaaaaaacacactgcttaacctattaaatatgtgtttagaattttataagcaaatataaatactgtaaaaagtcactttattttatttttcagcattatgtacataaatatgaagaggaaattatcttcaggttgatatcacaatcacttttcttactttctgtccatagtactttttcatgaaagaaatttgctaaataagacatgaaaacaagactgggtagttgtagatttctgctttttaaattacatttgctaattttagattatttcacaattttaaggagcaaaataggttcacgattcatatccaaattatgctttgcaattggaaaagggtttaaaattttatttatatttctggtagtacctgcactaactgaattgaaggtagtgcttatgttatttttgttctttttttctgacttcggtttatgttttcatttctttggagtaatgctgctctagattgttctaaatagaatgtgggcttcataatttttttttccacaaaaacagagtagtcaacttatatagtcaattacatcaggacattttgtgtttcttacagaagcaaaccataggctcctcttttccttaaaactacttagataaactgtattcgtgaactgcatgctggaaaatgctactattatgctaaataatgctaaccaacatttaaaatgtgcaaaactaataaagattacattttttatttt

SEQ ID NO: 10001 - DNA, 3485 bp, Homo sapiens
agcttcatttttgatatattgtttacagcctgtgaaagtgatttatttgtgttaataaaactcttttgaggaagtctatgccaaaatcctttttatcaaaatattctcgaaggcagtgcagtcactaactctgatttcctaagaaaggtgggcagcattagcagatggttatttttgcactgatgattctttaagaatcgtaagagaactctgtaggaattattgattatagcatacaaaagtgattcagttttttggtttttaataaatcagaagaccatgtagaaaacttttacatctgccttgtcatcttttcacaggattgtaattagtcttgtttcccatgtaaataaacaacacacgcatacagaaaaatctattatttatctattatttggaaatcaacaaaagtatttgccttggctttgcaatgaaatgcttgatagaagtaatggacattagttatgaatgtttagttaaaatgcattattagggagcttgactttttatcaatgtacagaggttattctatattttgaggtgcttaaatttattctacattgcatcagaaccaatttatatgtgcctataaaatgccatgggattaaaaatatatgtaggctattcatttctacaaatgtttttcattcatcttgactcacatgccaacaaggataagacttacctttagagtattgtgtttcatagcctttcttctttcatatccctttttgttcatagaataaccacagaacttgaaaaattattctaagtacatattacactcctcaaaaaaaacaaagataactgagaaaaaagttattgacagaagttctatttgctattatttacatagcctaacatttgactgtgctgcccaaaatactgataatagtctcttaaactcttttgtcaaattttcctgctttcttatgcagtattgtttagtcatcctttcgctgtaagcaaagttgatgaaatccttcctgatatgcagttagttgtttgaccacggtacatacttgagcagataataacttgggcacagtatttattgcatcacttgtatacaatcccgtgtttggcaagctttcaaatcatgtaatatgacagactttacacagatatgtgtttagtatgaataaaaaagcattgaaatagggattcttgccaacttgctctcttgccaccaacttactttcctaaattatggaagtaatcttttttggatatacttcaatgtatacaatgaggaagatgtcaccttctccttaaaattctatgatgtgaaatatattttgcctcaatcaacacagtaccatgggcttctaatttatcaagcacatattcattttgcattagctgtagacatctagttttttgaaaacacctattaatagtaatttgaaaagaaataaccataatgctttttttcgtgagtttatttcaggaatatgagatctttcttctataaagttattcatgcacaggcaaaaattgagctacacaggtagaatgtagttttacttagaagatttttgtgggaggttttgaagcaaatatataaaacaactttcactaatttgctttccatatttaaaaaataataaattacatttatataataaatgtttaaagcacatattttttgttgttctggcaatttaaaaagaaagaggatttaaacgtacctatagaaacaaagatttatggttaaagaatgagatcagaagtctagaatgtttttaaattgtgatatattttacaacatccgttattactttgagacatttgtcctaatctacgtataaaactcaatctagggctaaagattctttataccatcttaggttcattcatcttaggctatttgaaccactttttaatttaatatgaaagacaccatgcagtgttttccgagactacatagatcattttatcacatacctaccaagcctgttggaaataggttttgataatttaagtagggacctatacaaaatatattacatttatcagatttttaaatacattcaattaagaatttaacatcaccttaaatttgaattcaatctaccgttatttcaaactcacaaatataactgcattatgaatacttacataatgtagtaagacaagatgtttgacaggttcgtgtgtaattttctattaatgtttttacattgccttgtttttatgtaaaataaaaaatatgggcaactggtttgttaacaacacaatttcttcttagcatttcaaaaatatatataaagttgttctttttcctatttcatgaactatgtttttttttaaaataacatggttaagttttatatatatttacgtttgtttcaggaatgtctacttgtgactttttatcaattaaaaataatatttggaagaaagagcttattaagtataagcttgaagtaaaattagacctctctttccatgtagattactgtttgtactgatggtttcacccttcagaaggcactgtcatattaatatttaaattttataatcgctgaacttattacacccaacaatacagaaaggcagttacactgaagaacttaacttagaataaaatggaagcaaacaggttttctaaaaacttttttaagtgaccaggtctcgctctgtcacccaggctagagtgcaatggcatgatcatagctctctgcagcctcaactctgggctcaagcaaccctcctgcctcagcctcccaagtagctaagactacaggtacatgccaccatgcctggctaatatttaaatttttgtagataaggggtcttgctatgttgcccaggctagtctcaaactcctggcttcaagtgttcctactgtcatgacctgccaacatgctggggttacaggcatgagccaccatgccccaaacaggtttgaacacaaatctttcggatgaaaattagagaacctaattttagctttttgatagttacctagtttgcaaaagatttgggtgacttgtgagctgtttttaaatgctgattgttgaacatcacaacccaaaatacttagcatgattttatagagttttgatagctttattaaaaagagtgaaaataaaatgcatatgtaaataaagcagttctaaatagctatttcagagaaatgttaatagaagtgctgaaagaagggccaactaaattaggatggccagggaattggcctgggtttaggacctatgtatgaaggccaccaattttttaaaaatatctgtggtttattatgttattatcttcttgaggaaaacaatcaagaattgcttcatgaaaataaataaatagccatgaatatcataaagctgtttacataggattctttacaaatttcatagatctatgaatgctcaaaatgtttgagtttgccataaattatattgtagttatattgtagttatacttgagactgacacattgtaatataatctaagaataaaagttatacaaaataa

SEQ ID NO: 10002 - DNA, 551 bp, Homo sapiens
taccacttaccacctcttttcatatttcttcacatatctgaaaaatgttgaaagcctaagccaggaataaaagaaaagtagagataataatcagttctttacaaccgatggtaattaagcttgtattcacaagacttcatgccaaattcactttttagcattatatctaacaaatcaagagaatccttaatattgctgcagtgagtttaaagtgggttaaagtggccatttgacaatctcatatttgttttctctacatggcttatatgatgtgtgccttctagggaatgaagggaagtggtgatagagatcagcagcagcaggggctttcttttatattttatgtataatttaatgggctttaagtcaccactattaagacttacaaataagcaaatactttcctgatgtgggatggtgaaatgctaatggccattaaatcataaacttgcctagacaaaagccaattggaagaagggagagagcagttctttagaaagtgcctttgagatcaacctcagagattcttgggctgattaaaactgcatttg

SEQ ID NO: 10003 - DNA, 1475 bp, Homo sapiens
tgtatgtcccttgatgtcaccctgatctgtcatgccccaccgccacccctactcccttcaaccctccctctttctgcccatttcctcccaccccctcactcccatttcctagcaaaatcagaagattgtgaagaggccggcttcaacaaaatgggataaaaaaataattttttaaaacttacaacactccgagttctgctttattctctagcaatccacagtacaagaacaagcaaatgccacagctgcacgactgttgctcatttttccaaaagctatttaatattcttagcaatcaatttggatatcccttaagtgaaaagaatctgaaatacactcaggtggtcttatttattggcaacaaaaggaattttctatccagaagcctatttctcctttcattgttgttatttctgttataatactttaattgtacatctgacaatactgcctcttttatgttgtatttagaaattaatatacttataaaattaagatttattagccaaacttgaattctagttttaaaactgactgtgaattttatttttcatatatttatgcattacacaccttagctataagaaaaaaagggttttgattatatgcttcttgcagttaatctcgttatttaaacaaaaagttttgggtctgtctttggagtatttgtaacttctaaattttgaaatgactgaattaggaatttggatgcttattcttttagtctgtttgcctaaaaaccaatttacaatctgactgtctcttgggagagggaggtgccttgcaaactttcacattaagaatgtgcctgaggctgctttactctggaatagtctcagatctaaaatttcctctatataaggtggcatatgttaagttttgcttcattggaccgtttagaatgctatgtaaaatgttgccattctgttagattgctaactatatacccatctctgatttggctctccttaagtgataggatttgttattctaaaggtgataaacttgaaaatatcagaatctgagttttacttgaaattttgcagaatacccaggtggagtgaaaattggaagggttttgtgcaatgactaaaaggtaaaacgctgttaaggttcaagaatcaatactttcaacccaagtagccctctgcttgactgtatattatggaactagtaaaccttaggattttgaaaattggagtctaatctttcaaggaggtgggctcccaggatggtaccattgctctttcctagctaaccctagatatggcagctctttaatgtacttcaaaaagcaaatatatattactaaggaaaaaaagttatttataattgccttgtcataattgttaaggtgttctagagccatttgcatacaatttaatgtaatttcattccattctattgtttacacaacgattactcgaagatgactgcaaaggtaaaaggaaaataaaagtgtattgcacaatgag

SEQ ID NO: 10004 - DNA, 539 bp, Homo sapiens
catacaaatagtgtatataaaaacggtttatttttcttctctattacatatctctttttttcttgtttttattattattatactttaagttttagggtacatgtgcacaatgtgcaggtttgttacatatgtatacatgtgccatattggtgtgctgcacccattaactcgtcatttcattaggtatatctcctaatgctatccctcccccctcccccaacccacaacagtccccgttgtgtgatgttccccttcctgtgtccatgtgttctcattgttcaattcccacctaggagtgagaatatgtggtgtttggttttttgtcctttcgatagtttgctgagaatgatggtttccagcttcatccatgttcctacaaaggacatgaactcatccttttttatggctgcatagtattccatggtgtatatgtgccacattttcttaatccagtctatcattgttggacatttgggttggttccaagtctttgctattgtgaatagtgccgaaataaacatacgtgtgcatgtgtcttt

SEQ ID NO: 10005 - DNA, 683 bp, Homo sapiens
cccaatgcaagaatctcagacacacatgacgcaccagttacaggggttgtttttaaagaaaaaaacaatcccagcaggagggattgctgggattgttttttctttaaagaagaatgttaatattttacttttacagtcattttcctacatcggaatccaagctaatttctaatggccttccataataattctgctttagatgtgtatacagaaaatgaaagaaactagggtccatatgagggaaaacccaatgtcaagtggcagctcagccaccactcagtgcttctctgtgcaggagccagtcctgattaatatgtgggaattagtgagacatcagggagtaagtgacactttgaactcctcaagggcagagaactgtctttcatttttgaaccctcggtgtacacagaggcgggtctataacaggcaatcaacaaacgtttcttgagctagaccaaggtcagatttgaaaagaacagaaggactgaagaccagctgtgtttcttaactaaatttgtctttcaagtgaaaccagcttccttcatctctaaggctaaggatagggaaagggtggatgctctcaggctgagggaggcagaaagggaaagtattagcatgagctttccagttagggctgttgatttatgctttaacttcagagtgagtgtaggggtggtgatgct

SEQ ID NO: 10006 - DNA, 1554 bp, Homo sapiens
ctataccagctatttagggaataattagaaacacacttttgcacatatattttttacaaacagatgaaaaaagttaacattcagtactttatgaaaaaaatatatttttccctgtttgcctatagttggaggtatcctgtgtgtctttttttacttatgccgtctcatatttttacaaataattatcacaatgtactatatgtatatctttgcactgaagttgtctgaaggtaatactataaatatattgtatatttgtaaattttggaaagattatcctgttactgaatttgctaataaagatgtctgctgatttggttggtgatcattatagtaaatgatccaacaagaaaaggaattgactggggacctttagccgtgtctaaagaagaggcaccactcatatttcctataaaattatctaggaaaggaatccaggccccgctcttgggtccatttttacacattagcacttaattaatgttcaatattacatgtcaatttgattaatggctatgttgataggggccactatgtgttgtatagacatctggacttgactgtagactcctcagataatacagaaggtaggaaaagcaattcagtttggcccttctgtgtgttggcattgtctaaccagaactctctgtttcatgtgtgttctctcactagctgccaagacaacatttttatttgtgatgtctatgaggaaatcccatatcattaagtgccagtgtcctgcattgagtttgtggttaattaaatgagctcttctgctgatggaccctggagcaatttctcccctcacctgacattcaaggtggtcacctgccctagtagttggagctcagtagctgaatttctgaaaccaaatctgtgtcttcataaaataaggtgcaaaaaaaaaaaataccagttaagtaaagcctcaactgggtttttgtttctatgaaaatatcattataatcactatttatttcctaagttgaacctgaatagaaagggaaaccattcttattaagctttttattaggccctgtggctaaatgtgtacatttatattagaatgtactgtacagtccagatcttttctttaattcttattggttttttttttttttttttttttagagatggagtcttgctatattgccaaggctgatcttgaagtcctgggctcaagtgatcctcccacctcagcctcctgagtggttggggttacgggcgtgagccactgtgcctggcttccagctctcctcttaaatagtgggtatagtctgcacaacaggaaccatggcaggaatatacactttcccatagcaaatagcatacctgactctctgtgctaatattgcacatttgttaaacaatgaatgaatggatggatggatggatggatgaatgaatgaaacatatactactgattattttattccagagttctcaaaatatttgttgctgatattttgagtgctgactgtaattactttgattagataaacaactggaaataatgctgctgaaaaagttctaataaatgtgtattttatcaga

SEQ ID NO: 10007 - DNA, 67 bp, Homo sapiens
tttttatttaaaatgaatgttatcgtgtgttacatttggacctattttaataaagtggcctgtctca

SEQ ID NO: 10008 - DNA, 60 bp, Homo sapiens
aagccccgcaaacaaaagtcgtttaaaacctatttaaaatgaataaaaaattggtttact

SEQ ID NO: 10009 - DNA, 1720 bp, Homo sapiens
ctttcctccaagattggcatgatatctttgaatttgcttccagatgcacacttaagtttgagagcatttgagtgtttgttttctttttcttttttttttttttttttttttacacaagacgtggttaagaactgtttgtgaactgaagttcctcatagtgtcatttgtatgagagaggatcatggacaatgaataaatgcacacttctgactataattttgagcagtgaaggaaggatgactgcctgttacacagaaacaggaataccatgttaagatagaggaaaaaaattttgtttatttgggggaacactgtaaataacgtttataatacttaaatacatttggttgttactagagagttctaatatgaagggtagtttttcattatttaaaaacacatggaaaaatatgagacatatttctaacatacgaactatagtgcctggatacattcttcagcatttggcagttaatctgctgaaaccaaagtaagaactgaatgacagtgacagttgtgttttatagtaatagaatgtgagagttagaatctttggacaaagttaggctttgtcatttgcctattcagacttttaccaagttgtacctcgagatcacatgtccgttttctttcactggttatattaaagggagagctattatttctaaatactttacacctttgacaaaatgagctgcttgtgttgaaatcagttgaattcactaaattataatattgccagtgttttcaacacgttagaattgataacaggtatttttcttttgttaccaggccttgttcatcaaaacaggtgacagtgagtaaccaaatgcagaccagttctatgcaggataatgataaattcccttctagctctattgtaaattgttgtacagatgtcatatttcaattactaagtttcagcagcttattcttgtacaaatgtttaaaatatggcttttctaattggatattgtattttttttaagtcttcttgaaggcactctaattgctgctaaatgatgttgcttctttgctaaaaaattaaatgacctagaaggtgcaagttgactgtacatcatagatattaaaaagcagacagtcattaacaatcaagatgtaaaagtgatccatgttggacataattgagtttttaaatcagtttattgggttctagggctgtagaacacatagatactagatttttaatttgttcatggttattctacatttctagaaagttcttatcagcaagatggtcccataagcaaatttcttgtggtttgtacagatttgttaaaatgtgaacgttttctaactgcctcgtagggtagaaaccaatatttttcaggatgctgtatttcactcctgtaaggactttttctttattgtcacattcataatgctgatacttacatgtaagttgttcatgttgcagaaaaaggttatacgtaccacggattctctttaatattgtacagttaaactgtatttctgatgttgcaagccattttgttttttcattgtacatagacacattgtctctttaaaatgctgctgaaattgtagagagtatagccaaaacagtaataaacaatgacagttaaaatgtaaagactatgaaaattacattggaagggagctttcaagatggtaggatattgactaactgagctccttcacttaaaaatcagctgaataaattccttaagtatacttc

SEQ ID NO: 10010 - DNA, 1112 bp, Homo sapiens
gggaagtccacagtatgttctgcaaagccagtttagatgaaaagcaaaatctggttgatcgccgcttacaagttaataggaaaaaacaagtgaaaatgcactgagtgtggattcaaggcaaattccagaaaccattgcaccagactcagaatagctccaatatggtatctacactcctttcacaagactgaactttgtaacatgttaaggtacaaagccagaggactgtgctattcaaggactactgtaagtctattgtttctcaaaagacaatgagaaaaaaagaagagaatttgtatttcctgccgttttgtcataggtgagctcctttgtgcattttaagcacatgtaagtggttcagcacagtatgcctttttctgtgctttgaaaacttgatatgctcaagcttgtttgaatttattacatctaaccattttgcttgttccttgatttttataagcattcaattaagttagtattatgtcaagtaattttgagaaaatgtaacttgacattttttgcaagtaaaaaaaattgtttatttgtttaggcttagtaaaccagttcccaaacacagtcagactcttcccattgtcatctgattgcagagagaaagcacaccttatttccagggaaagctacaacaagcccaaggtcaaagtgtattattttttgtcttgttgttgtctattttctcccaatttttttttgaaattcagaggctcatatctgaaatagaattttagttcctctttcctttcctaaaattggggaagtacagcccatgctgacattattttcaggctattcttagatatacaagttgttaggccaggtgcaatggctcgcacctgtaatcccagcactttggggggctgaggcaggcagatcggttgagctcaggagttcaagaccagcctggacaacatggcaaaaccctgtctctcccaagaatacaaaaattagccaggcatggtggcacacacctgtggtcccagctactcaggagactgaggtgggaggatcgcttgagcctcggaggcggaggttgcagtgagctgagattgtaccactgcgctccaaactgggtgacatggtgagaccttgtctcc

SEQ ID NO: 10011 - DNA, 903 bp, Homo sapiens
tgagacaactgttgagtgtggcaaaatggcgccttgaagaaagaggcctaggagagcagccctgtaatgtatccagtcagctgcatggtactgactgagctgaggagtcaaactcttctttctgtatgacatatacatatacttgtttataaaataatcatttgcccagggaaaaaaccacaacgctgtttcaagctttagtcttatgtgttgaaatgtttttgtaagccttggcatgaattagtgttctagactctgctttgcacagcttgcacttacagtgattgtacatattgtacatctttgtacagagacatcttggcacctcatcccaacaaatcacatttgtagaaatgtaatgcggttctgagtggcttgaaatgtacagaatgttttgaaagtgttttattaagaatcacacaaaaataaatgtattaaaattaaattcattctcttattggtgacttatggaaataaagcatcaatattggatgtatttaattcctagtttgttttccattctggaataaaaaggtatttgctgataaaaggcataacgagacatagtgctgctaccactgaataagtgatactttggaaagatgcatgccagtggatgccagaggaccaggctaatgacttgtgtgtgctgatgtgtttccatttgtatttaatgtgtgtagaccctcctctgttcatcaatcaaaaagcatttcctaggcagctcctcgcctgtcagtgtgcatatggaaacagggacatctccatcattactggcttagttttgctttcctttgacacagtaaggcaaaggccaagctttcaaaagagtaaaggatactttcacaatttcccttcatatggatatgattccagtcaaaaataaaatgcacaccaaaatgt

SEQ ID NO: 10012 - DNA, 1104 bp, Homo sapiens
ccccagggagaactcgccagagactgagagcagagaccacttatcctcattgcttaccccgagccggggttccctcctcccggcccgctgccgccacccacctctcctgcaggctgcgacctgcagtggcccgtctcaggccctgctcactcccggggccaccaaacgggcccctctctcgggggaaccggacagcagcttggcaaaggcctccctaaaaggccgcatttctgacctgagccccgggtctcggctgtttcgagccccgcctcggacttgccttccctcccctccgggtgagcctgtctggcgccttcctcgccccgggctgagagctgggtcccgggagatggaagcctcccaggcgcgcgaggcttcccgggcgctctgaggcttctttctcctcgcccgctcccctgggctcagctcggacgctgcagttattgacctcccggtcccgcctgcccgccctcccccacgtggccccttgacccgggcggccccgccgcttctttccttcctgcagttcccagccctcggagcccccatcccttatcttacccccaccgcgctcccccaggagcgctccctcagctctctcctcatccatcaccagtggagtttttttatttgttatttttttaaaagtttaggtgcctttgcggatgacctcattttgacgttgaaaaaatgattttttaatatgtgaacactgcaaaaatgtgtttaaattatcttttttaaaacctattcaggattattagcctggacttggacacagagtttgtaaataaaggtgtctgtgcagattttcccactgatttatttgtataaaaatactcatcttttcagacttttttgtaaacccccagttgtgaaaactgcagtttagcagtgacctcagcaacccctcctttttattttttcctttaaaaacatttcagttaaattaagctactgatttggatttgttttatcgtatcctaaagtctttgttgttgaaatgaaaggtattttggggttatttattatgaaaacaacatgctcttaatgttgattttacaatatgaagagattatttaaataaattattgttttcattgg

SEQ ID NO: 10013 - DNA, 1410 bp, Homo sapiens
atattacacaaatacttattcattgtggttatttttatacagtagtgagaagaatattgttcctaagttcttagatatctttttattgatgtgcaaaaatttttggattgacagtaacttggttatacatgacactgaaatgccttactttgtatgatattccatagtatattaaaaatggtaaaattgcatgggttttgtaggtacttttggaatctagaagaaatgaaattttaccaagttatataaagagaaaattgaatttaacaatgcgaatggtagtctaaccaaatgcatcaatcctgtgtggtttagtgtaaaaatgagaacatgttggtatttatctattgtaagataaaaaagctggtgggtgaaagaaatcatgttatgataaaaaattttgtaattttcttgatgactggaatttttattatgcataactgacaaatcaagtttccaagcaaatgttacatagtgtaggctttacttagcttatcaatttgtcattttgaagctaattattttaattaggttaactatgtacaatattttaagcattactcttgtaagattttgaaaactacattttaacatggaactctagggatagtcaccttttaaatcctgttgaaaagccatgtttaagatttaatttgccaaaataatgtcttgttaatattctttcaataacgaagttgggcaatataaccaatgtttaaaaaagtttaaaatgtataagttgaggcatttgggtggtaagagaatgttatagtgaattatcccttttcttgactattggaggaccaaaaaaataaggtgtattgcgtcttagcagtgatttttatccaatcttgtttccaaaaaccatgtctcccagggccttaaaagccatcatgtaaattaccagtaaagtgtaacatatgcaaacataacaaaatcacttccatagtgacgatactccaaccatatggatattagtcatagaagaactagaggttttatgatatttttttaagtcttttttttttttgtctaggtagtcagtctgcacttaaatatcaatcattttccttttttgcttcttcccttaaaatttatatgtatccagtacatttaattgagaagcgtatgttttttattatgctgtattttctttttattttttaattattgtttatattttcaattcaaaaatgtacaaaataaagttacattgctggtcttgtaagagctatacagttttcctaaatgtatacctgtaactgcagcagttcacctatttcaaaaatttggaattctgttcatttgttattcttaagaccacctcaaatttaaaggctaccttattgtacgtttaaagtgtattataacagtgtggtagttaataaaacactatttttttttcttttg

SEQ ID NO: 10014 - DNA, 2978 bp, Homo sapiens
aatttagttattgctcagataaacatacaacttccaaaaggcatctgatttttaaaaaattaaaatttctgaaaaccaatgcgacaaataaagttggggagatgggaatctttgacaaacaaattatttttatttgttttaaaattaaaatactgtgtacccccccccccccatgaaatgcaggttcactaaatgtgaacagctttgcttttcacgtgattaagaccctactccaaattgtagaagcttttcaggaaccatattactctcatgatacttcattaatctccatcatgtatgccaagcctgacacatttgacagtgaggacaatgtggcttgctcctttttgaatctacagataatgcatgttttacagtactccagatgtctacactcaataaaacatttgacaaaaccagccttggtgtgtttggggatgtctgtattgactgactgtggtgtgctgaatgcgatacggcacctggtggttgctgattacagaattttaaggcgtgtgtatgacacagtaactggcagtgtggggcagctgcaattgtatcttaaaagtgagtctttcatgggaatcagaagaatagtataccagggatttgtctcaaaaaagttaattaatttatagatcaacatttattgaaagatgatagcaatgatattatgagggatatgagataggtgactgaccacaaagaagaaaattctgtctcaaaaattaaagaattttgtttgttattgttgttctgaccatattgaaaagaggttcacttttaatctttcctttgaaattattaaattgtaaaaactgacccattgatgtctggtgggttatgttttgcttcaattcagcaatgtgtataaaagttcctacactgattttgaaatactaagatcagactttgaaaattttaaaaattctttcattcttacttttcagatatttgagagcagtcgaagtggtagtatgggtaagttaagcacttcttaacattgtagcagaaaattccaaaagaaagactagaacaaattggtaatttggagaccctttgccacttagccttctcttgtgatgatggcctgaaagctctctcggccctgagcctccctttctctcccatgtttccattcctgtgagacctcccttccttgtccttgtcctctgcccttttgtgctcttctgtgatcacaggaccatttccatggaatgcagattcatacccagccagcctttgcctctactgtatcgctttgggactttaaagatgcagaagtattagaacacacacaaacttaaaatggaaagttaccaaatgtagcactagaggcaagaaaaggggtgattttttaaagatttggctatacttaagatatttaaagaggatgaggttgagtcgtgagtataatttagaagctctccagtgagtatttttttagtatcaaatagtgatcttcttttgctaacataaaaatgagtaaactacagcagagaaataagaataaaactaatgaagggttttttaaaagaactaaataaaacaaataaaactaggctacaggtatagctgaccaagtttgctgtgaaaaatccttgttatatctatttctgtattggagtaatgtgtagattagtggattgttagggatttcagcagtataagaaagaatcaaatatcttgcttttgggtcttctccaaagtaaattgcatggacttcttaaagaagtttgaaatcagtaaaaagacattaggatcatgcaattttactttgtctagcttctaatgtggtaaattgcacattgtgcaacagaaccattaataaaagaaaggagttagttttgaggtaactgcattcattaggggctgaaaataaatgttaaaaatgtttaatttggttagaagttctacaacattgtatgtacatatacaaaatttcattttctctgaaagtcgagaattccaagaactgttacatataatcatatatatgcctatatctaaacgttttccctcctttaatattgataaagttaatatattttaggatgttatgtaaatatttttgcatgtatctgtagctccatcttaatcaaatttatggttaaaagagatttgaggccaggcgtggaggctcacacctataatcccaacactttgggaggccgaggtgggaggatcacttgagcacaggagtttgagaccagcctgtgcaacatcatgaaacatcatctctacataaaaaaatacatatatacaaaaattagctgggcatcatggcacacacctgtagtcccagctacttaggaggctgagatgggaggattgatcgatcgcttgagcctgggaggtggaggctactgtgagccatgatcatgccactgcactccagcctgggcaacagagtgagaccctgtctccaaagagaaagagaaacttgagaaggcttgtgcccaaagcttgaagaaagattgtaatagcatttagttgtgttttatcatgttatcttcataacatgcattttgcatatggctcagagcagagccggatctcccaaggaagcacaaatagtttttgtcgctaacttagttatgagtgaagcctctgttcacttataacttgccagtttcattggtggaataagtccccttactcatgattcatcaatattcctatattaaaattccagtttgatgtttgtctctagttgtctgtgtataatatttccaaagctcctttgtaaaccccgtctcctttcattcagagagtcagagacggtatctcctcctcctgcctcttctattgttctgattagtctacttaaattcacttgatgctctttttattttacaagagacttgagaaatgtcggttgttcctaatggcaaactactttagctgggaaaattcatttcaacttattttaagcttgtaaaatacactgtggtgataaaataaaagagctgggtttg

SEQ ID NO: 10015 - DNA, 345 bp, Homo sapiens
agcagaagtagagaagaaagactgtatgtgacaattacctgggaataaaaatatctccacttttttattgaatacctttagcaaggggtaaattatgtactgttgtctttctaataaaaaagctcaattttaatttttcatctctagactgtcaattcaagtacaaaactacatgagtactataagaatgaattttgcaaatatttgtaagtaagctattttggggctgtggaaatattttctgttggtaactgtttcttgttccccataccagataaaaaccgcatataactctgtgacattttctttgttctgaaacatcattaaaagaatgacagtacattg

SEQ ID NO: 10016 - DNA, 4468 bp, Homo sapiens
attatgcaggggagaaccctacatggaatcatattctagccgcgtattcattagtttttagctgggtgaccttgggcaagttaacagaggcaacctctctgagcctcagttgtctcttctgtaaaatgtgaaaagatgtgctcccaccacatgcgcagggtctgtgattttacatgtatgtaaaacacataggaagctgacttaggaaaaagagaaaaccaaattaaagttctgataatgaatataatatagtcatcctttagtatccaaggggattggttccaggactcctgaagatcccaaaatctgaggatactcaagtcccttatataaaatggtgtaggccgggcatggtggctcacgcctgtaatcccagtactttgggaggccgagtcaggtggatcacctgaggtcaggagttcaagaccagcctggccaacatggcgaaaccccgtctctactataaaatacaaaaaattagttgggtgtggtggcgggtgcctgtaatcccagctactcaggaggctgaggcaggagaatcgcttgaatctgggaggcagaggttgctgtgagccgagatcgtgccactgcactccagcctgagcaacagagcaagactctatctcaaaaataaaataaaataaaataaaataattaataaaatggtgtagtatttgcatataacctatgcacattctcccatatagtttaatcatctttagatacttataatgcctaatacaatgtaaatgctatgtaaatagttgttgttatactgtattgtttagggaataacaataagaaaaacagtctgtacatgttcactacagatgcaaccattgttaagcctgactacatctttttatctgcggttgattgaatctatggatgtggaacctgtgcatatggagggtcaactgtactataaataatacgaatatgccaacattatataatcattgctttctgcaactgtttactataatttcaaaattaatatcctattaactgttcctataaattatcaaatttggcaagtgtattactagcaggagatggaccttaaattatgacaactttatattttttgatagcatctcttgaaaaagaattttaatgattctaataagaggttctttttcttttttccatttccttgacaaatagtactcatttaaaaactagagggctaggcttagtggctcacgcctgtaatctcagcactttgggaggctgaggcgggcagatcgcttgaggtcaggagttcaagaccagcccgggcaacgtggtgaaacccggtctgtactaaaaaaaaaaaaaaagaaaaagaaaaagaaaaaagaatacccaggtgtggtagtgcatgcctgtagtcccagctactttggagactgaggtgggagtaccccttgagcctgggaggcgcaggttgcagtgaaccaagatcacatcactgcacttcaacctgggtgacagagcaagaccctgtctcaaaaacaaaaaacaagcaaaaaaaacctagaggcactatttttttttaaagtttgtcttttcttttctacccaaattactaatctatgccattaaggaaaggaataagaacctccatatgtattattatctccacagtcctgcagaagtacaatctgatctttaactttcatgctacaaataataatttgagtagattaatttgaattttatcaacaaaattattgccatatgatgtatcatttctgtgtttgaacaaagcatcgtaatgcaggataacttctactttattccctgtagttaaaaaaaaaaaaactatatagttcaagccaatatttaaaaattctaaacctaggctgggcatggtgactcatacctgtaatcccagcactttgggaggccgaggcaggtgaattgcttcagcccaggagttcgagaccagcctggccaatgtggtgaaaccccatctctactaaaaaaaaaaaaaaaaaaaaaaattagccaggtgtggtggtgtgcacctgtaatcccagctacccaggaggctgaggcaggaaaattgcttgaaaccaggaggcagaggttgcagtgagctgagatcgtgccactgcactccagcctgagtgtcagagtgagactctgtctcagaaaaaaaaaaaaaaattctaaagattacatttagaatttagtctttttaaagtgtccatgtataaaaatatataatttttaaaattactaaatgttgccttttctcttagtctaatattttagctactaaaacaaaatataaactggatagcttataaacaacataaacttatttctcacagttttggaggctgtgaagtccaagattaaggcactaacagatctagtgtctggtaaggcaaatttctggctcatagatggtaccttcttgctgtgtccccacatggtagatgggaagaactggtctcattggccccttataaggacattaattccactcaataggctccaccctcatgatctaataacctctcaaaggccctacctcctaatactaacacattgaggatgtgacttcaactttacatttctacaggcagagaagtggggctgtgtaaattcttcccatcagtacttgaatgttcatttaacaaataacttatcgagcatctagcatgttccagacacaatctgaacactgagcacacaacagttggaacaaatatgattcctatcctcatggagcttctattctcctgtgaaaaacagatgttaaacatgattgaggattaggtttcaacataagaattctaggaggacacagacatttagaccatagcatcttcaggtaaactttatcttcagtaaattaaagagatctatttagatgacctttgagcatcttaattattagatgtcagtgctagtttaacttattttaaacgtttcagatatttatttaattatactttaagtgtctcatgtaaaaaagttatttataaaataatttatagggttagagtcattgcccttttaatgcaacaaataaacagttttttaaaaacctgcatgggggccaggcgcggtggttcatacctgcaatcccagcactttgggaggtcgaggctggcggatcacgaggtcaggagatcgagaccaccctgattaatgcggtgaaatcccgtctctactaaaaatacaaaaaattagccagacgtggtggtgggcacctatagtcccagctactcgggaggctgaggcaggagaatggcatgaacccggaaggcggagcttgcagtgaaccaagatcgcgccactgcactccagcctgggcgacagagtgagactccatcgcaaaaaaaaaaaaaaaaaaacctgcatggaagcctagtatatttattaataacaaataaattatactttagtgtactattaacctataccaattttaagttgtgattagggaatggggatgtttttaagctgaattgtcttgctgcggaactttccttttttaataagaccatattatgactctgaatgctcaagggtaagtctaaggcctcattgctgttaccaggagatttttctagttacagtaataaagatgttaattcacatgcatgcagacaactgaaactcaagtggagaatttgtttgtgaacaagtcatactacttctgttatttgcatgaatggaatctgcaatatctttttccatgggagaccctaaaagaaaaccctggatcagaatgatctgcagtttcagataataaaggcttttaagagacatttttagaattaaaaatatgctaattttattaaatgaaaatatttgtaactgttaactttctcactgacaaagcaagtttctcaataaaatacctattttaacttgcattactgacatcttttctttgagtaatctgaataatgcagaagccatcatagaggtcttttctatacattctcaatgttttcttaaatgggtttcctgagttctgttcttcatgactctgggctctgcaaacagggtttcccaattacgcattctataaacacttttatgaatgagtcaatatgacattgagtccttttcatacatttcatcatttccaatatgtagagtgacagctagaaaaatgataaaattttgattaaaacctatctctttttcttcagcatagtcaattgttttcttaactctcaatgagtaactccatgcctagcttgtgcttagctttcaatatttttagactaagacaaagtgtatttggcattttgagaacaacaattaatggtcagtaaatttctaaagcaagaaaaatgtgaaactagtgttttatatgtttgttacgcagcagaatgcggctcttagtgtttgccccttcatatctcatcatgtaaaatattaaattactttaggccactgcacataggtagtcctgtcatgagtgatggctggagaaaagttcaggatcataaatgtt

SEQ ID NO: 10017 - DNA, 2972 bp, Homo sapiens
tctttgcctgctcttctctacccaagctcaagagctgcttctgttgctatctaagaactgcataccctcctccctgcttcttcccttgtgcctcatgtatgggcaggaggaaaggtgggagggggagtgggaatatgcgtgtgtgggtgggaatcggtaagaaatgcacctagcttttcatattgtgtttattctccaggctattgcttgcttcagctgcagcctgcctgtgctggctgctggggtcgataggcttttgtcgtaataggcagagatgacttgcatcccagctttccaccaaccaaattcaaacattcactgcttatttgttacagactgtaattattaaagtccctgagagctgttttctcccgttcctttttcgcatgcttggcctcctctctgtttctatgaaccacagaccacctaagcaagctgctgagtaagggctcactggaaacttgcagtcacaggatgtccaatctttggcagtccgagcttggctctaggacagagctgtccaatagaaatataatgtgagccccatatacaatttttacatttctaatatattttaaacaagtgaagttaatatgcatccaaaatatttcaacctgtaatcaacataaaattttaatgagatattttatattattttttggtactgaatcttcaaaatccagagtgtattttacacttaccgcacatctccattcagactagtcacatttttaagtgctcagtagccacatgtggctggtggctactggattagacagcacgagtctggaagatggaagctagtgcagaaacctcttgtttaaaaaacaaaaaaggcaagatgggcttgagcgattcaagaggcaactaaaaataaaattaggacccagcaccttgtttgacacacagtttgaccttcgattttcctcccttaacttccctcttcccttaatatctgtatacaagtgttgcttcaaagtaccaaggtcagaaattgattgagtacggtttactaaagtcatgtggaataaagccattggaaacaaatggaaagcctgtcgggacttctgggctcagaaccagctggctcacgcactccacttgtcagctggacttctgccttgtgaaatggaagcagcctttgttcctttctggctgagcaagctcctgaggctgggagagactaggaaggcttggtaggaggggaaaaaagtcaggaaaatatatcaaatcagaaacatggaagaagaagggaaccgatttgagttggtgggcaaaactctaaaaatctaaatctgatgcttatgtaagggttgagcgaattagggagattgctagtggaaattggagggaatttgttttgcatcatttgtctaggatctatgcaaatatagctccactaaaggaccatagggaagagccagccttgccttttcttatatgattttgtttacaaaattttactgggacttttaaatctagctatagagttgggaaaaaatatttccacttagatattttacatggttttgtttaaaattaccattacttgttttttaaaaacacatgaccacatatgtatatgtatatctacctaaacattgtatcatggtttcagtatgttattcatgtattactgggagatgctaccaagaaaccaacccaaagaaaattctgaaaaatacatttctatttatagaataaatgtttcatttatataaaagcaaaagaacttagagttctaataaatgggatgtctaataaattatgaagttactgatttgaatatattatatttctataacttccttgccaaagtcctgatttagtacattagagaacctgtgtttcctctctcctctaccattcatctctcttccatacagtcatttgggctttttactcaaagagaatcaagaaataataaggtataacaagcttggcaaagtgttggctttttaaaaaaaaatttttttaatctctagcagtttggtaatttagcagcatcatttatttgggattcttttatctgatttcaacagtgaaaaacatccctatgataaagcctaatgacccatttcacaaaagatggaatttgcccttcctagaaaatatgacggagaaaagtctgactcagagaaagtgggtctgaattttataaggggtagtaagaattggacaattcctttgcatatctgaacttggcaggtaccgttctaaatctgaaacagggtgatagctcaaagttgccattcatccagaatagattgttttagaatgtagtgtttaagtgactgtttcattaatacacctacaccctttctttgaaagtttgcaacctaattgcatctaaaactatgaataagttctgtggtaaaatcttaaactatggaaaattacaaaaatgaatttttcttccctgaaatcagagcttacatgtgtgtttttttataacattttcagataaatgtattcaacatgtaatacagtattttaacattcacctcttattttatattgaaatgtattacagtattaaaactcagtgttcagtatttatttcactatgcattttatttagtaaaagccaggagaaatgtttaatccaatggtgccttactttgtgatttaaaagaaatcaacttttttttatgtctaagtagtagattatttgcatatttgtaaaaactgttaggtctttatattttaaagtgtaataccagttttgttattttagtagcagaaatgggatgattgttaaagttccccaaaaatgttggcatgaaattaatttttccctccttatagtcaaggaccgtagaggaagaaaaacttttttttcataccatgcactatgtaaacagacacattttgctatctgtgtcatcaggatagtgtaagtggtagggtagagactaccctagacatctgcatctttgtaagttagccagacaataaagaaaagcagaatg

SEQ ID NO: 10018 - DNA, 528 bp, Homo sapiens
gcagaaaatgagctgagcttagctctgccctggaacctaccagagcagagaagggcaggagaggaagatttgtctacttgctccactcgcacttatcaaacgtgttatattccatacttattattgatgataagatttacctttatgtaagtttatggccttgaagtgttttcatattgcttctccctttagttctgctgtctccctgaagagtgaaccctctttagtaaatgaaactaatcactaaaaaaagtgttcatttccagtgtctggaagagtttttgccaggataaccgaggttttctgttgcattgtcattgctgttatatttatatatttacttattttgtctaaccacgagaccactagggagttgctgatgttctaaatgaagtgtattctttgcttaagagtcagttttgtacctactaagaaaaccccatctaccagtcctaaagagataaggcatttgatttggagagagaggaagcagtagaaatgaaataaactaaaatgcaaactgcatca

SEQ ID NO: 10019 - DNA, 752 bp, Homo sapiens
atttttaatttgaggggaaaagaaatgttttacagatgaaggaatgttttatagtaatttaatttgctcctgtagctgcattatttcttgattagaggtttgggcatataaccagattaaagtgaaggaactttctgttgtttttgtagcaccgctcagctgtcttgtaaaacagtgaacacacgctttctggttctagtaatcctgggtgtttatcacgttcagagaaactcaagctattgcatgattagccccctatctggcaaggaaaccccatacagaagaaacaacaaacctgcgcctgcaccgcctctgcgtcctgggtagtctgtgcttgtaatccagcatgtttcacagagtaagcctgttgtgactttgcttttggggtctatgtcattggtttctgatgcttgtacaaacacgcacacacaaatggataaaacagcacctctggctgttacattaccataaaccatatcacatgcctacattttacaaatgatttctggtttctcttagttcttctctaacatagtactttctttccagcaaaagcaaaatgtgttttcagatttgttactttaataaaggttatccataccaataaaaagtgtacaacacagcattttctgttaaattattattggttttcagttgtaatttggtattttttctggcatgcgtttattaatttattaaattggcttttagaaataaaaaatattgatagcttacttttttctcataagaat

SEQ ID NO: 10020 - DNA, 329 bp, Homo sapiens
ttaaaaacctgcagtacaacagttttagatactcattagtgacttcaaagggaaatcaaggaaagaccagtttccatttatgcgaaatctgtggttgtaaattttttttttttacttgaaattaaatttggctctaaagttggtgtagcagcagttgatcagactgaaaaacggtttttagtctctggaaaaagactgattttgctttttttataaatattattagatttattaatttttctgtgctcaatgtgtaaattgtattataattcattgtgatttatttcacttttaatttgctggtgttttaataaatgggggtgttactg

SEQ ID NO: 10021 - DNA, 2030 bp, Homo sapiens
caaattactgcttgacatgttggcattcatattaattacggatgtaattctgtgtatcttactgtgactccgaaaactgtagtattggtgtcatgggaatgtacgttatttccaaagtcatttcattaaagatgaaaactttaatttcttctgtgatttgtacttacactaagtttagattatcacaaagaagaacgtgcattcaggcagatgctgtcccattcagaggaagctacagcagttgctccactgatgaaaaatattccaatgtaatttttatgggaattcttttatatagtgttctgcatattgtaattcatagggcttttgtttattcatataaaggataaatatttgggtgttttgagcttctataaaatatgattaattaaaggtagttaatactcaagatggtcttgagtttttaaggtctaacatcagttagaatacttcaaatcagaatcaccttccaagactgacttgacaggtggttctaaaaataaatcacgtcagctttttaggaaatgaagccttaagctagggggtaatgtgacttttgtttttcagtaagtctcacattaagcaattgtgtgcctctaatgaatcttccatgtcttttcagaacaggctcagtccaactagcagctagtttcttacttgaacaagactattaaaaaccaaatatcaaaaaactgaattggctagatttttacagccaaaaattgctgtaaggcagtgtgtatcactgttgctaacatgtttatagtgggagtcttggggatgatagctggttcaacagtattttgctgctaatactttatgttgcttcttggtcaaacttttcccattcaaaggaagaagatggtgctactatagacagtttttcccctagcaaatatattgtaccataatatctatcatccaagtttcagggttttttgaaagttgataattaggaaagtgacattttacttttcttagtgccctttgcctgtttgatttccattgagaaagagcagtcaccaaagttcctcaagtgtcggaagaccacctccatcagaatcagtgcttgtttaaaaaataaaaatccctaggttccagacctactgaattggactctttggacatgagactcagcaatctacatctttaaaaaggcttcccaggtggtttttgtgcatactgtttgagagtcactaagttatatatatatcctaccttctgtaaagtgaaatgaggccccaaaaagctaaagaggtagagctgctacctcgtttttagttgattcatcatctagtctatatcacccaaaagaattggaaataggtattcaaacaaaaacctgtatacaagtattcatagaagcactacttacaatagccgaaaggtagaaacaaccaaatgtctatcagctgatgaatggataagtaaaatacatccatataatggaatattcagccatgaaaaggaatgaggcactgatacataatgaatagatgtgagtgaaccctaagaaagcatgctaagtggaagaagccagccacatgattccatttatatgaaatatccaaaataggcaaatccacggtgacaaagccaattagtagttatcaggaactagggagggggtgaaaagggagtgactgcgtaatgcgtatggggattccttttaggatgatgaaaattggatgaattacagctggtctgatggtagtgggttatcagaacttattaacattagtgtcattaaagttggtatatagcccctcactgctaaatctggctcaaaaattaaaagattattaaaatttgatgaattagtggtgatggttgcacaacattgtaaatataataaatgtcactgaattgtacactttaaggtggttaaaatggcaaattttacatgtcttactgaaactactatttaatacaaagtacatagtataaaattttaaaagtgataggaaaatgcttagattaatattcacctattccaagtatattttaaataaaaacagtcttggtaaaga

SEQ ID NO: 10022 - DNA, 4285 bp, Homo sapiens
taaatgcttccacgtgccttcaactggatatttatagtcttactgatgtcagttattgctttttcggtggcacttactttttttgcccctctaagggtatgcttgtgtatcatttgaattcagattgcctagctatttgaacatctcaaagttatatatactgggtattaaaattaaaagcaagttatatcagtgaagtaagatccttttgaatgtacaaagacccacactattgagacagcttttagatacttttttgtccattctaaaagtaagcaaacatgattgccttcttgttttctgtatgtataacccgtaaatatccattttgacataggaagaactttggttaagagtaagttctctaattgtgtttgttttaaggaatgaaacttggttaagattttgactacttcattattaaaaattgatagaattttagctcctgagatatttacaactgggagaaatgtctatttaggtgtttacattaagcggtatgaaagttgttaccacataggcactggtacgaattctcaataagaatgcagtggaacagttaagtagaactgtaactacgttggcactggtacgaattctcagtgagaatgcaatgaaacagtcaactgcagtgtttctttttgatgtcttttattttacaactgggccaaaggcacattatgtatataattagtttatatttacacactagcatataggaaatatttctgcacttgaccctatttgaattctgagcattatttataagtataaaatgatgatatataagtgaattttgtgctcttgtttgtattttattaaggaaaatgaaaataatctggcatcagtttcattttgctaaatatctagtcttcttcaaacagtatcttggtgggtgacttggctacctgaaaaatcttaggaggaatagctcacaatacaataaatctgtagattctgcttagagcaaattatggtacttttattcagacttgtttcctttctagttaacagaaatagtgacatttagaggttttaatcagaagttaggtttttctgattcaggaacatcgtaggccagccatttgtaatttttaactttgagaaacaaattttgtgagaataggtagtgggttgctggtagttaattggatttaatatttgtattaaggattaactggaaaaaatgtgtctcagtgctaattcttggacctttaatacagtgtgcttatctgttacggcctccttttatctctcttctccaatattaaaaaaaatggaaatcaaattattatgctgaagggaaaaatatacctgtataagaatggtgtgtttggctaatgtttctaagttgcacacagtttattaacaactgaacaaaacatttttatcatttaaaaatctatttttatgatttaatatctcatatgtgacagtttttttttttttttttttttggaactcaatctgttaacagtctgggacatccggtatagtaaccagagtttttgagcctgccgtattgggcttaaatttcaggtctgtagtcttgggcaagtcacctataaactcactgagattattttttcatctgtaaaatgggaagagttatgtttatttttgaagggtattaggataattaaaaataatgtaatgtgcctagcacactacctgaaaacgatggcatttgttcttattaatgtctttaaaatatgcaaggaccataagtttttcctcttgcagatgaggaaagtaaaaaataatacgaacatgtaattcagcttctcagattcaagccaatgttttttgcatcaacttttctatattgtatgtatgtatataaatacatagattaaggaaataggaaactgaaactctgtggaatataaactttttaaaaataatttcatcaggttttttgtatgttactgacccatatggattttagtaacatcttgcttagtcatgttgttataaaacattcaaattctgatatacattgcttgaaaatgagtgagtacctcagagaaatttgatagactcaaacagatagtatgagaaatatctttgaaagaaatatggaggaaggttaaaaggggattagtaaaattaatgcgataggtaacatgtttgtaaccatatagtatccttttagatacaaaagcttattttcattattattataataaacagttaatggttgaaacttagtaaaatgtcctatttctgattattaagactagtataaatgagaaaatccaagctattaagtaccattagctacagtgatcttagcttccttgcttacaattgttcagtgggtcatctaaattcttctatgtcctgagcatgatctacaaacatggtctagcttctgtctctccgtcttcccgccatcattgtgctgtagccatatggaactcctttcagttctctgaccatgccctttcctgcctcagatttcagcttaaattttgcctcctcagagagatgccttcccaaactccccatctgaagctggcctctgccttttactccctatcatgtcactctctgctcaccatccttatcacaatgtgtatttgatttgtttgctagtttactgtcttcacaacataatgtccgtttgtgcaagggtcttatttttcttattcatgtctgtatctcaagggtctagcacaatgcttgatgcatattgtgtgaataaatactttgttgccaaatccagtgaaaactctcagttcttgtttcactgcttggcagtattgacattgaatattctctgagatactttttttcttttggcttttcatatatcacactattattctcttatttctctggcctcttgctctcaacgtcctgtaagtgttggtgttccttaagttctacctagtgtcatcatttcttcattctgcatattctttccctagggtttcttcccaacaccaaaggacttaccatctgtctctctgaatctcagatctccagctttgatctgtttcctttactttagagctatatatttgcctgcctactggcctgtctctcacaatccatatattcaagaatgaacactatactttgcttcaaaccttcagaacattcaaaccgtttatgtttctcatctaatcaaatagagttactctctaagccagaagctgtaaactcatctcttttccctttattcaagctgtcaatttttgtctcctaaacatcttctagttatattctcatttctctgttcacattgcattaataatgatgataaacatttgcattcttattctgtgccaggcaacatgctaactgctgtatatatattattatatttgtactttggcaagaatcctgtgaagatttttatctttggactactagaagagaaagctgagttgtagagagagtatgtatttaagtccgtttgggctgctataacagaataccacagactgggtaacgtgatgaacaaaaatttatttggctcacagttctggaacctgggaaatccaaaggcatgatgctagcatctggtgagggcctttgtgctttgtcatcccatgccagaaggcagaagggtaagagagggcaagagtgagcaagagatggaagttgcaacctcaagctcttttataatgagcattaatccattcatgagggcttcaccctcatgacctaaacatctccattaggctccaccttccaatgcaacagttagcataagttttcaacacatgctttttgtagcattcaaaccatagcaggaagcaactttgcttaaaattgtatacctggtaagtggaaaaagagggatttgaatataggcaaatgacttcagaggatttactcttaatttctgttgtactgccttctaatcttggcctccatcatttcagattaccaaagctgtctcttaactggtttctttgtctccaaccttgtgcacttgctatctattctgtgtgctgcagcctgagtttttaaaaaacagaaaatgaggggccaggtgtggtggtggctcacgcctgtaatcccagcaagttgggaggctgaggcgggcagatcatctggggtcaggagttcgagaccagcctgaccaacgtggagaaacactatctctactaaaaatacaaaattagccaggcgtggtggtgcatgcctgtaatcctagctactcaggagcctgaggcaggagaattgcttgaacacgggaggcagaggttgcagtgagcagagattgcgccattgtactccagcctgggcaacaagagtgaaactccatctc

SEQ ID NO: 10023 - DNA, 474 bp, Homo sapiens
atttaggaggatttgaccttttctgagctagtttttttgtactattatactaaaagctcctactgtgatgtgaaatgctcatactttataagtaattctatgcaaaatcatagccaaaactagtatagaaaataatacgaaactttaaaaagcattggagtgtcagtatgttgaatcagtagtttcactttaactgtaaacaatttcttaggacaccatttgggctagtttctgtgtaagtgtaaatactacaaaaacttatttatactgttcttatgtcatttgttatattcatagatttatatgatgatatgacatctggctaaaaagaaattattgcaaaactaaccactatgtacttttttataaatactgtatggacaaaaaatggcattttttatattaaattgtttagctctggcaaaaaaaaaaaattttaagagctggtactaataaaggattattatgactgtt

SEQ ID NO: 10024 - DNA, 613 bp, Homo sapiens
taatagctgatagtggcatttatcaaatggctttgttatgtaaatttgcatcgctttatttaccctttggcatctttatatttgttacatgttgaactttgtacacttatgcattataaaaaaaaaagtagctaaaacttttgctgttaaatttcccagaaagtgacatattctaagaacttttaccccaggagttatgaaaaattccaaacttatgaggaatgtttatatcagaagttgtaatacgtttgtttcctttcctctgttatcttttgtgctttgacgtatcttgaggggtctttgcacaaggattacatcattcagggaccaagcactatctcagtaatagttaagagtagtctttaaataatcatttcagggattgtgtgagagtagtctcacaatttacactcattaatttgtaatgcatactttttatatagactttaggatattttggcagtgtttattcatatggatataattctttacctaaccaaaattccttaggttataagtggttttaacgtgcaaaagtcagtaaaaaattttgttgccttaacaaaattatggtgctataatgtagagacaatgaacgattatcaaagaacaa

SEQ ID NO: 10025 - DNA, 2406 bp, Homo sapiens
ttatgactgatagtggcttttttcaaaatggctttcttacgtaccacacttttttttatctgtatttagccttggcatctttatatttgtcttattttgaatcttatccactttgtaagaacaagtttatgtttgagcaactttttcatttaatccagaagggtagggactatgcagtgtaagctgcatcacttctgctttcttcctactagtgacaatcatctggtcttgccctcaagcaacaattgctagagtaacatctttgtataagcaagtaaccccagatagagttgacgtttcagctttgggctgtcaaaagggtatgtcatggaccaaagcactgttagtacgggtatgtttgcatttggtcactgatatgtaaatgactgctagcccacggctggaccacttctcaatcagcaaataaagccatgtctattttgctatctcagcatagactatgctgtctgataaatctaattcttaactctatttctccagttttttagtcctttaactttctggattgcaacgaagtctagtttagacctctaagcccttttagaagtacaagtataatgggaatttcttttcttggttcttttcaggttatgaggtttggtcagtgacaaaattttttttcataatttggttgattggttgcttcttaagttttataataaacgtttttcttcatgttctatttttgattttacagaaatgattttgcctccttgtggatactgacatatattaagtgtggaagcttattaatatttttggttttttaaaaactgaaatttttaatttttactttttaattttttaggaaaaaataagcactgaactgagaatgagaagaataaaagtatgagttccataccttctaattttaggctgtcagaaattcctttattctttgggatttcacaatcatttgaactatcagaagcctttacaattacttttagctgtaacatccgattctgtataagccacatagaaaaaagttgcctttctttttttatgacctggatatataagcaaatcagctaggaaatatataattgtattttatattaatgttttctaggattttggcttacagtaaatgttaacccctatggtaagtgattgttattgttggatgttatactgattattaataagaaatttggatttttgcctttttacctggaatttttgcttacagccgtagctatgaatatatatagggtggtccccagtctctgttatggttgcgcataaattaataattttataagtatttagaaatggtataattctcttaacttcctctttcagtttttgtactaatgtttgtttttgttcgggaagaggagatttgcttttaatccttccaaaaaatgatgaaccaccgttccattcagtagtttgacaagctgttataatgtgtattttttcctcaattattcttgaaatatttagagcctctcctgcttctaacatgaaggcctttagatgccagtctgccagaaatctggaaacagaggaaccggtgaagtgaagatgtaatggagatttagctaatgatgtacttcacaatccaccttggatctcctgcatgtccaaatctcagtagttaatcaagtgtctgctgccattaacagaacagaagtaatggataacagaatggaaataagagatgccagaactacttccataactaactcaccaaatcaaatcatcagtcctcatattcttgttttatttaatacaaggagaagaggccatgcactttccaaaaggtcaaagccacatagaataggaaggcaatctctagtttaaagctttctcttggagtgttttctccccctgtcttcaaagggtctacttgagagatagtggtgtttactgctgcagcatgtatcacaagataagaaatgaaaaatcaatctttcttaccaccctgttctctttcccttttttatcttttcccttttgtcaattatagaattatagggacatttttctctgatagctggaagttgaacctcaaccaggtataaaagatgcataacaaccttttagcagtaagtgtcaagtgagtgagcactatgattatcaaggtgactttggaaaccttttaaaaatgcatttttgcaaaacaagataacatatattgataaaaagtgactctcagattggtaatgccagaaaaaattttaagaggactcaccaaaagtactagatctatgtaagttgtagaatagagtgaagtttttttatatatttgtggtagcctccatcttttaaactttttgaactcagtagaaaaacagactgaaattttaaagacatgcagtatttgtatcattttaaattctgtaacactgggaattaaatatactcaactttagagga

SEQ ID NO: 10026 - DNA, 6158 bp, Homo sapiens
acctccaggtcagctgcagctgcaaaatgactacagcctgaagggccattttcagtccagcaatgtcatccttttgttcttttagctcagaaagacctaacatctcaaggatgcactgggaagcatgcctgggctttcaccttgaagcatggtcagcagcagagagagcaacgggaaggacaaagaaagaggtggggcagggagcacaccccaggaccctcacttttccctaatgaacacgcatgggctgaaatgaaggctctgggtaggggactgttttggatccaaggacctgtggacagtcggcctacttactctgagctgagggaacactgaacagtaaaagcgtcattagcgctgcttcgttttgtatagggcttttctgtttgttacaagccaaacactgcctgtctttgcttcctgtccctgaatgcctttttgtgccagactgtcccaagaatcctaatttgtattccatagaggtattttatttttaatcctagagcttcttattgatggatcctttagaattgcctacctaaaaggtaaactatactatccttataaatactgatcaatcccagttctccccctaaaaatgaatacatagtaggactatagcaaatgtgtttgatgggtaattctagactgggactatggtacccttttccagagttttaaaattcaaccttcattacagacaaagttttctcccagaaggaatggattgatagattttgattaaagtaagggtggaaggaaatctgtagctggatttaccacaagtgacatctagaaactatagttcacaggacagagcagagccatggagactaagcattgactaccttgagttctcctagtgaggagttctggtataaaatttaagattactaccagtaaccaacttaaagcaaactataggggtccctaattttggatttttccttaagtgtaagaaacaatgcttcaaatgttaagaaataacagtctgggcaaagaacgcatattctataggaagccaggtttacaataggtaagaataaactgtattaagtagatgtaatgactagaaagctgctttgctccctatattgagaaattgtggacatggtatgtgttatccaaagaacattgggctagaagatagatttctatccttagctttggcattattgactggattgacttgaacaagtcacttaacttctacaagcttgtttccttatttgtcaaattagattacactaggaaacgattctcgaacatgttttaaccttacaactctttgttcaaataaatctttcaatgaatccccaacatataaaacgtcaaaaagctgaattcctatgtgaattataagcagggtttggacatccagagcacctacaaaccttcatctctttgattacgtacatgggggtccacagggactctgaagagtttgaaaatccctggcctagattaaacctgagagccattctagctcttaaaaaaatctgaaatttacaaaccatttttcttgttattgtttttgtttctttgtttgtttgttttttgagactgagttttcactcttgttgcccaggctggagtgcaatggcgtgatctcggcttactgcaacctctgcttcctgggttcaagcaattctccagcctcaacctcctgagaagctgggattacaggtgcctgccaccacgcctggctaatttttgtacttttagtagacacagggtttcaccatgtttgccaggctgatctcaaactcctgacctcaggtgagccacccacctctgcctccgaaagtgctgggattacaggcgtgagccaccgtacccggcccttgttattgttattaatcattatcaatcattaactttacagatattaaagaaataggggccatgttctacatgcgacattgttttcctggcacacagtagacaattcaggaaatgtctgaagaaggaatgggtaaaattaagataccaaaatggaattgaggggagagcaggtaattgtagagaaaaagactctttatggcaagaaacaaagtaaaagaaatgtatagaccgggcgcggtggctcacgcctgtaatcccagcaatttggaaggccgaggcgggcggatcacgaggtcaggagatcgagaccgtcctggctaacacggtgaaaccctgtctctactaaaaaacacaaaacaaattagccaggcgcggtggcaggcgtctgtagtcccagctactggggaggctgaggcaagagaatggcgggaacccgcgaggcggagcttgcagtgagtcgagatcacgtcactgccctccagcctgggcgaccagcgagactccgtctcaaaaaaaaaaaaaaaaaaaaaaaaaaaaaaaaaaagtataaaccagactaagaggggaataaaagcaagaagaaaaagaaacgtaagaacaccagtaaaggaaagacagggaccgagacaggtggttaagggaaatgaaaaaaaaaaaaaaaaggtgaaagtcaatccaaacaaagaaaaatggcacttccaaccaaaaaaaatgaaggtgtagaaccctgtcatcaattgctcagaaaagagagacacttgagcagggaggggtttgagaaaggggagaaggaaggagtgagagccctaaaaaataatgttcctagctaccctttacagctgtctctgcagggaagactggagaaagtagagggggaaatgaatgcaggaagaaactgcctctgcagagcaggtaagaggaggttgttcagatttatggattttattaagccagttttctgtatcactctgctataaaggaaaatagcttctgcagggctgtctctcctccttcaggtggggaacaaagggtgggtggagtcagggacagagtctggtctgcgagatcgtgacgtgtctgcagctccgaagcactgcaggtgtttctgggtaatgtgccacatcatgtttatatcacgaacgggaattgaaaatcagtctgtgtgaggcagagatgagcccacatctgttatcctccccaacaataaataaataaatagcccagacaaatggatgccagtccatctacagcaacattttaaagcatgtgctttatgacaaaactggacccagggtctgacagagactgcaggctgccgtgagcactgtagctatcctgaacattgatgctacatattgctaaggggaacataatttatagcataaaccctacaagcttccactaaggttgagttttcctctcattttcttgccgttttattggcttcactgcatggttgccaatagcaacatccactggtagcaaggggagttcaacaccattgcaatctgccatacagtggagccctgacaatgtcaaccatcaatctagtagctgtttgtaattgcctccatctatttctcctgtcttgaggtatctttcctattgtgggtcaagatttagaaactgctgactaatgccatgggtctgtgtctccatgactatgaagcagtggacaggaaggtagcagcttcctggtgccaacaaccccagaggttagaggttgaactcttgcgggtttcaggcgtttttaatcccttttctaaacaatttataattttgcaagaatgtgaggcatatgcagttatccatataatctgcttttccaaaaaagagaaaggaagtttcccagtccttattattaatgtttatttcctattggagaaagacatttgaaatatgagccttcttgtaaaaactcaaactgaccagattatgtttgcttcctcaggtctcttggcattaattgttgaaataacttcatcctactttttcgatgagatgtatttttttcagacatatttattcttactagtcactatgtagctattatgtgcacaatctacaatgtagtggcaatcctggtgggtagggacagcttcacatactgcaaagggtgccattcagtgcatagcagactggaactccctcctagcttggccaccagctgaacctgtaatcttaggactctccaagtcttagaatctccatctattacataaaagcactgacttttattcagtccccacaccaaaggaccaagacgtgtttagctttaaagaaattttccagataattttcttttttattcttctcaaataaaatagcaacaaacctaaagcagtcatcttcttaataaagacataataaaacttacatatatggggtagatgtaagcacaatcatactacagatgtatcttgagcctgtctctaattatgatgaaagatgtagtcatcaatacaatttaaaaaaagatatgtcctttttttgagacagggtcttgctctgtcacccaggctggagggcagtggcacaatcacagccactgcagccttgacctctccaacttaagtgatctttcctgcctcagcctcatgagtagctgggaccacaggtgtgcaccaccacacccagctaaattttgtattgtttgtaaagacgaggcctcactatgctgaccacactggtctcgaactcctgggctcaagcaatcctcctgccttggcctcccaaagtgttagggttagagatatgaaccaccacacccaccttatatgtccttttatttcataaaaaacaattttagattatctgatatcacacatatcccataaatggtagtcattaatttagaagtgaatttataaagttaagagaagttaaaattgcacatgcattttgtttctaaaatctgagatgtctatgcatttccaggtattgtatatttgcaaatacattgggttagaaatcatctttaacattttgtgttagtgtaataacaatattatctaatattaatgctgccagaatccagttgctttttctgtgtatcaaaatttatcataactttttccacttaacactaggtaattaaacagaatctgcccaatttattctgcagtaaaattattttaaaatctatttttcctgctgactcttagaaattgcagaaagacaaaaaccagtttcatctccagtaatagtgtgaaacaatttccttccagtgggacagaaacctagacatactagggaaagatttaaatataaagaaaaatgccttggctgaaaaaaaaaaaaaccaccaaaacacaaaaaggattcattaaagcaacagaacaaaacctaatttgggaccctaaaaactctggcaatgccactgtaatgaagtttcattatctgcttcagagtaacagtctctgaaattgttattctgctacatgctgtaaagaactcccaaaactcaaatgtatcaggaaatgtaaaggttaagtctgactacaagaaggccaaaattgcaccagcttcctaagtgaagaataatagaataaaacatatagagggcagaaataaaatgaggtgtatctggagaatttcatgatgagcatttagatttagcaatgcccaatgtcatgctgacactgtttgtcatgaccttgtcttcagctagtaatttggggttgtacttttttaaatttaattttgaatgttcttgcatgtttggtacctctctcctcactgctaaagataaattgtttatctgtataacataactacaccaatgtcatttttgtatacgctagtacacaaatgtgtttttttattaagtaatgaagtatttgctgtgaaaaatgtattatttgtgccaccgtttatatctgtgttcattttctgtgtgtatatgcgtgtgtattcgaatctcaatttttcttttactctagtttagattaagacatatttagatgaaattttaaaaataacattggaaataggaggctaagttttgttgagtctcattcccttggggggaaattgcttttgccattttattttcatgtacaataacctaaaaaggatctcctactgacttccttcctaattattattgttttacacgaaagaaaggaaatacgttttcaattgagttgtttgaaatcattcactttgtgtagatttcccagactgatgtttcattgtaagaatattacattatagacaggttggccatttcacaagcaactaatccatagttttggaagcccgctttaagagacctgaatatctttgtttttaataaaatacttagagtttaa

SEQ ID NO: 10027 - DNA, 674 bp, Homo sapiens
atctggagcaacttaaaaaatctttcagtagcacataaaaagttcccctctggccccttcccaagtaaaacttttaccgtagtgtttatgtcttgtttctaaatctcttcatagattccatcaacactccagatttaattatctcctcatagttgttattaagctctttttaatggcttcaactttgtatcagtatactgtatttataaactttgtaccacaagagagagtgtagcacccattttacagtgccatgcacatcagagaaagaaactgcatgtttgttgttgatgatgaaataaaaatgctagcgacagtctttcttactggtgcttaagctcttctttgcacaaagctttataaagggaattcaaaggaagccctttagaattagagtcttgagggacagcactaacaggcctttattaagtatgattgattgttaaatttcagggaacatgattggtctgctgtgtatttgaattcatgtaacaaagaactgttacgatgggattctgctcattttattaaaaagctactgacttgactgtcatcctgttcttgttagccattgtgaataagattttaatgttgataattctgttatttacatatctctaatttactttgaaattcaaaggtgaaaataaaaaatgatggcctaagtaaaattt

SEQ ID NO: 10028 - DNA, 1019 bp, Homo sapiens
gagggcctgtgcccttatactctacactcattcttaacttttcgcaaacgtttcacacggactaatctttctgaactgtaaatatttaaagaaaaaaaagtagttttgtatcaacctaaatgagtcaaagttcaaaaatattcatttcaatcttttcataattgttgacctaagaatataatacatttgctagtgacatgtacatactgtatatagccggattaacggttataaagttttgtaccatttattttatgacattttacaatgtaagttttgaaactaactgttggtaggagaaagtttcttatggaacgaataccctgctcaacatttaatcaatctttgtgcctcaacatactgttgatgtctaagtatgcctcagtgggttgagaaaatccccattgaagatgtcctgtccacctaaaagagaatgatgctgtgcatatcacttgatatgtgcaccaatacctactgaatcagaaatgtaaggcattggtgatgtttgcatttaccctcctgtaagcaacactttaacgtcttacattttctctgatgatgtcacacaaaattatcatgacaaatattaccagagcaaagtgtaacggccaacactttgttcgctcattttacgctgtctctgacataaggagtgcctgaatagcttggaaaagtaacatctcctggccatcccttcatttaaccaagctattcaagtattcctatgccagagcagtgccaactcttggaggtcccagagtgcagccaatgcctttgtgtggtagttctaaattttaattgcacctgaaaaacctgggcacctaagcaatgagccacagcaaaaagtaaagaacaacaacaaaataaagctgttgttaaattttaaacaatattactaattgcccaaaatgtcaatttgatgtagttcttttcatgcaagtataaattcaattgttagttataattgttggacctccttgagatagtaacaacaaaataaagcaagctatctgcacctc

SEQ ID NO: 10029 - DNA, 265 bp, Homo sapiens
aatgtaatgttttagtgcctcagtaattattagcattgatctgagtgctttcatattttccaaattatgtggatctaataaacttccaaacaggtccaccatatttgaattcattaccttggagacccctaaagaaataatctctatgtagaaatctcatctttgtaatacatgtaaatattttgttatctgaactgtggaatcatcacttgtgtcaatcatgctgtgtaatatcaaacacaattaaatctctccttggctacct

SEQ ID NO: 10030 - DNA, 472 bp, Homo sapiens
catatttgtatttctactttttttttttagctatttactgtactttatgtataaaacaaagtcacttttctccaagttgtatttgctatttttcccctatgagaagatattttgatctccccaatacattgattttggtataataaatgtgaggctgttttgcaaacttaacttgcaggaatggtatgactgtgtttcctactgctttattctgtaaacaagaattgtagcaccatgaaacagacctctgggtcccagtgggcattttttcccctttcaggatgtaggaggacatgtatagtatgtcaaaaactgcaagcttttcccaactttaaccttaccagcatgttaatatccagtttttttatagtttaaaagttaaagtgcctcatattttgaaaatatccattaaggacccaggaattagcatttcacttgtttatacatttttataacattatgaagacgatat

SEQ ID NO: 10031 - DNA, 1101 bp, Homo sapiens
atggaaacaaattcaatcacagagaaaaatcattctgtgagcactaactgaaaggtttagggctagctgattaatattctatgacactgcaactctgcatgattcaatctcacatcagacccctctcattttagtagcagcatagttaatacctttaagaaaaataaaaggtaaccatataaagtactaataatttaacaaatttccaaagcactgtaggttggttgtgcttgttttcttctgtgtttaacattccacatttctaaagattgtgggttgaaattattttttattgtctatttccatataagcatggcatctgcttgctttaactacctttatgcaattgaaaatataagaatttgtttttatttccctttactctcatttacctctttcatctttttcctctttccaacagagtcacacgtgtcatctttgtaacattttgttttactaggatttctttttacaaattttttcaatgtgagaggtggaatataaatatttctgtcacagttcctccaggtgacaggcaataaactcatttttgaaaggtagtataataactgagctgtaaacaatatgatttcactctggagacatcattattttttagcctctttttttcagtaaaagcaaactgtagaatactggttttggatcacctactattggtaacaaaagcagttctttctcaatatgtgggttacttttaaacatttagaaaattctcatccttaagtaaatttatttcaggacaaagttacaaatctgcaaaagccagtttatacttataaactaagattaagtaaaatagcatttattgatcacaatgtttcagtagatattaaatgatcagtttcagttattgtgtgtgcccattgatggtacttgaaatatgaaccagttatctaaggaacttatgagaaaactttggtttctcaaattatttaaaaaactgcacttgtgctatattagtgcagtcacttttgctttttgttttattgtctttactgttgcatgttttttacaaatcaagagtgtcatatttatgaattttaaagatatttaattcattattaaatctcagttcactcc

SEQ ID NO: 10032 - DNA, 1095 bp, Homo sapiens
tagctaccagctacctacagatttgcagttcataatcccgcatgttgtcaacatactacagcattagccaccacaccttaagatgcatttcacagccaaaataagtctcatttcttttcatgacacatttctctttacatgttaacaccttgctactaccaaggcataattacttaacatgcttcgaggctgtagattccaagtatcttaaaagaaggaactataaacattgcactgaaaacttgctttaaagctttacctgacctgtcagtttgtagacaaacaactgataataagctttgaatggtgctaataagagtaggaattctctctattaaaaagaaaaaaaaaagttgcccttcctccacaggtgatttagtaaatttagacagtagttaaactcttgttagtagacagtggtgtcctcaaaattttactttgtaattcttcagaattgattatttttattgtgtcaatacagagaaagcctttcagatctttgatatatcatagtcattaaaagaccttttcctatttgtattgataatgtattaaaagttgtttgtgcttaataaaagacttctttaaacatcttatttaatttagtagttacatcctatttccaaacatgagtgccttatttaaaagggcattcttaggactgtgaggatggtttaatatttgttttttcatggtggttgcatgtattttagacaggaaatacatatgtaagcatgtgtatataataaataagcatgttttatcatgaaaaattattgtgaacaatttagatctttaagaacttattaataatggaatactatttctaatttttctctttttcaacttgaaaaatattctcaaaattattaactaccctgaagatactttgtctttaggggaggagggctgaggaagaaggcatacataattacttcagtgtaatcctttatatcagagtaatctttcaggaactaaaatagcaattgttaataaaatttagtttctcattatagtctaaaagcaaaataaattctgaagtagtccaataacagaactgtatgacccctttagaaataaaatttatcatgaaat

SEQ ID NO: 10033 - DNA, 1257 bp, Homo sapiens
cgtctgcaaaccccaagacgtttgaggccagtaggaagttgagaaagaaagccacaaggattcagcaatttaagcagtttgtgttgcagtaccccccattcacccacaaaatgcagcccaccacccagtcccccaattccagagagaaacacatcactagattgacgagggcttttagagactgctcctataattgaggaatcagcagcataggctttatctccctacttcctcccccaccctaccgcgttcaatttgtgtatctcagatatttgatttcttgagcatgtattggtcagaaagaaaaagaaagaaaaccattctctatttttccatgggtatgatctggcttaaaacaatatggaatattttcctgacagacttgaaaactaggatcttcctcagatgtctgtaaataactctggtatccaactgggtgtattctagtgtggaacaaaaaacagtgaacacaagtgcttacttgtggatactatcttaccaacggatcacaaagttctctttttggtgtactgttgttgacagggattgtgtactgtttcgacccaagtactgctgtatcctgtgtagtactagatctgtatctcttgtctgaattaaacatttttagttgctgtgtaaatgttaggaagcaaagtagctttgaattttctctgtaagagaataaaagataaaataatgtattttctttatttcacattttatttggagatatttaaatgaaatagaaagccatataacatagctataattactacctgtttgctatttttgtttaacttattttgtagcttcctcactggtttgtgttgctaagcaaacgtatacaaacagaaaaagagcttcctaaattgcacatttttgcacctcttgtgcattctgcaagaagacaatgaatccatgtatttctatataagtatcttcttcatttttaacctgttttcatttgtaatgatgctacataattttgtggctccctaatgcaataatgtacagaagataaaaaaatttataattgaacaatttgtctttctgttcgctgaatatattgcaggtcatgctcccatgcccccctttctaagccgatatcaacaagactggaatgtttgtgatatcaggggcaagagttatcatagaacaacaaaatagagtggactcttttagagcatctatatctgcaacctgtaaatggtaaaatgtctgtgtatttttttaaatgtaccttttcaataaaagtac

SEQ ID NO: 10034 - DNA, 252 bp, Homo sapiens
ttctacaaaatgacataaactggacatgccttatattcagttgaaacaaattattttttactttgacgaactttatagagaattcttgtataaagtattggtttgtatttgtaaatttaaaaaatgttttcattttaacatgttttataattgatacatctcaaggccctacccataaaattatttgaaaactttcaccagaaagggatgtaagtctcgcttatattttgtgaataaaatgatcaaaagctc

SEQ ID NO: 10035 - DNA, 1505 bp, Homo sapiens
catgtaattgtttctaaaagaaatgtacaaactagaattttaatataaagaaatgtggccatgctttaaacctgtggtccccaccctttttgggaccagtttcatggaagacaatttttccgtggatgggggaatggtttcaggatgaactgttccacctcagatcatcaggcattagattctcttgaggaacatggcactctagatccctcacataccagttcaccatatggttcgcacttctatgagaatctaatgctgctgctgatctgacagggggaggaactcagtaatgctccattgctctaacctcctgctgtgtggccaaacggatatcctaatagaaattgatgttactaacaattagcctctagggctttaaaagtcaagatgaaatatcaattcaaattctgtttttagatatcaattcaaattcttttttttacaatgtgtttattggacacacaaaaaaactttgcaaccatcataatacatcaatatttaacctagataattctgaaataatttggattctttcatttttcaggatttgagctcatcaattatgttaaatttcctatattctgttacaaatataatacagatttcataagtctgccttgattcactgctccctaatccagagcagttaaatttcaaaatcacatagttatatagcctacctgccaaaaaagaataacccatccctgtcttcttaaagtggtagggttttaaaattcatgatacaagtaacaaagtaagttgataacaaatactattttgaactgggcaaaatctagcccaatatgtaattgtgttccccttgtatctgagaggcctgtgttggacaaccatagtactctgctttcactgtgctcagataacctgaaatatatagttgtttctgagtagttctgagtaggaaagaaccaaatgtaaatttccttagagaccatcctggagaagacagttctaaatcggggcttgatttttcatctatgatcctagatgttctcctgaaagaatgactagcctttttataacgatacaaagttttttaaaaatacataaatgtcataaagtttattcctgtgtatacacactctgggttcaggaggttttgtgcttacatttcactactcaaatgccttcgcaaatctcagaacattcctcaccatcactgcaggcctgtgaacagataactttcatcaattaggatggctggctagtggcagggacttcatataaagaaatctttcccagaattgtttttccacattgccttctaatttgatcactccctataacagatgttcaaaattcggccacagctctcttatgaaggcagagtcagataaaatgatattctgcaattatctagatcataagcataaaataaatattacaaaaatgattgtatttaaagaaattttttaaaatccagaaagtcatttaaaatagaacctcatatagtatgaacaaactataaaaatattttacatttc

SEQ ID NO: 10036 - DNA, 1323 bp, Homo sapiens
aggcacgccagtttcaccatttccgggaaacgaacccactgtgcttacagtgactgtcgtgtttacaaaaggcagccctttgggtactactgctgcaaagtgcaaatactccaagcttcaagtgatatatgtatttattgtcattactgcctttggaagaaacaggggatcaaagttcctgttcaccttatgtattattttctatagctcttctatttaaaaaataaaaaaatacagtaaagtttaaaaaatacaccacgaatttggtgtggctgtattcagatcgtattaattatctgatcgggataacaaaatcacaagcaataattaggatctatgcaatttttaaactagtaatgggccaattaaaatatatataaatatatatttttcaaccagcattttactacttgttacctttcccatgctgaattattttgttgtgattttgtacagaatttttaatgactttttataatgtggatttcctattttaaaaccatgcagcttcatcaatttttatacatatcagaaaagtagaattatatctaatttatacaaaataatttaactaatttaaaccagcagaaaagtgcttagaaagttattgtgttgccttagcacttctttcctctccaattgtaaaaaaaaaaaaaaaaaaaaaaaaaaaaaaaaaattgcacaatttgagcaattcatttcactttaaagtctttccgtctccctaaaataaaaaccagaatcataattttcaagagaagaaaaaattaagagatacattccctatcaaaacatatcaattcaacacattacttgcacaagcttgtatatacatattataaataaatgccaacatacccttctttaaatcaaaagctgcttgactatcacatacaatttgcactgttactttttagtcttttactcctttgcattccatgattttacagagaatctgaagctattgatgtttccagaaaatataaatgcatgattttatacatagtcacaaaaatggtggtttgtcatatattcatgtaataaatctgagcctaaatctaatcaggttgttaatgttgggatttatatctatagtagtcaattagtacagtagcttaaataaattcaaaccatttaattcataattagaacaatagctattgcatgtaaaatgcagtccagaataagtgctgtttgagatgtgatgctggtaccactggaatcgatctgtactgtaattttgtttgtaatcctgtatattatggtgtaatgcacaatttagaaaacattcatccagttgcaataaaatagtattgaaagtga

SEQ ID NO: 10037 - DNA, 583 bp, Homo sapiens
gacaatgaaatcagcatgaaaacatcctaaattctcaactttccacaaagctatggctcttctttcaacatagaattggattgggccattttaattgactcctatacaaggaattaagaagaacataaattttgagctagtaactctggccaaataaatacactcaagtttttatcagagtttttggccagtgcttctgccatttttttccctccacaatttggccttcttcaatcaagccagataaatttttgagacaaaagtcagacagtttttaatttttcttgctttgaaccctgtcataatgactgtgcaatacatgtgcagaagatgaggtattttaaaatttacttccttgcactgtcttacacagagtgctataactataaatttttcaaggtcttaaataaaaggaagcaaaaacaaaattattgaaaaattttttttgttgtgctggggaatatactatttagattgtccttcttattttaaatgcatgggaacagaatgacaggtgggatgctgaggagctggttgaagcatcagagcaatgctacagtccaacaatggagcattagatccc

SEQ ID NO: 10038 - DNA, 313 bp, Homo sapiens
acacctttaagtaaaacctcgtgcatggtggcagctctaatttgaccaaaagacttggagattttgattatgcttgctggaaatctaccctgtcctgtgtgagacaggaaatctatttttgcagattgctcaataagcatcatgagccacataaataacagctgtaaactccttaattcaccgggctcaactgctaccgaacagattcatctagtggctacatcagcaccttgtgctttcagatatctgtttcaatggcattttgtggcatttgtctttaccgagtgccaataaattttctttgagcagctaa

SEQ ID NO: 10039 - DNA, 839 bp, Homo sapiens
atcccgaaatacaaaaagtaacacagtggacttcctattaagacttacttgcattgctggactagcaaaggaaaattgcactattgcacatcatattctattgtttactataaaaatcatgtgataactgattattacttctgtttctcttttggtttctgcttctctcttctctcaacccctttgtaatggtttgggggcagactcttaagtatattgtgagttttctatttcactaatcatgagaaaaactgttcttttgcaataataataaattaaacatgctgttaccagagcctctttgctggagtctccagatgttaatttactttctgcaccccaattgggaatgcaatattggatgaaaagagaggtttctggtattcacagaaagctagatatgccttaaaacatactctgccgatctaattacagccttatttttgtatgccttttgggcattctcctcatgcttagaaagttccaaatgtttataaaggtaaaatggcagtttgaagtcaaatgtcacataggcaaagcaatcaagcaccaggaagtgtttatgaggaaacaacacccaagatgaattatttttgagactgtcaggaagtaaaataaataggagcttaagaaagaacattttgcctgattgagaagcacaactgaaaccagtagccgctggggtgttaatggtagcattcttcttttggcaatacatttgatttgttcatgaatatattaatcagcattagagaaatgaattataactagacatctgctgttatcaccatagttttgtttaatttgcttccttttaaataaacccattggtgaaagtc

SEQ ID NO: 10040 - DNA, 824 bp, Homo sapiens
aattacctacttaatcaagataagcacgcatttttgttgccttggttttacctgtagactgtggaactattttaccttaagacctgaaaaagttttgtggattataaatttctttcatacggttgtattttctgatcattggtttcttaatatggttgtactacagtatacttggttgatttaggttgcacattcactgaattcactgagattattcctataattttaaagtatcatttatttgaaaaacatacattatcaacatgtttttgatatttgataatgaaaaaaatctttgcttgtttatttctgaaaaagaactgtatttagtgattattttagatagtgatattatagtattcatctgtgtgtaaattatttcatatagggaagagttctgatctgtacctatggttcttattgaaaacaacattggatgtgcatttctgtgatgttatgaatacatttctactttattttgaaacatttgccaaactaaatactgtaacactgtataacatttaaaaatgttaaagaactgcttagtattagaagcagatcatttcccaaaattctaagagcagcagcatatgttgttgcttgtataaagcctagcgataatttttagactaacttccatggtgccctgttggcattagcactaccattgtaccctgctgtataataaacaatcttagacatttatcaactgttgatacaaatgttagtccctaaccactttttatatatgttttaaatttttgaaattcaagtgtacctgccataacataaaataaacactagactgtatcacacttcgattg

SEQ ID NO: 10041 - DNA, 504 bp, Homo sapiens
aaaagtttactatctgaaaatatttgaatgttgaatataaaaaaatgttttatatagaacataaaaagcacacatagtcttgacaaatgtatataaaattctctgttggaatttgcctacttacctataaacagctcactacacttaaaggaaatgattctattacttatatgacttacagcattaggtgtcttcatgaatatattcaggatgttataaataatgaataatttttagagcctttatcttattttactctgattttagaaatgttttacttaaattaaggaaatagatttttcctactttgagtcactgttttcaaatatttttcacggtagcacataacatgcagggattactccccggtacttctgtattttttgcatttttcttgcactagtaattaccacaaacctataaaaaaaaaccttaaaaaactccataaaggagttttcttatacataaaatgaaaataaaatgaaatactatcagctatgtcac

SEQ ID NO: 10042 - DNA, 3062 bp, Homo sapiens
aaatagaaggatggttgtctcactgttttgtgcttctcctaactcaaggacttggacccatgactctgtagccagaagacttcaatattaaatgactttttgaatgtcataaagaagagccttcacatgaaattagtagtgtgttgataagagtgtaacatccagctctatgtgggaaaaaagaaatcctggtttgtaatgtttgtcagtaaatactcccactatgcctgatgtgacgctactaacctgacatcaccaagtgtggaattggagaaaagcacaatcaacttttctgagctggtgtaagccagttccagcacaccattgcatgaattcacaaacaaatggctgtaaaactaaacatacatgttgggcatgattctacccttattgccccaagagacctagctaaggtctataaacatgaagggaaaattagcttttagttttaaaactctttatcccatcttgattggggcagttgactttttttttgcccagagtgccgtagtcctttttgtaactaccctctcaaatggacaataccagaagtgaattatccctgctggctttcttttctctatgaaaagcaactgagtacaattgttatgatctactcatttgctgacacatcagttatatcttgtggcatatccattgtggaaactggatgaacaggatgtataatatgcaatcctacttctatatcattaggaaaacatcttagttgatgctacaaaacaccttgtcaacctcttcctgtcttaccaaacagtgggagggaattcctagctgtaaatataaattttgtcccttccatttctactgtataaacaaattagcaatcattttatataaagaaaatcaatgaaggatttcttattttcttggaattttgtaaaaagaaattgtgaaaaatgagcttgtaaatactccattattttattttatagtctcaaatcaaatacatacaacctatgtaatttttaaagcaaatatataatgcaacaatgtgtgtatgttaatatctgatactgtatctgggctgattttttaaataaaatagagtctggaatgctatatttggtaaatattttaaagacaaccagatgccagcatcagaagtctgtttgagaactaagagaacagaaacatctatcataagatatatttattttaaaaacacaaggtcactattttattgaatatatttgttttgataactcataccttaataataggtgtgtttgacatatttcttttttcattttgacaatgaactcacattctaatccagaaattttaaacaactactgtgataaataccaatctgctacttttatagattttaccccattaaaatattactttactgacttttactatgtgaagatatatagctttggaaatgtcccaggctattcaagaaatataaaaaactagaaggatactatatataccatatacaatgctttaatattttaatagagctactgtatataatacaaattagggaaatacttgaatatatcattgagaaaaaattattgtcagatcttactgaattattgtcagactttattaaataaagatagaagaaaaccttgctaatgaattaaagtgaaatttgcatgggattcagtttctctaatgttattttccgctgaaatctctaaagaacaagaatgacttcaattagtaaaagtcaattttgggaaaagtcatgggtatctgttttttaagtgtgtcaatctgattaaaatggatgaaacaaattactcatcataagttgtttcttaagctgtcaatatgtcaatagatggtgagttcagaacttatttcaaattgctaagacaaattatctaaattcgtaagaattaacatatagaatggtctggtcagtacatttataatttatctatgcatgaaaaagtattgttttgtttgaaacatgaatttcatagcaagctgccatagaaaggaacgcaggctgttctagaccttcaactgcctaaattatacaaaaattcattttaataaactcaattattagctatttattattcaaagacccatatttaaatcctttgctgaccatgttgacatatatcagccttcttctagacaaactgtcaactctcaaccatcttgacagtagaagtgacagtaaaaaatgttgaatgatcagagattatattaaaataaacatgtaattttcaagtatttttgttgtgcttttataatattaattctagatcagatttattttatagccagggtttgtctgttgtagagtcttgaggcgtagcagtcattcatgattaatcactgttagttttgtacccatatatttttagaatagttttaaatgttagatttctcaaaagctaaatgctacttaatatctttgtatcatactcataaagcaaagtaaatctgacactttttttaaagcaaacttctttgctgtcaaaaaaataaatttggggaaatttctagcttttaaaatgtagatctgcattttactgtgattacttgtgaaagtcatattttaattttctaaattctaatttgtcattttatttcctaaagttaatttccaatgcatttattcataaaatattcattctggaatgcagtgtttgtttaaatgtaatccaatgtatatagaattagtggtggctgtagtgctgtatttattgcttataattttttttaaatgtgaacttacttttaattttctcttggttttaatctgctagtagaaaccactagttatctgtaaaaatatattcaagatattctgatcaattataacaatttatgttatgcctagagtatatctctattttttgattgtatgaaaatattaaagttatgagttaaagtttattttcactgatatttactacagtgccaaataatctaatttataaacataattcttacagtaatcaatgggatacttctcaaaattaacaaatctcttaacaaaatatatcttttgccctctttaaagtcttcagtaaaccagtaaatgaattcaataaaccaattaagaa

SEQ ID NO: 10043 - DNA, 2703 bp, Homo sapiens
atttgttatagcaatgtaacattaattctactaaatattttatatgaaatgtttcactatgattttctatttttcttctaaaatgcttttaattaatatgttcattaaattttctatgcttattgtacttgttatcaacacgtttgtatcagagttgcttttctaatcttgttaaattgcttattctaggtctgtaatttattaactggctactgggaaattacttattttctggatctatctgtattttcatttaactacaaattatcatactaccggctacatcaaatcagtcctttgattccatttggtgaccatctgtttgagaatatgatcatgtaaatgattatctcctttatagcctgtaaccagattaaggaatacagctcttaaaaaatcaagaacttcctgagtttcacatataaaatggtgacaaacacctgcttctgataaagtttatccaattttgtatttatagtattctattgtaataatagaattctattatgtgcttccctccttagacatagtttttctccttttgtactaaccagtacttccatctatattgagctaaactgtctttgaacagtcaactctgcatcatgtgcctgcctgatttggattggtttcacttttttttttgtttgaccatagcccattctatcagtcaagatgactgaataattgtgtgttaaatacaactcatgataaggagaacctttatggaaacaagaagttttatggcaatcgagagggaattatttatatgtacttcttaatactatgcttcccaatattttttcttactaaaaataacaaaaatatttaaaccttctgaaatctattcagttatcattaggatttgcacacaatgcaactaataattcatgctttaaaaagtaggttatttctgttgaagagaaaattatcagcagggaagagtctactagaaaattcatgtgctagtcattcttggggatttaatattttgctggagttaattcactatatccagacctgtatctttcatttattgctgagccatgtgcagtctggcatctcaacaacctcaacaacctcaacaacctccaagacatgtcagtttctgtagtgttcacctcaaatctgacactggaattggaactgatttagaaacaaccatttcattcatttggtatgactagcttcatgactagcttcatgaatagcttcatgaatagcttcatgacttctcgctaacaatgatagtataattctgcctgttcttcaggattgaaattttgaactcaatttagatttcctgttttccctcatataccacatctaaacagtctccaaatctttatgcttttttttttttttttcgaaaaagttcacccaatccctaggctttttacttttttctttttcttttcttttttcttgtttttttttttttttcattttgttttgttttgttatgtttttttagacagggtcccactctgtcacccaggctggagtgcagtggtgcaatcacaggacactgaaacctcccacctagctgggactagaggtgcaggccaccacaccagctaatttatgtaatttttgtagagacgagtttcaccacgttacctaggcttgtcttgaacacctgggctcaagcaatcttccagccccagcctcccaaagtgctgggattacaggtataaaccacaatgcccccgtttttactctttactgcatccttcccatcagtattaattcctcagaaatttagtacattcctccaccatttcaaaatgctcccagaactcacactagttggtacttaactacaaccttcaacctcaccatttaattttgatgtatgtttttggatttaccaacagtactttctttcatgactactttgatttagttaagaatgctcactgtacactgaatgttaattactcagctaattcacactgatttcctgtttaaaaatatgatcccctccaggccattcatgtgaagtcagggtacagctgatgccagctacagaatcactatgtttcaatatggaatatgaaaagtcctaacacataattgcaaatcattttctactatggtatacaaattttatcattacaaaatagtatcagcttttttcacttaaggaaaataatacatcttcattcaaatattcagtgcataaataattgccttaaattgagtctttgctgtggaatttgagagttttggaaatcaaaggcccttgtgaaacatttcctgttgccatttatttatagatagcaatagcttcaaatgagtgggaaagtctacttaggtgaagtggtaaatagtcactaagattgtataaatagcgcattgatgagttgcctaattgttttctccaacaataaccactggtccattggttcactacttactcaagaaagacatatactgagatggcttgaaatgtttaatgcatgtgaacgttatttttaccgtgttttggaaaaagatcttgatgttattgtcttcctttattttccacaattaagtgcatctaactgtgaattgtatatggaattacattattcagcatatacatatatttacctgctttgttcattctctgtattcaaaattaacagatcatgctgaaaaccactcaaacgattatattttttacattataagaagtaaaatatattattctgaataatg

SEQ ID NO: 10044 - DNA, 96 bp, Homo sapiens
tatttgtgcttttggcatttccttaatatttatatgtatacgtgatgcctttgatagcatactgctaataaagttttaatatttacatgcatagta

SEQ ID NO: 10045 - DNA, 868 bp, Homo sapiens
ttacaatgccctgctgctgctcatctccctttattcgtttgtactcatactcaaaagaggttgtgtttttttcccttcattcaataacgattttccttgattcttagataagtccattccataatgtactccttaactgttctgaatttctttcagagaaaaactggaaaagacattaaatcatgttgaaatatttgactgactttcatctaggaaaaaatataaagttaaatctctacactaaaatataaacaaaataaaaagaaatttcagtaagaccaaaacatttacttttaaaaacctatatcatgttatatgtataactgaggaatgtaatcataattttgatttgtagaactgaagacaatatcaagtaaccctcaaaatgtaaattcaagaaacaaggtagttacgttagcctgcattaaaataaaaatatctgtgtgacaatatatgctgtagagcaaattaaaaaacaagtgaaaaggttgggtaaatatttgcaatacatattgatacggtttggatttgtgtccctgcccaaatcttatggcaaattggaggaggggcctggtgggaggtgattggatcataggagcggatttcccccttgctgttctcatgatagtgagtgagttctcacaatatctgatggattaaaagtgtgtgcacctcccctcttgcactttctctccagtcaccatgtgaagttccttgcttccccttctgccatgattgtaagtttcctgaggcctcccagtcatgcttcttattaagcctgtggaattgtgagtcaattaagccttttttattcataaattatccagtctcaggtagatctttatagagtgtgaaaacagactaatgc

SEQ ID NO: 10046 - DNA, 2154 bp, Homo sapiens
agtaagccaagacacatcgacaatgagcaccaccatcaatgaccaccgccattcacaagaactttgactgtttgaagttgatcctgagactcttgaagtaatggctgatcctgcatcagcattgtatatatggtcttaagtgcctggcctccttatccttcagaatatttattttacttacaatcctcaagttttaattgattttaaatatttttcaatacaacagtttaggtttaagatgaccaatgacaatgaccacctttgcagaaagtaaactgattgaataaataaatctccgttttcttcaatttatttcagtgtaatgaaaaagttgcttagtatttatgaggaaattcttcttcctggcaggtagcttaaagagtggggtatatagagccacaacacatgtttattttgcttggctgcagttgaaaaatagaaattagtgcccttttgtgacctctcattccaagattgtcaattaaaaatgagtttaaaatgtttaacttgtgatcgagacctacatgcatgtcttgatattgtgtaactataatagagactctttaaggagaatcttaaaaaaaaaaaaacgtttctcactgtcttaaatagaatttttaaatagtatatattcagtggcattttggagaacaaagtgaatttacttcgacttcttaaatttttgtaaaagactataagtttagacatctttctcattcaaatttaaagatatctttctcctcttgatcaatctatcaatattgatagaagtcacactagtatataccatttaatacatttacactttcttatttaagaagatattgaatgcaaaataattgacatatagaactttacaaacatatgtccaaggactctaaattgagactcttccacatgtacaatctcatcatcctgaagcctataatgaagaaaaagatctagaaactgagttgtggagctgactctaatcaaatgtgatgattggaattagaccatttggcctttgaactttcataggaaaaatgacccaacatttcttagcatgagctacctcatctctagaagctgggatggacttactattcttgtttatattttagatactgaaaggtgctatgcttctgttattattccaagactggagataggcagggctaaaaaggtattattatttttcctttaatgatggtgctaaaattcttcctataaaattccttaaaaataaagatggtttaatcactaccattgtgaaaacataactgttagacttcccgtttctgaaagaaagagcatcgttccaatgcttgttcactgttcctctgtcatactgtatctggaatgctttgtaatacttgcatgcttcttagaccagaacatgtaggtccccttgtgtctcaatactttttttttcttaattgcatttgttggctctattttaatttttttcttttaaaataaacagctgggaccatcccaaaagacaagccatgcatacaactttggtcatgtatctctgcaaagcatcaaattaaatgcacgcttttgtcatgtcagtggtttttgttttgtgaaattcctttgaccatattagatctatttcatttccaatagtgaaaaggagatgtggtggtatactttgtttgccatttgtttaaaagatacaacggataccttctatcatgtatgtactggcttataaatgaaaatctatctacaacattacccacaaaggcaacatgacaccaattatcactgcctctgcccttaaaaatgtcagagtagtattattgataaaaagggcaagcaatagatttttcatgactgaataaactgtaataataaaacatatgtctcaaagtgtatcacatatgaatttagcctaattgttttcagtttcattctcaatatttagtttacaacatcattttcccctaaactggttatattttgacctgtatatcttaaatttgagtatttatatgcctaaatacatgtgtgagttttgtttgacttccaagtccaaactataagattatataagttcatatagatgaatcagaaatatgtggtaatactattaagtcacaaacactaacaatttccaactatagaaataacagttcttatttggattttgggaatgctaccaat

SEQ ID NO: 10047 - DNA, 1288 bp, Homo sapiens
gacagtttaactgttgctatcctgttactagattatatagagcacatgtgcttattttgtactgcagaattccaataaatggctgggtgttttgctctgtttttaccacagctgtgccttgagaactaaaagctgtttaggaaacctaagtcagcagaaattaactgattaatttcccttatgttgaggcatggaaaaaaaattggaaaagaaaaactcagtttaaatacggagactataatgataacactgaattcccctatttctcatgagtagatacaatcttacgtaaaagagtggttagtcacgtgaattcagttatcatttgacagattcttatctgtactagaattcagatatgtcagttttctgcaaaactcactcttgttcaagactagctaatttatttttttgcatcttagttatttttaaaaacaaattcttcaagtatgaagactaaattttgataactaatattatccttattgatcctattgatcttaaggtatttacatgtatgtggaaaaacaaaacacttaactagaattctctaataaggtttatggtttagcttaaagagcacctttgtatttttattatcagatggggcaacatattgtatgaagcatatgtagcacttcacagcatggttatcatgtaagctgcaggtagaagcaaagctgtaaagtagatttatcacacaatgactgcatacagacttcaaatatgtcaatagtttggtcatagaacctagaagccaaaagccacacagaagggcaagaatcccaatttaactcatgttatcatcattagtgatctgtgttgtagaacatgagggtgtaagccttcagcctggcaagttacatgtagaaagcccacacttgtgaaggttttgttttacaaatcacttgatttaacacactcaggtagaatatttttatttttactgttttatacccagaagttatttctacattgttctacagcaagaatattcataaaagtatccctttcaaatgcctttgagaagaatagaagaaaaaaagtttgtatatattttaaaaaattgttttaaaagtcagtttgcaacatgtctgtaccaagatggtactttgccttaaccgtttatatgcactttcatggagactgcaatacgttgctatgagcactttctttatccttggagtttaatcctttgcttcatctttctacagtatgacataatgatttgctatgttgtaaaatctttgtaaaaaatttctatataaaaatattttgaaaatcttaa

SEQ ID NO: 10048 - DNA, 509 bp, Homo sapiens
agacaggctcttgccatgttgcccgggctggtcctgaactgctgaattcaagtgatcctcccaccttggcctccagaagtgctgggattatgggtgtgagccaccatgcctagccaaaatgtttcttaaggtatacattttgggtcttagaagacttatacatttgtaatatttattactaaatatctcaaagtattacaataaatgttaccatgtgagctactttgaatcaggcttcttgcacaccaatttaaaaatgttaactcttgatatatacactagttataccactcatgtcagtcaataaattttaaggtttaagtgcaggcctttgtttacagaaatcctaattttttgaaaccataactctgacctgacactaaattcctgtagacatgctaaggaaaatctgcttagtatcgagatcaagaactttcattcaaaaagattattcagttatgttatttgcatattaccattattaaaaataaaaaaatttttaaaagatg

SEQ ID NO: 10049 - DNA, 1443 bp, Homo sapiens
aatgttttgaaactgaaaaaaaattttacagctactgaatttcttataaggaaggagtggttagtaaactgcactgtttctgtgataatgtgaaatgagaagtatttacattggagggccaatggctggtccttcaagtgctgttttgaagtgcagatttccattaaatgatgcctctgtttaatacacctggtacatttctgaagaggggctttataagcaggctgggcaggcccagcttataagttaaagggcatcacagtgagggtgtagtagataaattcaaggaaataagagatttgtaagaaactaggaccagcttaacttataatgaatgggcattgtgttaagaaaagaacatttccagtcattcagctgtggttatttaaagcagacttacatgtaaaccggaatcctctctatacaagtttattaaagattatttttattaccgtacatatttctcgttttatgtaagcggatgtatatcctcttgttttatacaagccagttcccacttatgagggtacttttttggttttgctggcttaatattgtgtattggtcaatgaggccatttttacatttattacgttacagagttcatggaggttcacctttgtgactgattggtgataaaagatagccaagtgtcttacaagcagcttctgagtcaagtgttctaattttggaacaaagcaggttttactgcttttccagacacaaggctgctaaaccaattaagaaaataattaatttctttcaagcaactaaaaaatatatggtaatttaaaggtgtctgcttatttggttgaacaatttaattgggaaagtttgtcatcatttgaaaaaggaaatataaaaggaacaaccatatagccaacctgtggtctggcagaaacaacgtctctagcaatagtaccaaagtaagtaatggagtcttttttttggcaggtctgcagtaaaagataacattttcttttcttagtcctcctgctctcaacccccatattttgcctttgaatacgtgggttttagtatatatagcccaaaatggtaactgtctccagaacagcaaccacattgaattcttgtgacttaggaaagcttcttatagttgctgacattaattgcaagaaataactatatactactttgagaagtaaacatgtcaaaaaaaacaaagttcagatatgggacaaaatttaaaaattcagtaacatttataaacagaattgaatgaaaagagttacagaccaacttaaacatcaattcgtgtcagtaaactgacttttgggggtaatgatcattgttttgtatctcaaaagtattgagtttagaaatcagttgtatgatactacctttgtatgtctgtcttttcccgtgtatttttaaataactggtgatctataatttaataaaatttttcgttggtgtaatatt

SEQ ID NO: 10050 - DNA, 1558 bp, Homo sapiens
gatttatattaagcgttcataacttcctaaaacatggaaggttttcccctcaacaattttgaagctgtgaaattaagtaccacaggctataggcctagagtatgctacagtcacttaagcataagctacagtatgtaaactaaaagggggaatatatgcaatggttggcatttaaccatccaaacaaatcatacaagaaagttttatgatttccagagtttttgagctagaaggagatcaaattacatttatgttcctatatattacaacatcggcgaggaaatgaaagcgattctccttgagttctgatgaattaaaggagtatgctttaaagtctatttctttaaagttttgtttaatatttacagaaaaatccacatacagtattggtaaaatgcaggattgttatataccatcattcgaatcatccttaaacacttgaatttatattgtatggtagtatacttggtaagataaaattccacaaaaatagggatggtgcagcatatgcaatttccattcctattataattgacacagtacattaacaatccatgccaacggtgctaatacgataggctgaatgtctgaggctaccaggtttatcacataaaaaacattcagtaaaatagtaagtttctcttttcttcaggtgcattttcctacacctccaaatgaggaatggattttctttaatgtaagaagaatcatttttctagaggttggctttcaattctgtagcatacttggagaaactgcattatcttaaaaggcagtcaaatggtgtttgtttttatcaaaatgtcaaaataacatacttggagaagtatgtaattttgtctttggaaaattacaacactgcctttgcaacactgcagtttttatggtaaaataatagaaatgatcgactctatcaatattgtataaaaagactgaaacaatgcatttatataatatgtatacaatattgttttgtaaataagtgtctccttttttatttactttggtatatttttacactaaggacatttcaaattaagtactaaggcacaaagacatgtcatgcatcacagaaaagcaactacttatatttcagagcaaattagcagattaaatagtggtcttaaaactccatatgttaatgattagatggttatattacaatcattttatatttttttacatgattaacattcacttatggattcatgatggctgtataaagtgaatttgaaatttcaatggtttactgtcattgtgtttaaatctcaacgttccattattttaatacttgcaaaaacattactaagtataccaaaataattgactctattatctgaaatgaagaataaactgatgctatctcaacaataactgttacttttattttataatttgataatgaatatatttctgcatttatttacttctgttttgtaaattgggattttgttaatcaaatttattgtactatgactaaatgaaattatttcttacatctaatttgtagaaacagtataagttatattaaagtgttttcacatttttttgaaagaca

SEQ ID NO: 10051 - DNA, 593 bp, Homo sapiens
ttgataaagaccagagtccaaaatggaaaccagctgatctaaaagaagttactgaggaagatttgaataatcactttaagtctttgggaagcagtgatttgaaattttgaggtgacaggcttttaaggtatattttgtagcatgggttggcaatctacagcatgtgggccaaatccagcctgctgcctgtttttatataccctgtaagctaagaatggtttccgcatttttaaatggttgggaaaagaaatcaaagactaataattcatgacgtgaaaattatcagaattcacaaataaagctttattggaactagctatactcatctgtttatatattatctgtggctgctttgaaatgagtagttgcaatagagatggtaaagcctacaaagcctaattatttactgtctggtttttgtcagaaaaaagtttgtcaatccttgttttagaagatggaaaaatgtgaagatctttggagattctcttgagtggtatatctaattgaaatgggatcttcgtttggcttgtatgttgatgaaatcaacttaggtatacaatataaaaaataaagaccctgaaaattgttttgga

SEQ ID NO: 10052 - DNA, 1552 bp, Homo sapiens
agcatgaatttttttcatcttctctggcgacagttttccttctcatctgtgattccctcctgctactctgttccttcacatcctgtgtttctagggaaatgaaagaaaggccagcaaattcgctgcaacctgttgatagcaagtgaatttttctctaactcagaaacatcagttactctgaagggcatcatgcatcttactgaaggtaaaattgaaaggcattctctgaagagtgggtttcacaagtgaaaaacatccagatacacccaaagtatcaggacgagaatgagggtcctttgggaaaggagaagttaagcaacatctagcaaatgttatgcataaagtcagtgcccaactgttataggttgttggataaatcagtggttatttagggaactgcttgacgtaggaacggtaaatttctgtgggagaattcttacatgttttctttgctttaagtgtaactggcagttttccattggtttacctgtgaaatagttcaaagccaagtttatatacaattatatcagtcctctttcaaaggtagccatcatggatctggtagggggaaaatgtgtattttattacatctttcacattggctatttaaagacaaagacaaattctgtttcttgagaagagaatattagctttactgtttgttatggcttaatgacactagctaatatcaatagaaggatgtacatttccaaattcacaagttgtgtttgatatccaaagctgaatacattctgctttcatcttggtcacatacaattatttttacagttctcccaagggagttaggctattcacaaccactcattcaaaagttgaaattaaccatagatgtagataaactcagaaatttaattcatgtttcttaaatgggctactttgtcctttttgttattagggtggtatttagtctattagccacaaaattgggaaaggagtagaaaaagcagtaactgacaacttgaataatacaccagagataatatgagaatcagatcatttcaaaactcatttcctatgtaactgcattgagaactgcatatgtttcgctgatatatgtgtttttcacatttgcgaatggttccattctctctcctgtactttttccagacacttttttgagtggatgatgtttcgtgaagtatactgtatttttacctttttccttccttatcactgacacaaaaagtagattaagagatgggtttgacaaggttcttcccttttacatactgctgtctatgtggctgtatcttgtttttccactactgctaccacaactatattatcatgcaaatgctgtattcttctttggtggagataaagatttcttgagttttgttttaaaattaaagctaaagtatctgtattgcattaaatataatatgcacacagtgctttccgtggcactgcatacaatctgaggcctcctctctcagtttttatatagatggcgagaacctaagtttcagttgattttacaattgaaatgactaaaaaacaaagaagacaacattaaaacaatattgtttct

SEQ ID NO: 10053 - DNA, 269 bp, Homo sapiens
gtgaacacagaagagtgacatgtttacaaacctcaagccagccttgctcctggctggggcctgttgaagatgcttgtattttacttttccattgtaattgctatcgccatcacagctgaacttgttgagatccccgtgttactgcctatcagcattttactactttaaaaaaaaaaaaaaagccaaaaaccaaatttgtatttaaggtatataaattttcccaaaactgataccctttgaaaaagtataaataaaatgagcaaaagttg

SEQ ID NO: 10054 - DNA, 260 bp, Homo sapiens
caggataaactctgacgcaccaagaaaggaagcaaatgaaaaagtttaaagactgttctttgcccaataaccacattttatttcttcagctttgtaaataccaggttctaggaaatgtttgacatctgaagctctcttcacactcccgtggcactcctcaattgggagtgttgtgactgaaatgcttgaaaccaaagcttcagataaacttgcaagataagacaactttaagaaaccagtgttaataacaatattaacag

SEQ ID NO: 10055 - DNA, 1606 bp, Homo sapiens
gcttagagccaccgtgccatcctgtgctgtgctcaagcgggcagccagggctgaagaacaaactcttgcacatctccagcacgactcacccactcctgcgttcctgtccaggcagtaatcattgaccatatagtcatagtaagacacacgagaccaggctttaccatgaaagcgacctgtcacggactccacttttaatttgctcttaggttctatctctgtagaatgtctccaagattgaagaagaaactgagcagttgaaaaatgctaatctctttgacttagtcagaaaaaaacagaggataattaagatactagtcatgaaaagtgattcattcttttttgtcattccataagcttgctgaatagtgtaccggtaatatattgtatttccaccgtactctgtgaatctaattattattctttaagtgttgatatataatatacataaatatgtaagctaaacatataactatatgttttaagaagaaaacatctacgaaaggtaaaaagagatgatcagttggttgtttacttgctagaaaccattgttttattgcaaacgaaggaaaaatgaagagattataaaagtcagctaatgaagtaagatacgtagtaaagtcaggactattcaaaaagtaagaaagaaaatttggaaaatgagagaaacaggaaacaaagaatgccgaaaagaatgaaaacagagaaaaaatgtatgtgcttgaaagtaaaatacttacaatagtagcttaactatttcactctttaaataaaaatactaaagaagttcgtatatcctggaataacatgtcatcttcaaaatatttttattttctaatatttttaataataaacattttatagtgttaaagctgtatttttcttaataaataaaggacattacaaatatttctttaaggaagttcaaaaggatgttgtcttgttaacactggaacgaatataaatcttcaaaatacaattaatatatactgttttgtggaaacttagctcatactattctttaatgctcttcaaatttaaactaacccttacattccatgtgatgtgatgtaggcttataagatgctaaaatctataggttttggaagtgaaagattctattttttctttttttgtacataatgggaatttcattccagattatattttatttacatattaatttcacagaatattaatatttcttaacttcttaaagcatgctagcgttttatgtatatgtacacatatattcagacagggtaattttatctgctgcctaacattgtactaaaatattgctttatctgtttttaattacaaaatgctaatgatttcttaaattatagtttaaagacaattggcccaggaagcaaatcccctgcctttagtatgaaccactataagtaaccttacaaatagagttaatccaagacaatattaacaaactgtgctttgtctttaataaaagggataggattaacaaacatattgatggcataacctattcagctatgtccttatttttgcaataatgtaacctcaaatattggattgttgaaccaacaatggctgtgttaaagaagattaaataaaccgaaaaata

SEQ ID NO: 10056 - DNA, 288 bp, Homo sapiens
agggagcatgtttcacagtggctggactaccgagagcttggactacacaatacagtattatagacaaaagaataagacaagagatctacacatgttgccttgcatttgtggtaatctacaccaatgaaaacatgtactacagctatatttgattatgtatggatatatttgaaatagtatacattgtcttgatgttttttctgtaatgtaaataaactatttatatcacacaatatagttttttctttcccatgtatttgttatatataataaatactcagtgatgag

SEQ ID NO: 10057 - DNA, 218 bp, Homo sapiens
ccagaagacatcatttccttgttcctatttcttgttggctggctgagtagagaaagcatattttactacttaaacctttttttttgtttgtttaaatacatttgactaaagttataattatgaatttacttatgagcaaatgcagctaaacttaatatgactcatacttaaatgtaaggaaatgttctgaaataaagactaaagaaaacacactggca

SEQ ID NO: 10058 - DNA, 313 bp, Homo sapiens
cacttttttctttgactcatttggactgaatttgaaattttatatccactccagtgagattatgatttgtagcttcatatatgacatgtttatattgtaaatgcacttttccatggaataatttagggaagtgttttaatgttaaattactagttgctagcatgttatgatttcatatcctgagatagctctgcagataagaaaatatttaaatatatgacaaaaagtaaaattgtacatgtgagtttacatgttaatgaaataattcaacttcaaatgaacttaccagaatgttttgcatatcaacaaaaaa

SEQ ID NO: 10059 - DNA, 2024 bp, Homo sapiens
cctggaagctgaatgcccatctctgtggacaggcaggttcagaagctgccttctagaagaatgattgaacattggaagtttcaagaggatgcttcctttaggataaagctatgtgctgttgttttccaggaacaagtgctctgtcacatttggggactggagatgagtcctcttggaaggatttgggtgagcttgatgcccagggaacaacccaaccgtctttcaatcaacagttcttgactgccaaactttttccatttgttatgttccaagacaaagatgaacccatacatgatcagctccacggtaatttttagggactcaggagaatcttgaaacttacccttgaacgtggttcaagccaaactggcagcatttggcccaatctccaaattagagcaagttaaataatataataaaagtaaatatatttcctgaaagtacattcatttaagccctaagttataacagaatattcatttcttgcttatgagtgcctgcatggtgtgcaccataggtttccgctttcatgggacatgagtgaaaatgaaaccaagtcaatatgaggtacctttacagatttgcaataagatggtctgtgacaatgtatatgcaagtggtatgtgtgtaattatggctaaagacaaaccattattcagtgaattactaatgacagattttatgctttataatgcatgaaaacaattttaaaataactagcaattaatcacagcatatcaggaaaaagtacacagtgagttctgtttattttttgtaggttcattatgtttatgttctttaagatgtatataagaacctacctatcatgctgtatgtatcactcattccattttcatgttccatgcatactcgggcatcatgctaatatgtatccttttaagcactctcaaggaaacaaaagggccttttatttttataaaggtaaaaaaaattccccaaatattttgcactgaatgtaccaaaggtgaagggacattacaatatgactaacagcaactccatcacttgagaagtataatagaaaatagcttctaaatcaaacttccttcacagtgccgtgtctaccactacaaggactgtgcatctaagtaataattttttaagattcactatatgtgatagtatgatatgcatttatttaaaatgcattagactctcttccatccatcaaatactttacaggatggcatttaatacagatatttcgtatttcccccactgctttttatttgtacagcatcattaaacactaagctcagttaaggagccatcagcaacactgaagagatcagtagtaagaattccattttccctcatcagtgaagacaccacaaattgaaactcagaactatatttctaagcctgcattttcactgatgcataattttcttattaatattaagagacagtttttctatggcatctccaaaactgcatgacatcactagtcttacttctgcttaattttatgagaaggtattcttcattttaattgcttttgggattactccacatctttgtttatttcttgactaatcagattttcaatagagtgaagttaaattgggggtcataaaagcattggattgacatatggtttgccagcctatgggtttacaggcattgcccaaacatttctttgagatctatatttataagcagccatggaattcctattatgggatgttggcaatcttacattttatagaggtcatatgcatagttttcataggtgttttgtaagaactgattgctctcctgtgagttaagctatgtttactactgggaccctcaagaggaataccacttatgttacactcctgcactaaaggcacgtactgcagtgtgaagaaatgttctgaaaaagggttatagaaatctggaaataagaaaggaagagctctctgtattctataattggaagagaaaaaaagaaaaacttttaactggaaatgttagtttgtacttattgatcatgaatacaagtatatatttaattttgc

SEQ ID NO: 10060 - DNA, 187 bp, Homo sapiens
agcaccgcaactgagaacagagcaatggcagctgctgtgtgaggaccagtgtcttctgtctcagggcttattatttgtaactccaaaatagaaatgacaatttcagaattacctaacaaacagtgtatttatttttaatatgtgataatgatcttgtggtatatatgcaaaattattcctacaaaaa

SEQ ID NO: 10061 - DNA, 124 bp, Homo sapiens
gtgtctggctattttaaaactacagatgaagcttctcattagaaaaattcaaccattgtcatagctaaactttcatggagtttctttccccctcacttttatttttcagtttgtaatgatttta

SEQ ID NO: 10062 - DNA, 8229 bp, Homo sapiens
gattggacttaaggaatgatgaagataatttatgtgtttagggccagtgataagagggaacacacagatccatcagtatggacagcaagatcctttggagaagacaagtctatttttacaatattgaaaataggaaattagttttgtaatgtttgagggaagtagttgaagcatggttttgttttgtggtgtggaatccatgtagtaatcatttttgaaaaattcatgaagggatatatggtgatcactatcattgaggactcctgtgcatataaaatagtctgttttatcaactgtacgagaagtctgatatgagagatttagtagatgcagcattatttgcagtctcactgcaagcattctgctcatttcatcaaactttttttcacaaaagtaggttattttgaatttgctatagtttacctattaagaaataagtctttaaataactgatgaaatttatagctgtttggtttctcaaaggttaaatagccacagaaagcctttggttagtttttggcagccaccatgaacaaagtggatcttgtcttcttacatctatgaaaatagagctttgaatggtaaggagatatgttttcttggtaaccaatgcaagattgatgggtggaaacatgattcaaacttacacaatttttcttgctatttttcaaatatgaatcttactatatattctcggtgaacatcaggagactattaaagaggtctgctgttaaatgtaaagaaaaaatgctcgtagctatttgcttcctggtattggagcagttcagttgtttagtttataccattggattcaattcattgcaccatggttgccaaaagtgcctgaggtcataatggattgttaaaataactaaattccagtggttggaaactctaggtttgtaccattttttctgctgtgggaaaaaacaacaacaacaacatgatcaaggtaacatcacatttgatgtataatattatactattaatggaatatcagtagacaactgttaacccattagtagcatgagtataaacagtacacctgaataaattggagacattagccactaggtttaacagtggaatcttgatttgcctaggtgacttctgggattactgtttgacaaataagagtaacattttatttcatttcagaatttacgtcacttttagctacaagagtaggaagaaggtaatcggcaaggcagaagagtatactctttgccttaggatagcgtaaactcaggctgagacatacccggcttatagagttcttctagatgtgtagactgtaaatgcccaaatcctctcaactaaagttttagtgattccacaaagcctctcatgtaaatttccagtgattccaccattgcacttgtgaatatgtatccttgttagtacccagggatgtcctcgagcaccagttttattttatctgccattgcatctggattccattacagcctctcagctgttactgcctgtggacagttacttctgcttactgcctgtagagagttacctaacttctcttctcagttcttcctcaggtcctggctattttggcctcagttgaagggagtcttgctctcatctctgagggttttaagtttgtttgatcccattgttgtcttttctagctttgagcatgtttttcagtattcatattttaacttactgagaacattaaagggaaatgataaactcgtggtggggatatggcagacaggtgcttgtttgtttgagagaagtagcagaagagataaaatacaaagtgctatatgtttcagctggagaggaaagagagagaatttattagattatatacttgtcccatggcataccacgtatatgtttaaatagggacacatctccctatgtttaactatacttataaacaactttgatacacattgcgtcttttattctgtcacctgatattttagtgtatctcaagttacagattacatgtgtccttaaactatttctgaatttggacttagttccatatacagaaagaactttagaaaattcattaatttggatcttctattgatagccataaatattatgtttatgtattctaaaacctctttgtttagttagtactgttcatgaatgtaacaagcttcaatttctcatttgtgagtagtacatttgctttttgtttgtttgtttgtttgtttttgagatggagtctcacgctgtcaccaggctggagtgcagtggcgcgatttcagctcactgcaacctccacctcccaggtgcaagtgatgcccctgcctcagcctcccgagtagctgggactacagacacccgccaccacacctggctaatttttgtatttttagtagagacggggtttcaccatgttggctaggctggtctcaaactcttgacctcgtgatttgcccgcctctgcctccccaaagtgctgggattacaggcgtgagccaccacgcccagccgtacatttactttttaaagcagcagactaggtacactaattctcactcaaatattttcatgggaatgtagttatcaccaagtcctaaagtattatttatgccaaaaaaaatttcattttaaggactacaaaaatgattctaattaaacattttataatcaatagtaggttgggtctttagccattatatgtgtatatatacagacacatatgtatacacttacattttgacagggtcttcattgagtcttgatgcactttaaacccagctggctaccagagatgcgaaggtgggctctttgaagattagcaaaatggacgtttctgtcacttgagaaaaggaaagttctttgcctttaaattacacagttttcatcatgcccacaatctatattattggctggttaaacagcactgccctattagcaatgttaacaaaaatgaaattatttattggcggttatagattatctaattcaggaaatttctgagctcaacttttacagcaactgttatgccttctaatttagcaattgagttatgagtaagttttgtgcttaactcctagaccctattgttgataaccagatcaaatatagtctgtacagaggaaaacactgggaacatttagtatttctaaagcctcctttggagttactactgattgtaatttggaactgataataggtagagattgctaacactgttttttttcctggatcttttttatgccagaaattaaacaggttctgctaactcttttttttctcttggttatcaccagaatgaaaatatttaaagtgatgactctagaaaagccatctgtgcctggttaacattgagtttgagtctcttcaatatatattgatcatgtattgattaatctttattttttcatattttggctagacaaattcagatctatataatggaataccccttcttgagtgaactatactactaatctacatgattatatagtaaggaaaaaagaagaaataactgtaataggcatagtgtttgttgttggttgtcttgtcattcatgtgatactactcatttccaaaattcacacaaacttacatgaggtggattatttgttttgttcattatttagttcctatatgttttttctttagaaacagagtctcattctgtcacccaggctggagtccaatggggcggtcatagttcactgcagccttgaactctttggctcatgtgatcctcccatctcagcctcccacagcaggtgagactacaggtacatgccactgtgcctgactttttaatttttttgtagagacgaggtttcagtttgttgcccaagctgatcttgaactcctggtttcaagcgatcctcccacctcggcctcccaaagtagtgggatttcaggcatgaccacctggcctagttcctatacttttcttaattcttcagacttctcacatttagtatagtgcattcatttcatcttgctgtttattagcaccctttgtggccaagggaaataaaaggtggtaaaattcagttttcagtttagttcttgaaagctctgggaaatggaggaaacacaaaactatgaattaaactagggctgttgatttctgaacccccagataaatcagttgacccacattttcattttaggtgttaggtccaaattagcataatgtcttgcattattattaggttcagtgtgaaactttacagtgctgcatttgaagtttagtaactggttattattaatcatttgggaaaaatgaaaatgtgttgggactttctatgactaggcatttgttgattatttttcatgattgctttttgttttctcattgtgtaggatttgtgaacttgtatattacaggaaacaagatactttgtaaaatttactggggaaaatccatttggagtgcatgacatttgccaggataagaaagcagtaatatgtttgtattataaaattacaccctgccagaaaactttctttcctagtaaggtaaatgtagaagggacttttacagcatagtaagttgattaggagccaaaattttattccagtttttttttgaactaagaatgttttaaattctgtaatgaacttttatgtttacccattactcatgcattctttcacaatatgtttaatagcctgaggaaataggaaagctgtgaagctactaccattctttacttttaataagaataataggaaagaaaagtcaggtcagtaatccaaatccaaatatgtatactgcaaatgctcaagaagtcacattttttgataaattgtattgagtacagaagaacttatatgaatttattatctgttaataacttagttttgacaacagaataacatttggaaattgtgagaataatcaagctgtttttccattaacagtgtaaattcataacatgtccttcaaaaggtgatattctaagctgtcttaattgtctacggttgataacttttaaataaagtacaggactttctgaaagtgtttggcatgttatgctgccaaaaacaatctgtgttttgaaataccaattaatcagttaatttctgaagactttgtataggacttgatatatgagtcagaatctgtctgtactcattctgtacattgtaactttgaacacttatgaaaaactgtatctgttggtgtgttttgattagttagtgtagatttgtttgcgtatttgaattccgattttagtttaggaagactaaaagtagccatttttgtaaagttcatatgctattttttaatgtcatttttgtttttaatatttatacaatagtgatgttactagtaaaaaatgtttatagataacacgtagagctattaactgttcaaaagcctacatgataggcatattttgtatttcgtgttgcactcgttctgtttcatattggactttttacatcccttttttagcaaaaaaaagagacacatttgaattctctttagcataaagctgtgcattggaaactatgtgactgtatccatacggttagcaaaatactctttgccaccaaaggtaaatgaaactgtaaaatacctctggatatttgtgccaatgaacttttcttagcatattaggattaaagcaaaaataatcttttcagtatgtttcatctaggacttacaataaatgtttaaaccatgaaaacttatatttcataccctaatttttctttgaaaatattcaagatttgtagcctagtgtgttctattttgtgtgattgcttgaatgttttctgattttattgggtaaaagtttgcctagtaatgatctttcagcaattcattgaaataattatttgaagtaatcttgcttcagatttaatttgtgatgtacattgttgtacaagccattttagtacaggtgtctcatttatgtagttgaaaggtgactgtggaatttcttttgttttttatgtatttccattcagtctctttatatagtcacatgtttcacaggggaacttgtccactggaacctaacatagtacaaccttttaatatgcgtatcttaaaggaaaatattataaaacaagatattaatactaaagtgttaacattaatatgttgttctcatggaagaaaagtagaaaatgtgataggcttagaaattattttttatcagcattaagtgcttcaatttctccccataaagattctaaggaaatttcagttcctcatattatagttttccccataatttaatattactaagtatttctctgcccagtaatgttgatgcagtttgcataaatagccttggaagtaaggaggcaggacagaaagccaaatatcgaaatctctggccttgatttagtgacagtttattctaatggggaccataggtgttattagtaaaaagatagtgtacaaggcctaagttcagtttacattgttctttgaaatgagttcatcttttgtgttgaataattgtattctaagtaggagatgcctgtatttaacataatcatgctttctatataatcaaatatgtatttgttggaatactggtagaaataaccttcccttcctccactgtgcagtggaaaaaaaactcccgatttatactgtatataaattaggaaattatgttacatatttacatttttaaaaatataaaaatgacatattattttgaagtgattgtattatagtttctgaagcttatgactggctataaatataacaacatacccatgagaaaccagaccaaaattgaatatatatcatcactgtgaccttgaacttatagtcatttgggataaaacagagtgtgccttgaaatgataaagagtgccctgcaattttataactgtacattttattatgggtggtcctctcaaattggccccaaatccttgtcttcgaggttggtgaaataaaagtttaaaataaaagttgactggtatttcctttagtatttccagaactattgctgtagaggcctcccttaattttcagagttctcattttgaattaaagtagacttacgctacatagatgtagaaaattaggtttggcttaggtttctgaaaaaatattctaggagaaggtggtagcattgttctgaacttaccacacttggaaaaactaatcttcaaatgtaattttttgtcttattaatgagtaatctgtcaaagacatgaattctttgacttgtgctcattctttctgaacttattgaggcttatatatatcaaataaggttaatttacacaataattatttttaataattaataaactcattcatgtagtatattttaaaacattatttcctctcatttttccttctcttttttcttcctatatatttttaaggcttcaagagaaaacgggcttcagtttttaaaaaaatgtagacttgcatttttactgtgcttatttaaaataatggatataatttatattaaggtccaaattattttattcacaggataatcatggtctctgataaaagatgcccacatttctgtgtactcacagttgttgtatatttttcaatttcaattttgaaagtaaactcaacacattgttttcccattttacctccactacctactcgccagacaaaaatatagatttctctaaaaacacatacaaagaaaatgtctttccttaaaacatgatcttattgacatgaaggtagtttgagcaagggtatgtaataaaataaatggctctcaacctgcatcaatttttatactatagttaaaaaatttatagaggacaacctatgtgttatgctgagatagactcagtaatcatttgtttgcaaattgattatttttttctcatccatccagaaagtacagtgcataacaacaacacttaacaagtgcagaggaacctgtcctgtagtatataataaaaaatgattgtcaccttgctgatctttccatttaaacatgcatgatctccagtactttgtacaatgtatagtatattaaatacatttatgtgtaattttgtgtgtatttttatatggtataattaaaattattacatttatgtgattgtaattcacaaaaagtactacttactatattctgtagagtgtgttgtgaatgtttttacctgtgtttgagcattatggtgtaggtttaatagatgaatatttgccttcagtctctgctcaggtattaatgtgtagtaatttttggtgctttctttttaatctgtgataatctggtgttctgaatgttcaaaaataaatttggttgaatacgc

SEQ ID NO: 10063 - DNA, 849 bp, Homo sapiens
gtgtaactactaaagttggacttgaacccagggtcatagtcatttattcaataagtattaagagcctgctgtgtgccagactagctctggggagcacagtggtgaaagatgcagtcctggcttcccctgcatgaaggtgacagtcacatacctacaagtgctgaccaagctgggcagttttagttagaatccttcttttgatatgtcttcatttaattttgtgaagtctctctttttctttgctgatatttctggggtaatattataaatttagtgggctgttagaaaaattttatggactgacatatttggggaaactatttgtattatgtattagcattatgtattctgactggaaaatgacagttttgcaaatcagtttcccagaatacatttgaagagtttctaagctatttgtcttgattatattttaatataattcagtgtaacccttggtgtgaaagatctaaaagctgtttcattttccgctttaggaaattatttatgcatttgttttaaaggcaaaggaatttttttcatttaagattcttaagccgggcgtggtggctcatgcctttaatcccagcactttgggaggccgaggcagttggattacttgaggccaggagttcatgacccgcctggccaacatggtgaaaccccgtctctactaaaaatacaacaacaacaaaattagctgggcatgatggtgggtgcctgtaacctcagctacttgggaggctgaggcaggagaatcacttgaacctgggaggtggaggttgctgtgagctgagatcgtgccactgcaccactccagcctgggcaacaagagcgagactgtccccccac

SEQ ID NO: 10064 - DNA, 327 bp, Homo sapiens
ttttattgtttattttgtgtttaatgcacagctacttcacaccttaaacttgctttgatttggtgatgtaaacttttaaacattgcagatcagtgtagaactggtcatagaggaagagctagaaatccagtagcatgatttttaaataacctgtctttgtttttgatgttaaacagtaaatgccagtagtgaccaagaacacagtgattatatacactatactggagggatttcatttttaattcatctttatgaagatttagaactcattccttgtgtttaaagggaatgtttaattgagaaataaacatttgtgtacaaaatgct

SEQ ID NO: 10065 - DNA, 133 bp, Homo sapiens
agtcagaactgctgatggagacaaaggcacgaaagtgtacgtattccggattagcaacccaggaacccatcacttctgaagactctaaactgtgctgtcattttgtttttatatgcattaaaatatttgtttt

SEQ ID NO: 10066 - DNA, 460 bp, Homo sapiens
ctcctagactagtgctttacctttattaatgaactgtgacaggaagcccaaggcagtgttcctcaccaataacttcagagaagtcagttggagaaaatgaagaaaaaggctggctgaaaatcactataaccatcagttactggtttcagttgacaaaatatataatggtttactgctgtcattgtccatgcctacagataatttattttgtatttttgaataaaaaacatttgtacattcctgatactgggtacaagagccatgtaccagtgtactgctttcaacttaaatcactgaggcatttttactactattctgttaaaatcaggattttagtgcttgccaccaccagatgagaagttaagcagcctttctgtggagagtgagaataattgtgtacaaagtagagaagtatccaattatgtgacaacctttgtgtaataaaaatttgtttaaagtt

SEQ ID NO: 10067 - DNA, 1204 bp, Homo sapiens
gccatgaggtgaagcaaaggaaggccctgtaaataattgttaaaatcattgccaactgaccttattgtattactttctctgcatttatgtaatatttttgaatttttccagacccagcctttcctctaatctatgtaaactttggcacaacctcccagacaaggaagaataaccaacatatttatacatttagaatcatgtttacacttctctcaactaaaacatctggttaaacagatgttccattcggttattacacaataatctatttcagcttctcatgaatgtacaaagtagactttcttacaattcctggtaaggagactgaatatctcaatcagtattttacccaattagagagagttctcaggaagttacagtcttatttaagctgaaaaataacctctctctctctttttttttctctctctctcatacacacacacagctaattagtgcaaataaatatctatttcccaaatataataattaatccacattttgtctttaactatagcatgtatatacaaagcaagcccctatgtgttaaaatattttttgaaaaaaatcttttttatgtatctttgcttttaaagggtcatgtcaccaaccctgtactgattcattgtacataaatgttgttgctcctaaaagcctaaaaatgcagacagcaaagcagcatctcttaaaattcaatatgaaaagaacccataatctcaatacataaataccttagtagagagtaagatttaatttttttttattttaaagtccaaatactatgaagaggaaaaatatcaacttcaatttgaaactgaagtcttttacatctgtctagatttgaattctgcttttattttgacttgttaaatcctgaagaatgttgaaacctagaattttcaatctggcaggagtagaaagatgctcatagcacacgcgatatgtatgataacatattttgtttcatcttgcttttctttccccttctaatagaggtggctttgccttgacccagcctttaacaatctttaaaattctacaaaataaaggattttcatttatctatgaaaggcttactttgaaagatggaacctccaagtgaattacaacttattctatcattgatgaattcagcctattatatatttttattaacattgatgttgacattgtaagatcattttaataataaaacatcattttt

SEQ ID NO: 10068 - DNA, 1668 bp, Homo sapiens
gacaattgggcagctctattccagctcaactgatttcttgtccaatgatccttgcgtggccgagatccagcttcaacgaaccagctagaagctgcccgttgtgaaacttagtgttagttaatacctcaccatactcagttattccactataagctgtctaaatttgatgaaatttgctttttcagctgttctacaaaattatttaggtagatgtggcatgttggttttttatgtgctaacctaactgtaatgaccttttctacaacatgttttatccattccataaataataaccacattgggaatagtgaggtgtcttttattttctctgctttgtgttattttttcttatcaaacaattagatgttatgtttcatattatttgatatttattttcatatttaggataagaatcatttttaattataatacttttaatactttcatatattttacaacagtatactatttaatattaatgacaattctatttttgctttgctgttttgtcatttaatatgcttttgtctaatttttaattcatttattactgttactccttatttaattttgcgtctgccatggttttcagaatctgaatagtatttatacttcttttttataacattttccaaatattagaaataccatcaacatgatcagtattcttgccttttcatgtaatttgactatattaaattttttctccagtgtttgagacaatattgaaatcttcctataacataatttatttggtatcaaattttataaaatatggatccacctttggaattttgataaaagggttcatctctgacatgatcccataacactgactgaaattccaccaaattactgttctttgaatgctttaatccttaaaccttttcttctgatatgcaaccaatatattcaattatatatgtgattaatttttaaaaggacaattgttttcataaaatgcaaaactattttttacaccaaaggaaaattttagattctgattctaaatccgatttttactataaaattggaaaatagatgggaggggtgtcattcattgttcaaaaggtacagaacaaatcataggggtttttaatctctaaaatttctacagtagtacaggaaatattcctctttacattcatttgcagttctttcactgacctcctaattttaggtggagggggcagggggagccataaaagttggtattaccctaataaatctatctctttcctcccctgtttcaaccccacatgtattccatgctcagcagcagcagcagaaatagtaggatatagatcacaaaggtttttctggtgagtcaaatagggtgttttcttttgaaactgtaatgaatatgtttgccagtcaaatggcttcatgagaacagtagaaccttatgaatgtatactagcatacaaggatctcaaatacattaattattctcagttttaggaatgtaaatagattaagtcccacaatgaaatttcagaagtttttgttctgtaagtaaaaaattactaaccactgatgttcaagattttcttttaatagcactatccttgagaaccaaaaagtttatgttttgattttcaaatgttaaacaagatgctaaacaaatcctggactgttaataaaaattaattatgtattattggataa

SEQ ID NO: 10069 - DNA, 2710 bp, Homo sapiens
tgtgaacttctactaggcaaagcaatacatcggtccaaggattttctgctttcatttctttaaaagttttttgttagtttgttttttgtttttgtttttgggtttttttggctttatttttgtctttttatgtctgttttgtttttcttacccttttggacatttctttgttgcacaggatacacctatagactgaataagttcagtatttccgaatcagacatcgccttggcaaagacactaaagcgttacactttatcccgtctctatgactggatcatagtcattataatcacaggagactctgccttcattatccttgcacttaacggaagttacatcaggcaagtaccaggatgaaaagaactatgaaataaatgaaggaagctacaagtgtgtgtgtatatgtatatgtatatatctctatatttacatatatatattaaaattgcatgggacagagactttgcaatccgaaagaatagactgtgaaatgagttcttaaagaaaagacttgtttatgtattaaaaaaaccacttcacagtgagtcgctttggctttttgataaactgcggcctgctctcagggtggggtgactatttttgaattcctatttattttttgtgtttgtccctgattttttttttttaattctatggcttcctatctggcagcttaatgggtaatttttgaggtatgtatttaacaaaataaacgacactgccgaaaaaaaaaaaagtgaagtgaaaacaatcagggcacattaaaatgatacaagtcaaataaatcttaaagacacaatgcacacttaaaatgactcaataaaatgacttgctacgttccgttattcaatttgtcattactgtagtgaacagatgcatttctgtggaattccaaataagtaaaactgaaattcagtgcagagaaaactttgtccactagtgcaagtcttgatcaaatgacattttgacattggacatatggaattcatagtatgagccacattttgttgtgaaatttatttacctgcttgtggcttcaaatctgaaaattaataagcctgctcgtttaaaagttgtttgttgttgctgtttttttgtctttttgttttttactagaaaatagttcagtgtaatattaagttagaaaagaagttgctgcccagttaaaggggctccctctcaaataaatctccatccttccctctcccaaaagacatttctgatttctgcttcactttgggcttcctcttcttcgtacacattccatctacctaatcaaacattttcagtccctgatctctcctgtcccttttcctgggatgacagccctaacaagaactgtttttgaatcgttgtgcagctccaggcaatagagtatgtgaagcgatttcagtagaatcacttactcatcctaaaagaaaacattatcccagttacctacatcgcaattaccttatgtaaagcagaactaatgctgactggatgtttaatgggatgagcattaaagctgcaatctactatagtactccagatctctttcggcttcctatgagaaacaccagaagcattactttccacttctacttacagtaattgcaagaggagacctcacattcaggactggcctagtgaacgtaatccatgctttaaactggccattaaacagtcccacatggttggattttttttttttttttgagttgtgctttcacaaaaccttgtcaaagacctcatgcaatatcactttgaaagttattttctgtttactacacaaacattgtaatataactgttaatactatttatatatttgaaaggtataaaaggtaggagttaaaaaaaaaacctctatgtgtagatattaactcagaacttacaatatacagggagaagacatgttgcaatacaagctaattctagctgctcagtaacctctggagtttttaaagggacattttcctgtactttttcaaataatgatgtttaaaaattatcttgacataagcgtcatatacctttgcaaaaggatggttgtttgcagttagccctggccccatccttcctatttctgtagtatgctgcagctttaatcagaaagtccatggttgctgcttcctgatctccgagttactctttccaaattgtcttcttacactgttgctgaaggtcactctgtacacgtaatggaaactgattttgccaagctcttacaaggtggttcatctatcgatggcatccgcatttggtatcttttacacttcaaccaaaaatttattaggtatttttcaatgctaagtcttgccttttattttttaatttcactgccaagtttgcagtggttctaagtgaatctgtgggcattttagcctgtggtcttgccagatctttgcgaattacaatgcatatatgtctatttattcaatatctgtcatataatatctatttggaagaagaaactttctcttgtagtgcctcttgacaaagcacaatttcccgcctttttttttttttgtgaaatgaaaaaaacaaattgtgttttattgcggtatcaacaatgtgaataaggattaacatattgtaaatgttcttttttccatgtaaatcaactatctttgttatcactaagtgataattaatttttaacttatgtgcattgttaggctgttagaattttttggttgttaaaataaacgcattcaataaatatg

SEQ ID NO: 10070 - DNA, 1137 bp, Homo sapiens
tgaaagtggtggacttgaaatttcccgttcatctcccaaagctttcaacccattcgacgcaaagaagtgacactttcttaatgcagcagaggggaagcttaggtttatgttgaggattctgttcctggaattgtgtgagctaggaatggaggaggggagactttcaatggttaaggctccatttctcattttcccaacttttatatgattgtctatgggcagtttgaatttctggttttcaatttattttttaatgattaattcgtattaaggcaacaagacagtacaacaaataatctctagagaggtccactttgttgctgaagtaaacgttacttgttgcaacccgaggatgggcatgaggtttggccttaggtattcctgtctgggaaaatggagggggtgatattagtggttccctgtactatatcacagccaagagagattagagagagaaaatgtagatcaaggcgagctgcctacaaattactctgtctccaaaggcaacgtgaaaagaaatgatggggaggaaaaaaccccatagattgaattagcactttgactctcacttaattcaacgattttctttcctagattggcttttcttactcttttctgttagtagatttatttataaacaccacaagaagatctcttgggatcagaattatataatatctttgaagtaaattattaaaatatcctatttaatttgaatagtgaagttttgaaaatactttgaaaaagagaagtaaaagtttaactttttaactaaagttagtatttgtttttcagaaatgaccactgaagattcattctgattatacaatatgatttttatgcataaaatttccatgtaacttgaatttaatatttttaaacagaatattttgactaatcctctattttttcatgactattcagttgtgtgtgtttattcgtaaatgttatgttttgtaattggatcacatatttctactttcagtgagagtatgccttcactatgttaaaaaataagctcataaaacagggtactttttattcaaatgcttatcattgtactttcattgctttgaaagagtaaagtaagtatactcaaaacattacgttttacaaaatcaaataaaacttttccat

SEQ ID NO: 10071 - DNA, 296 bp, Homo sapiens
atctgtaattggacagctctctcgaagagatcttacagactgtatcagtctaatttttaaattttaagttattttgtacagctttgtaaattcttaacatttttatattgccatgtttattttgtttgggtaatttggttcattaagtacatagctaaggtaatgaacatctttttcagtaattgtaaagtgatttattcagaataaattttttgtgcttatgaagttgatatgtatctgaacagtttgttctaagtaccatttttcttcctacttctattaaagaatggacatag

SEQ ID NO: 10072 - DNA, 438 bp, Homo sapiens
ctatgatagacctggacaaataacttgacaaattgctggaacacacttattgtggtttacccggttttaattatgtcagagattgcatcatccttctgcttgtttacaactatgatcttctatgaaatggtggtaccaaggggcgcccaacagcttttatccccattcttagagcatattctttattataatgattatccaacatatttctttaattttaatacaaaaaatacatcatttaatttttgttacatatgaacattcatttttaaatgctcagcctcaagtgcaggcatttttgagtggcctgattacatattcctcccacagcaagtccgtatcctggaagtgttattttataataaaatttaaaaagttttaaagaattaaatcgtaggacaaattaattaaaatattgtgtaaaattaccttcaggct

SEQ ID NO: 10073 - DNA, 1129 bp, Homo sapiens
agctttcctttattcttgaatctcccatggaagggttgtaccccagctgccactcctctagttgaaagtgttgtgtttacatctgacattaaattatttttccagcatacaagatttaaatttgggaagggggggatgtcctcaattagaactttttgatcagcctggctggtaccgtctagtactatgcagcggtcctcaagttggagaaaatgtgcctttcattcattacctctctggagacttcttgctggaatgaacagtgtgctcagggactatttggaactggatgtttttgaattattttatacttagagatattctgaattttttgagggccttttaacactccccgagctgattgtttgcaagtgtgtttgttccagagtgtggaagtataaagacatgggcatcacgtaaattggttttgtttgctattctgtgtgtcagaaccaacgagtgtaatggagagggcaggtcatctcttattgtttctaaaacaacttaaaaggtgtagattgggaagaggtgagtgatccagctttctccttttggattgaggctatgtacttggtgggggcaggggagggaatatattataatactattcagttgggataatgggaaaaacagagtatatagggtatctacccagcctagaaagcacaggaacaatacgtcatatatttggaacagttattgtctgtgccatgaccttcatgataccagtgagaagccaggctagagaaataaaatcctgaattacattttagtaattgttttcaagacaacaaaaaataaaacatttcattattcttgtatattgacatatttttcttttcttgaacaacatgcaggtgagtagcatattaatggctggctgtaaattaattttgattcctctgtcaagtagacctaaaactcactgtaagatatttcagttttttccttaaagtgatgatttcaaacctcctgaatatttgcgcgagacttttttcttaggaaagaaaaaaggctcaccttggctactgttgtcagcttacagtcatcacataccccctgaaatatttgacacttggaaatgaagttcttcctgaaaatatcactgcaataaaatacgtactacgtc

SEQ ID NO: 10074 - DNA, 2206 bp, Homo sapiens
ttttgacatcctccctcatctttctgcttaccttttaaactgaacatttcattgtgcaagaagacacttcatcccacattgtgaaaatattggtcactgttatcagatttcatttagtttaggtatcttcatactgtattttgtatcaaaacagcaataaggttttctttatccctctttcctacatcttctcttcacctatcccttgtaaatgtgtttgtgaagcagtataaaatggttgccttttccatgccttcctttctccttgggtgatgtgcaatccatcgtaggctgatcggtcccatttcaacactgtgagactgagggtacattagaggaaatggtgtatatgatccctatgaaacgattctttggcttttgtttaaaaacaaaacgggtttgttctcataatctatagaactatgaagattactggatcatatttttttctcttaaccaggagtgcctcagagattctgctatgactttggacttctctgagtctgtgcaatcattttctggagaagcatggggaaaggtggtagactgctgcactttttcattaaaatgagggtagctctttctccacccccccatctcctttatcccgaagacataaatgttcaattacggaggcatttaaatcaagttgtgaccacctccattggagggcaggactcttgattgtgtaattgataatgcactttctcaatggctgtatagtcattattaacgtgtcttccctcttccccacaaggacatataaggtcatttctgtccttcaagtttggccaactaacaaatcagaatctgaggggcatgttctatttcccaggaatgattgacactttggtgctggggttttgtgggggcggggggtagtttttgtttagcttttgtggagattgtgtgtgtgagaggagatttgatttttttttcttcttttcctttgtgagctgatggctgaagtgtaacagtacatcttcaggtaaagagagggatttctcaatctactttctgttatgtcagactataagagaaaccctttcagctgctttctagatgtacctaaattcagtcagacattttggattaagaaacctaaagtcctgatacattacatactccaaggaaatatatcagggacagacaattggctgaaacactgatacttcaatgtgacacatttttatagaacatttctaccagggggtactgaccttgatttctcctacaaggaccacactgcctttgtgtttaatgtaatgcaatttgtgtaccttctaatcatatatctgcagttcctcatttttataaaactttgatatcatgccagtaagctagatgttgaatgtatgtaagtagcatttggtaactgctaagaggttacaaaaacattattggtaaaaaaaatttccttagttctgatctggttggataagattttatcataacttttctgggtctcaggctctgatgtttgaaaaagaagggaatatattgggttttaaaaaagtgtattgtgacttaaactgttataagttatccttccacagaatacatcagagctatcagtgctttgtacatttagatgtttttacttgattattgtttaagaaaaatatactgaatttatagaaagcaagtattctcctaattagcaaaagttaaaattttatctctaccattaaaattacaatagattttgataaataaccagaaaaaacgcctttttttttttcacacctagcaatcctcccgtttttattgtaaggactttcttttttccctaagagactttctgttagactctttatatatgagatgcttgtttaaatatggtggtctgtaacatttttccagctcatgtgaaaatggaaaactagaacctgaactagtatctacaacattgccaaagtccagggtaaagctaaaagttgataagtagacaatttattgttttgtgtgtgtctgtgtgtgtgtgtgtgtgtgtgtgtgtgtgtgtatggtgtgtatatgtatatatcacaaagttgtattttaaatattttaaataccctttcttttaatttaagggatgtcaaataaatgaaaggagtttaaaaatagccaaaataaatgagctataaaggcccataacatactaaaacaggcagtttcaggtatgtaaggaaaggaacattatacttacctagaaagtgagatc

SEQ ID NO: 10075 - DNA, 384 bp, Homo sapiens
acaaaaagttgctctgcattgttgaagatggttggcacaccatttctgtaggcccaggaaactcctgggagggttttcttgagaaaatgcatataatgagtttagttcttgggttgctctgactctctgaatgtctgaaaatgtttgaattcgcatctgaatttcacagcttatcacggactcttcactgaaaaatgatgctctccatactgggagctgagctttctctgagttttgtactatttttcttctaccttgacgtatttcgttagaaagaaactgatttgaaggccttcttcatattgaacttttactatatttgggaggtgtacctttgtcccctggggcatttaggtagcaaaaaaagatgatgtgttgatttta

SEQ ID NO: 10076 - DNA, 3335 bp, Homo sapiens
ggttcagcagttaactgaccttttatacaagttagcacatgaaggatagatatgcactgaaacatgtggtctggtctgacttgagagaaaaggaatgttgcacaagggttgtgaatgtgaaagggggaatggaggaatggaaataaaattgggatgagccctaatggaggaagtcgggcaaattgaaagtataaatgaatgggccatgagtgttcagagggagaaaagaaaggtttaatatactccttcagttgagttttcttgtcttgaacataaaaagtgaatacaaataaattcagtaatactaaaacatacagagatactgaacttgctggcacatttacttctggtaagcataaagcagagagaacccaggttagaaggatgggaagagaaaaggagcagttttattgcttatagaaagccgttctgaggggttggtggggtaagctcagtctattactgagacaatagtgagatggcttatatgtttcccctgttaatatctggttaaattatgtatccatcaaatggtatgctcgcagcattagcaaaattaggagtttcatctttttcattgaatcacaggtggagactcctattttcctttctgttttcaggcctttgagcccctgggagcccaaataccactcaattattttgtatttatgattaataaaagttcattttttaaatttgtatttttatacaacctccaaaaaaaaaaacaactgggtagagggtgggagggatttacttttaagaggcaaaatgtgagtaaattgaaaccaagaaaacttgtttttagaatatttcgtctgaataagtacagtagccaaggaatacaaacataattgcatgtttttaaaaattccttggaggctggaaggggttaagccagaagtgcaatcaataggaattagggaatgttgtatatttatatatgtaaactttttttgtaagaaaagttggtgacaactaaaccaactttttccaaagtgcgctatgcatatttttaatgaaagatgacatgtatttgcacaaaaattctcaggcacattaaattattgtaaactgaagtaaaacccgggtgcttgctttgagattgtggttttttcttcctaatgtaaaataaaataaaacacatctgccttcttgatatttatagaattagagaataaactttttaatgggggagtcaaagctttttctttttctctaaggttctttttttttattcaaactgtatgaaatggcaaagtgaggctctggggttagatttcagcattcagcagttgacacaggctaagaaatggaaagaagtagatctgttttttctcaatgttgctgagcaaagtctgcttctcatcagatgacgtggctttgtctagacagcacgcagttcagaaagaaatgtctttatacaaaagacatgatagagaaaagatgagagaggggactaattattttgtttatgaaaatggcaagtaaattacttgatctttttggtgcttaatttgcaaatgttttgttcctttgtcctgacttaaaggcagttttctgaagaactcttgactcttgctcctatggttcccataggcacacctattcccaggccaaggagagtccttcctctccccttttgaggcatccccgccatccccccacttagagctatgtgctcaaaaagccaacatgaatgcagtggtaaaaatttgttagtttcttatactttttagaatctctcaataaaatttttctaaataaattccacaaaaacaaagggtgaagatggtctctccctttcgttccccttcactcagttgtgctgaggtcaatagagtgtagagtttcagaaaggattccagcaggtttatatgtgaatataagtgtccctgaatggggcaggcattaaatagaagaatccctgctgtttaaatttcccgcatattccaattcacttttaaaaaataccatttgaatttgtatttcataaagtgactctggggtgcttactttagtcaattcttaaaattttttatttgttccctaagaaagtaattactgtttctgttgcctggacagttacagtttccaggaaacatcaggaagtaggaaactgtagggccagagagtagtacaacgttaaattgtccgatttatgtgtattacttaaagctataaattgaactagatcttgccgtgctctgtattgagtataatttgtatacttttttataattaatgactaaatgatcactttggaggcagggtggtgggggtgtattagcagccaaataagcacatctgatcaaaaagaaccaggcttagattttttttaagtacattgatgttgatgttccaccagaaacaccttaagtgtatactgttgtgtaatgtctctagaaaggaatcctgtcttaaaactgggttttgctgttttttgaagtttctacctaaaatcatttttggtatatcctgataatctctataatactagaattgtctgcaaaatatagtaagaagaattggagcctaatagctgattcctcccaatttatctgttatgttttgtcactattcacattttagtcttttctacgataaaaattgtatgtgtactttcatgccagtataggaaacctcaatcttttttttttttcgcctttaagaaggttttcagtgattatacctcaggtatttctgagtgtcctattgtctaataggagaaatatcttcccgagctcagaattaaaagttctcctaaattatgaagatcccaaatcttatgtaaataaccttaggcatgagtccttagggagaagttaatgaccattgttaaagtgcttttttagaaaatgttgtgctgtatgttcttgatttgacataaatgaatagactttggcaagggaggaaataagttaaaaggcagcttacaagagcctattccctataaagggtataattttacacagtactcaaagcttgttatcttttctgaccattttagtacagaattagtacttggtggttactaacatcaacttgtgacatctagaactagggctcttagtgtttagtgggccacttctctgatgtcagatgcatgcagacctgtactccacatgcaacccaacagcagtgcagtgtgataactgagcggtcgcatggcagaggacatccccctcagagtgggcacaagtgccctctagggcagccaggggaatactattgttcgatacctgggatttgactttgtcaaacagctctttgtgcccctatctttgttttgtcaaatgtagatcagttaataaacatgagtagcttgaattttc

SEQ ID NO: 10077 - DNA, 178 bp, Homo sapiens
aaaatgttcgctcatttgtgatattataaaacatgtttaactcagaatgatatgtgaggccagcagtcagaatatcacttctccattaacaaaatggtttggagatctcttcttttgtgtgacagaagtcagcaaccaaatttcatcttgttagaaccattttgttttgattaaaatg

SEQ ID NO: 10078 - DNA, 4071 bp, Homo sapiens
taccagctcacctttggaggaataatgacccagtatttgtcccatttttgtttttaaatgtatttttataagatgtatacatgtgtatttgtaatagattttttgattatataatactgaaacatctctcaatattatgaaaaatgttaaaattgtgtttgctgtttatgtctaaacattaatttgtctagcattatcatcttaatgacaaagggaataatgaactagaaaccagcaagtgaaagtgtttatttcctattttctcaaaacagttgtatttataactattaccttaaaaagcactggtttagaaaaagccataacttaaatagtgttataaaatatatatcaggtttaaacataaatttagcgaatatggtagaagggaaaaaagccttcatttttgacctccccttactgaataaattgaaatatgaagtttgtcttttctgaaactggcttagtgattgagtatcatgtaataattataatataatttagcttgaaagatgctctacattatgaccaataaaaagggaatgtatgttttgtttgaaaaattatataacctaaattttttacctagaagtaactaaaaagttgcttctcattataatctgtactagtggttctcatatctggttgtacatcaggatcatagagggagattttaaaaatctatgtagcaaaagaggctgagcagggcaaggctcaggggaataaaggagagacctgtgagcttgtgggctcccagttgacatctgcagtaccctttcctctgtcccttttttctgagtgacaagaaataggagtagaaattcaccatctctgttctccagctctttgtcagagaggtttctggttttccaggaaatccccctcttgagatgggtcctgcactgggaaagatctcttcagaactatatccaatggtacctcagctgttgtatatgagaccctaaagctcaagttgaggagaagactagctatgggaaaaaatgtttcaaaggctgttgagcacatcaataaaactattgagcctgccctgattagcaagcacctgaatgttatagaacagaagaggattgacaaattgatgatagagacagttgaccctgacaataggtctaaatttggagtgaacattatactgggaatctcttttgctgtttgtaaggctggagctgccgaaaagggattctccctgctgtcacagaattgtgaatttgctggcaattctgaaggcatcctgctagttccagctttcactgtgaccagcaatggttctcaatctggcaataagctggcagtataggagttcataatcttccccgtcagcaaacttcagggaagccatgctcgttagagccaaggcttagcacacttgagccgtgtcatcaaagagaaatgtgagaaagctgctgccaatgtgggggattgtggtaggctgcataatgtctcctaaagatgtccatgtcctaatccctggaacttgtgaatatactactttacttggccaaagggatttgcagatatgattaaggttatgaaccttaaaacggggacattatcctgtattatccagaagggtccagtgtaatcttatgagtccttaaaagcagagaagaaagccttttatgtctgtggtcagagaggtcagaagttatgatattgctggctttgaagatggaagagggggccatgagccaaggagagtgatgaccttgcagctgagtacggcccttggccaacaatgagcaaggaaatggatttcagtcacataaccacaaggaactgagttctatgagtatcccaaatgagcaaggaaacaaatcctcccctagagccaagaaaggaaggcagctctgtggataccttggttttggcctggtgctgcccatgtcatacttttgacatacagaactgtaagatagcaagtgtatgttgactaagctgctaaattggtggtgattgcttatggcagcaatagaaagctatatatcctagagaataaagaaggctagagctgctgtggaatgcacttgggaaagctggctacattgataatatgtaactgccatgggcatagttgcctttgtattcttccaggtctgggaagtacaacttagacttcagatctcgtaatgacccaggaggcatataaacctgagcagctagtggccctgtacaagtccttcatcagggaaaaacattgagtattccctgattaaggacttgtacagaggactctgttttccctggtgtttctggtgtgtctcaaaaattgtttgactgtgatgacagggaagtttggaagaagttcactgctaatgcatgtctccaggaagcagggaatgatctcacagtgacacttgaggcacattgctgaggccgtcgatgagaattcatgtaactttctccagcttacagtggactagattgacatgcaagctgatccagtccaattggtagggcatcatggtttctcattactcactgacttaaaatacttttattgccatcctggtgaagcactgcactgggtagataacacaggggcaccttgctgatcagagcccttggccaggtacaaagagctcagtttctaaaactctgtcatttcaataatgttataaattgaatcatacagtatgtaattttatgggattcgctttttttctgttgatctctttttttctgagtcatctcagctgttgtgtgtatcaatagttcatttccttttactgttttgtttggtttaactcattgacctattgaaggatatctgggctcattccagtctgtgaataatgctgctgtggacattcatgtgcaagtttttgtgtgaacattaagttttcatttctttaagataaatgcccaggagtgaaactgatgggttgtatgtagttacaaactgccaagctgttttccagagttggcggtaccattctaatttcccatgacaattttttgaagagtccaagctagttgctttagagtgcctcacctacattttttaattgtctgactttttcctaatgacatcacttaatttgttcctcaatctcctgaatttcctatagactggaggttaggtctggtggtttgattagattttttaaaaaaatatgacttcatctgtgatgctgtgtactttatgttgcataacatgaaccctaagaacagagtgagctgctggacagcaagtttcatggggtgcagtaattaacacaccacatagtataaatctgaaataatgacaaatgtgttaagggccttgggatattgggccatgtactctgaggagcacaaggtgaggtgcaggttcctgcccctaaagaactctatcttttgagattagcaactaacagtgtgagcccactaataggatgtgaaagttgtcaaaatcaagttctggtcattgtgttaaaaatcctaacaaatagagctggggaaggccgtgaaaggacgattttcatgcacagatgtctgataatgaggactatcattaaaagactgcacaaaaccacaccttgcacaaaggccatcacaacctgacacacacaaaaaatacttctatgaggacatttgcccagcaactccctgtccaatgtccaactggcaacatccttgttattgatccttgtagccaaggataattctctcaaaacaatcatttttgctttaaaaaccgttgtcttccttgacctccctgtatatgcacatagtttactgtggcacttgtattcttattgcaatgcctactcctgaataaacatcattttctttcagagagtctccctctctgttatttaggctgacaaggatatgccaagaagtagcttggatatagcagttaactctgcctttaggatatgtgtatggggatataagagttaactaaaagctgacctttgagttggtccttgaataaaagaagaatagattccaaaaataagaggaataaataatgatcctgagctaggagagtacattttgcagacctttggtttccatattaagaaattcagatttttatgtacaataaagaagttctggaattctctg

SEQ ID NO: 10079 - DNA, 313 bp, Homo sapiens
gacttcttgtttaatgctggagttttaacactgtacccttgatacagcgatccatagttgcaatctaaaacaacagtatttgacccattttaatgtgtacaactttaaaagtgcagcaatttattaattaatcttatttgaaaaaaatttttattgtatggttatgtggttacctattttaacttaattttttttcctttacctcatatgcagctgtggtagaaatatgaataatgttaagtcactgagtatgagaacctttcgcagatttcacatgatctttttaagatttaaataaagagctttcctaaat

SEQ ID NO: 10080 - DNA, 1297 bp, Homo sapiens
gctgcataacagcttgaaaactggattatctactacagagtgttataacaccatctggagtcttcctgtagtggcaaaaaagaacagtgttgaaattggaaaggactttgtgttatttaggttgttagaatgagccttaccaataataagagccctgagcccagaaaaaaggactgtatagtttaaagggaggattgaaagggaggtaaaaaatcagattagaccagttcttggcctatgataagttccaaaaataccatttatctactatttgaaaaaagaagaggatatcccttcctacagtaaagggtatgtcagctacatgaagttgtaagaaaagcttccagtagagcttcttatattaaagaagttgatggatatttttgaatttctggtttgcctgaatccacctgcagttaccccgatccgtttgcaagaaccagatcgtacttgaaactatagtggccacactctgccttcctgagtcccttccagtcatgtgtgcatcatgtctctttgccaagggaggggagaaaggaacttttaaactgcagttttaactttttctaagctgtttcttgatgggagaggttctgtgcaaaactaccacattctgtccccaaaatgtggaatgcatccaaataggagtcttctgcctcttaacttaaaagaacataggaattttgtttttggtttctttatcatgctacagagagtgaatacactggaattcagacaccgactctgagctgctaggaacctcatttgtccatgtgcaaacgctgtattccaaggcctgtgaatggcagcctgaggaagttttgcatgcaggctgtgttttcgagcaggactaacaactgggaaataagcaaaaaactgcatcgatccccagcctggtgttgttcttccctatacttcacactgaactcaggatgggaagaaaaaggaaacaagctttggctttttccatctcaaaagtattgtggcacctcaacatttcagtgttttgctttttaaaaaatgccctattgtaagttgttggtttatactgtataagtaacactagtagctgttttgaataacataggtgctcttcctcatctcatctcctacaccgtggtgagcatacagagtgtcctgatttgtgttaagtgactgagaagatgttaattacttttgaaaaaggatcatggtttttgctctactttataatcaagacaagtgtttattaaaatactgttttggaatgttggctgtaatgtaacagcaattttcataataaaaggcattcatcttt

SEQ ID NO: 10081 - DNA, 1073 bp, Homo sapiens
atattctttttattttttttcttttccctcaatccttttttatttttaaaaatagttcttttgtaatgtggtgttcaaaacggaattgaaaactggcaccccatctctttgaaacatctggtaatttgaattctagtgctcattattcattattgtttgttttcattgtgctgatttttggtgatcaagcctcagtccccttcatattaccctctcctttttaaaaattacgtgtgcacagagaggtcacctttttcaggacattgcattttcaggcttgtggtgataaataagatcgaccaatgcaagtgttcataatgactttccaattggccctgatgttctagcatgtgattacttcactcctggactgtgactttcagtgggagatggaagtttttcagagaactgaactgtggaaaaatgacctttccttaacttgaagctacttttaaaatttgagggtctggaccaaaagaagaggaatatcaggttgaagtcaagatgacagataaggtgagagtaatgactaactccaaagatggcttcactgaagaaaaggcattttaagattttttaaaaatcttgtcagaagatcccagaaaagttctaattttcattagcaattaataaagctatacatgcagaaatgaatacaacagaacactgctctttttgattttatttgtactttttggcctgggatatgggttttaaatggacattgtctgtaccagcttcattaaaataaacaatatttgtaaaaatcatactaatgcttattttattttaattgtatagaaagaaaaaaatgcctaaaataaggttttcttgcataaatactggaaattgcacatggtacaaattttttcttcattactgtacagtgatgatgttaatgactttgaagcactgaaagttactgaagtgccttctgaatcaaggatttaattaaggccacaatacctttttaatactcagtgttctgtttttttaaaaacttgatattcctgtatggtgcatatatgatacagttacctaatcatgttgaataaatgggcatgccaaaaatt

SEQ ID NO: 10082 - DNA, 6383 bp, Homo sapiens
ctgaagttataatgtcacttcagtggccttgagacatcaattttgcaacgtatttccttcgtggaaaggatttagattgtaacccgcacacaaaagcacggtgtttgtgaatataacacctgtcagccaactttagacagatggtaaagaccacatttgaataagtacacatctttcatatcttggatttgcagctgttggtactatgtggaaaatattagaaacttctatgtggaaaatattagaaactacagagtttgcgatatttagatactgaaatttatgtcaaaataacggctaggaataattctgtcaatatggagttgagcttatttctttggaaacccttttaagttgccttgctggctgtgagaattttatatgtggataacaaagatagatagatagcatgtaaattgggttgtggtttggggtcagtttttaaatgaaatagtagcgaggaggattttctgttttggaaaacaccattagaaccagaccagctttgttttgggttagagagagtaagatttgagaactcagtttgctttaatgaaatcacagagaaacttggtacttgtttttcttcatttggaggctaaaatgtaatgttttttcattcatacaaaataatggacactccctaattccattattaaatcttgaaggggaagtagcaggataattaatttgctaagcccatcctctgcagaaacagaaaaatctatcttcccatctcctaaaactcagaatgcacagtaatacttaaggcttgtacaagtgtcttcagacccactttttcatacacttgctatatagtagtatgcagtatttatattattcctgaaaataaaatgaggggagaatattccctaagcaactggcaatagtattcctgaaatacctagaaatttctatctgaatgagggagacacttatgaacaccttatccttacatatatttgcatacttatctcatattttgtgacataattatttaacccagaatactttctggcagacatacagaaagctctgtgtgatcaataagggagtgtctcatttttctacttccctctttctgtgggtgacatgatctgaggttctatttgattactaagcaaaatctgttacccctacagggtttagaacctaagtattagagaggaaggctatttaatggaagttagtgtaagctgataaaaacgtagctaccgtacacacacatcaatcactcaatttcctgtccttttaaattgcccaccctttaattttgaagcaatttcccaagtgtgtgtttgttttatatttgtcatccagtccattgcatttccataagaagacattttgactggctgggtgcggtggctcacgcttgtaatcccagcactttgggaggctgaggcaggcggatcacgaggtcaggagatggagaccatcctggctaacatggtgaaaccccgtctctactaaaaatacaaaaaattagccaggcgtggtggcacgtgcctgtagtcccagctactccggaggctgaggcaggagaatggcgtgaacccgggaggcggagcttgcagtgagctgagatggcgccactgcactccagcctaggcaacagagcaagactccgtctcaaaaaaaaaaaaaaaaaaaaaagacattttaactaagttattcacagtagcttccatgtgctcttagttctattctaaacaggcttatttagaaaaggattgcttgtaatgtttgtcatggtacatagaaaacattggaccagagtaggtaaaatgcagtccatgtcccatccatagccatctacaatagtaactgcccacaggctctccagaaaactactacaatggccaagtacagtataggctggaaagaccttatctgaaggtcagaaacattgactcagaaaaaaggtatgaagtctttccataaaatcttttcacaatattactcctatttcttttagattttaatgagccattacttatctcttcagaagacttaagtcttcctttatactcagtgaaatttcccagaatgtaatactgtcactgttctgccaagttccaatcaccaagatcatgattacgaatcccaatctgaattctatacccatggtgactctgatgctctcaacttttgagtgcctcaaaaaatgctaaaactttggctgggcatggtggctcacgcctgtaatcccagcactttgggaggccatggcgggtggaacatttgagggcatgagttcgagaccagcctggccaacatggtgaaaccctgtctctactaaaaatacaaaaattagccaggtgtggaggtacatgcctgtaatcccagctactcaggaggctgaggcagaagaattgcttgaacccaggcggcagaggttgcagtgagtcgagattgcaccactacactccagcctgggcaacagagagcgactctctcaaaaaaaaaaaaaaaaaaaaaaaaaaaagctaactttatgtcttgagagtttgtaccatttttctttgtagtggtcaccttgctaatgcattagttctgagatatttatctccctcacatgtgtgcaaggaagtccctgttatcgaatacagatactttaacaagcagacaaagcagaaacccaaagtccatactaggaacaccctaaattttccaaaagcaaaagttctcccgaaatggagacatacaagggacttttattattctgttactagtttctataacatttcttctttcaacagagtatatgtttcccatttaacccagagcaacattaacttccttagcaagtccagttctaacttccaacaagtccaaccactgtttttgaagagcatatcagtaactatattaagatgaaggtaaccacattcgtattttctcaagattagttatttgaagctcagcagtttttgtggtcagaaagaaattttgctctattaaaccaatactgctaatataaaaaaccaccacactgaagaaacgagggaaaggacgggataagcacagaacagagaatgactggttgctttttgtctcaatctagataatccattcaataagaagtaaattaattatccttaaccaatggtaggctgagaacaaccctcaaaatagatattttttatgttaaatggggagaaatatctatactttatgttatactggataaaaatgtgttttaagtctaaaaaaaaccagacgagctaaactttgcctagtgtgtctacaaccattttttaggagacgcaggaataccagggcataataagatcagattggtgtaattttgtatgtttttgaaatccttcattaattgtagaaccttgatatgattagaaacaaactgtatttcaacaaacaggtttcagtatttgcacactgaaaaagtgttttgtattttaactataaatatttcacgtatctgtatagaccatctagaaatgtagaggtcttacagcattagaacgaaggaagtttacatgtgctctatctatttttctgagcctcttttaataaagattgcaagaaggcataaaacaagagtttgtttcctgaagtttttagtacaattattgttttcctattcaaaaacttgggttttacctcaagatcatagtattaggaaagtacattgagttgatacggacatgggagaacgaaaataaaaccagggcaattaatatccttgtaaggccaggcgcggtagctcacgcctatataacagcactttgggaggccaaggcaggcagatcacttgaagttgggagtttgagaccaccctggccaacatggtgaaaccccatctctatgaaaaatataaaaattagctgggcatggtggcagatgcctgtaatcccagctacttgggaggctgaggcaggagaatcgcttgaacccgggaggtggaggttgcagtgagctgagatcaggccatgcactccagcctgggtgacagagtgagactccgtctcaaaagaaaatccttgtgagatgaattcgttcttatttcatatacaaggggactatgtaagatatgggaaataatataatgtacgttatttatgtaaatactttcagtaacaaaaactaacaaatatcaaaaatctgagcctagacacaaacaattaaatataagccatagtatgtaacctgacttattgaaggcaggaataaaaagaagagagccagaattgattcagttatttttgtcttccatagtgttggcagggccctgcatttctctaccttgagcaatgaagcagtcccagaattttggaatatagaaattaggaaggaaaaacgaactttaaaatattaatttagtagaactgaaagtaatgcatttcatgcaacagtaaagtgcttaaacatggcaaagaaaactaagggacaagataagaaaaatggttggtaaagatgggtcacatccagaagcccaacataagctatttttccatctttttctgtaccatttaaaagactactaaagagttcaaaacaaactgtccttggcatttaaagtcaaaacatggttcttcactcagtggtgtaaattaactactcattggccaaagagtaaatacaaaaaggagatgaagttctgactggtgttgtgggtgagattttgcagtgtatgtttttacatttgtagtgtacgttttaaacttccggttttcttgctgcctcaacatctccacaaacaggctgtgagcacctggcccagtgtgatatgggtggcccctgccacaagtttcccttgctaccttgcccatgacctagtaacatttaaatgcaccagtgaaattctctttttcttgtgtgcttctccctgacccaaaggctcctgcccatgtcttaggcctctccgctccccacctgcttggctgagccccctcccatgtgaccccctctcagcatgcagtgactggtctctctaggacctgtgagtatattacaactttttttcctgtgtctctcctgtgatatctcttgtggctaaacctcactgaccataacctaaaaaaacacatacaaaaaacatgaaagaaaaagttgtttcttgagctggcctggacgaacggggagccaggggctcgaccctggctgttggaggcgcagtgaggcctggtctccggctgccagaccacgctgagcggagcgcgcggcaggctcgcctcagcgctgcggggaacgcgcgcgccgccgtccgcggtcgcccgtaggtgcctgcacgcgtcggggtcacggcctttggccgacaggagcgagaagactcaggagccgccccgcgccttcgatccggcgctgctggagttcctggtgtgcccgctctccaagaagccgctcagatatgaagcatcaacaaatgaattgattaatgaagagttgagaatagcttatccaatcattgatgggattcctaatattatcatattaggcagctaggatgacacatcaaagaagcaagaagtggagcagcgctagttcataatttaaaaaaataaaacagccaactcttcttagtaccatataccttttaaaacacagtggcaagtaataagcggaagagaagaatctttctgtctctttctacgttgactgttcttattccactggtttatttagcaggactgttccactcagcctctgtagaagaaaacttcccacagggctgcacttgcacagctagcctttgcttttacagcctgctcttgcctattaccataccggtgtatgtattcttccacctttggacctggatggttattaaactcttcatgcataactgatgcaactagagtcaatatgctgtatatattaatgatagctcttgggcatctatctctgaaagctcaaatggatggaatttagtttgtgggaaagaggctttgctttgagcatatcaggcttaggactgtggacggcttaagttgcagacgcttcttttattgtactcttgttctgcccgtgttttttgaaggctctgacataactgctttatcagaagaaacattttgacagtgtcttgttggagataaacatccctaattgacatgtgatgactacttcttattccattcatctaagagtcattgaaattttgttttctttgtttgtttagcttcaaggtctttggtagtcacatgttagggatgactgaaataattccaaaggagtgatgttggaatagtccctctaagggaaagaaatgcatttgaacgaatgtgatataaaaccacataatcaaatagaaatttcatgtacttacaaaaatttagtttgtaaaattaccttcatttctttgacattaaatgcttatattagcaataaagatgttgacactttctcataaaaaattt

SEQ ID NO: 10083 - DNA, 229 bp, Homo sapiens
ttatctatctgataatccccatttaaaataaatattagcattttttaaaatgaaagatttaatgtaaaaacaattttgtgaatagcttcttatggcaaaatatgaatatttacagttacctgttctcaaaggccccagtattctctcttctttcctcagttaatcaaatcctctgacccagatttattttttgctgatattttttttctttgagacagggtctttctct

SEQ ID NO: 10084 - DNA, 253 bp, Homo sapiens
aagtgaacaataatttgactatagagattatttctgtaaatgaaattggtagagaaccatgaaattacatagatgcagatgcagaaagcagccttttgaagtttatataatgttttcacccttcataacagctaacgtatcactttttcttattttgtatttataataagataggttgtgtttataaaatacaaactgtggcatacattctctatacaaacttgaaattaaactgagttttacatttctcttt

SEQ ID NO: 10085 - DNA, 5619 bp, Homo sapiens
ccaccataggactttattttcatgatatctgtaatcactgctacaatcagctcacctgatcatctgtgaattcaggtgttcagagcctcctggtatgatgttattcaggtagtgtccagctatatgtgtatgtgtgtgtgtacacgtgcatgtacacacagctgtacagtgtgtgtatatatgtatacatatatgtatgtgtatgtgtatatagagagagagctgagagttattctatttattccttttctctcctaatctgaaaatgggtgttctgtattttgggtggaagaggcatagaaggggatgtgtgttgtctcttaagatttctatatcatgtggattggaccaaaaacttctaatcacttatttagaaggtatttataagtgtctgtccatgtgtagcctattcgtgcatgttgtgtattatataactaaggaatagatgtagaatgtgctatttctggttgagaaaaatcaccagaatgtttggtgtatctataaggcttttgtgtttgtttttccccagttggctgaagttagaattgcttgactgacacttcattgctatacatgaaggggcactttaaatcaggaaaatctctcagcttcatagaacgggtaactagtgcaggatggggaaatgttcacagacatcatctgtatgtggttgtgcatagaaagtaaatacatggcgtaattaactcagctgttctagctgcagtactgctgcagtgatccacccacatttaggatgtgctgacagataagctctttgcctacaatacatggataattagtgctataattctggatagttcctttttagtactgttttatgaagctttatcaacttggcttcatgatcctcactttgattgattttaagaggatggataacacagttatctctgtaatgttctgtcccagtatgtctttgggtcaccagttaccttcttaaaatatgtgctttaggtaggtgttattacatatctgtagacaattggtatatgaaatatacacatcctgtgccccaatatggtgcattatgaaaaacaaaatcattttctaaaatgcattttttgagcattgctctatagaagggaagggtgatgagagaacagaactggcccctgtacaggtgtcattaatctggttgtatatgggttataatatgtaatacaaaaagctcattaagtatgggactacatggagagggaagacagtttcatttatagctactggggctaccaggacccttgctgactgcagcctggttgtgattagttcaggttactaggtgttctgatggagtgggacagtccaagtccagtaactgacattacgttttatgcgtgtgcagtttggtataacgtggagtcagtgctctaacgacacactatacttctatatgcttttttctgtgaattttccttggtacatgagagaaataagtactctcatcaacttatgataaattggactattaggaataaaacaatctcagagcagctcctaaacaagagaataaaaatgggccatcccagcacttataaggggagcacatcttgtaatgaaagtctgtgcctattgttaatgattaccaatgcaaactgcagaaatcagttgacattgtcccacaaggaaaaagtgatgccagtaaagtgggggaagagatggtaaataattctagaatgagcaaaagtgcttaattagtacagtatactcaaggtcttgcataacccacactccacgaaaaccgcatcgtaaacagagagtgaacagcacctctccattgctacatctccagaatattgttcggttatgttcatgtggttatggagcaataagaatatataccattaatttttaggtctttcaaattgttcaccaagttttgtgtttgatatttatgaagtgatctttaacacatctgcattgttaatttaagcatgcacagaaatttgggtaatgtttgagtagattgccaagcgctactgtgattcatgaatgaatttctcatagtcttctgcctgcagttttatagtttgaggggcacccatatttgtgggttagagttagtaagaatatgaatccagttatcaaagtattcatccctgaggttttgagttttattgtggtggtgattttctcatgagaaggtagacaacacttcagtttttcttgagggggaaaaaatgtacccgctaaccttttttcacccatgatttgagccctaaaacaacagcctttatgttttcagtgcaggatttcttggaatttcttgcttgtatcaatcctgatgatagccatcctgaacagatgcttctggtctgttttcctggaatagcagacatccttttgaacactaatgatgccaggaagagagtaaggctagaggaggagactcattttaaccccagtccagtggcttgtccgacaacaggccatttccctttacattcctccacagacagaaatggctattaaaaatgttttaacctcatgtatgaactgaatttaaaaaaccactaaagtgatactttatacttctgttttactccctagtgggttttctttaatttggatttttgttgggatgtagcttttcctagactgtatttctgtagctctttttctctggtgtattcatggaaagcatctactgccgcacgacactagtactgtgccttctttcactgccctctgctctgcagctctcacccagcttggctgcttcaagtctgtgcagttgacttggctgtactgaaaagtgaacagcatggattaactcatcctgctgctgagggcagtgcaaacaggtgcttattagaggtagtgacttgcttaattagtgacactcctaatttctactatggataatttcaaagtagaatcactctatgcttagagttttggcaccaatgctgtagggcagcagaatctattctcagtaaaataacttatggtttattagatattctgtattggattttaccagcttgacttttactgctcagatgctttctttcccccccttagacgctgtaattctcttgggaagagtaactattcttaaggtttttacagatacccaccttagttgtaaattggatagtttatatttctgggactttttaaatgaaaatgtggaatgttaagttacaaaagacttttcatcagaaaatttcaaacaaagtaaacatggcgttttatagtcctctaaaatctaggtgctcccacccaccaaaggcatatcctgcaaagggctgtgaactatcttggtgaactgtcttgggtcccctttccatgtatgttttcttgtcactgaaaacaaacaacgctgagtttatcaagaaaatttaaattgggggatcataataattccaaccaagtgacaactctgacatcaaggttattaggagctgtacatccaattcaagttttatttgctgctattctgggagaataaacttgtatatggagaataaactaataaacttgtatcgaggaaatccataaagttataaattagcctgaaaaatatttcaggtaatggtgtggattggcctgctttgactctcagccaccaacagaaatctttgtcacctttgttcctcagctaaaagtaattttgttataaacacaaagtgactttaaacaggtaaaaaacccattcctatttttgtacattaccaaaagtttttcatatacctacagagctaactaattacaactgatttaatccactcaagtttagaccagttaaacccataggatcctgtatggttatcaatgtgatgccttgcttttcataaaataggtataattgggtcatacacttgacgagagggtgactgtttctaggggaagaaaaccctttagattgcaggtaactttcacttttttttttttaatatacactttacatttgtataaattatgcagggtactcctaaccctgtagaaatgtatgacctctcacaaagttgagatttgatccaaagagaaatgcaagtataaaagaattagatacttattatcttttaaggtttttttttttttttggtagagatgggggtctcactgtgttgcccaggctggtctcaaactcctggccacaagtgatcttcctgcctcagcctcccaaaatgctgagattacaggcatgagccactgtacccagcctttccttataaaattcaaagagaaaatttctacacctttatccctcaaataaaacaagtgctcagttcttaccgtgcccttgcaaggtctatatgtaaaagaaatctgaaatttagctgtagaataaaacttgataaataaaaagaaaaaacatacatttctccagttggtttgctctttgcttgttgaagtaataaaccgttttaaagagaaaatacttgctgtaaacccccagtgccttcaactcttttggcagaatatttttaaagaaatccagcaagcaaactttgaggtgctaatgaaagtaaaggaaggtggtatttctagttttggcagaaatgaaaagtgtctcacaagagacatcactacccacgtggggtctggctgctttctaccaaagacatttagagaagtgaattgagtcagggtgatggtgaacactacatattttatagatggttaagttgagaattaattatgtttatcatggatggctactaataccaagctcatgattgttgcagcctcaacgtcttaggcagtaaaacttgtctgcagcactaaagggggagaaacccttatattttgcaaactgtccattcgttaaatttattgtaacctaataccaaaaactgccgtttttcatattatttccccacctcctacttttttttttttttttgctacttgtaaaataaccccttctagaaaataagcattaactggaatgtttcaaacaattttgcttcattttactatcagccactagtgaactcttacagagatgtacatttaagataaaattagcttgtgctaagtgttttaaaaacattgtttactgttaaaggggaattgcacattatatttaactgggattgctccctccctcagttctttaaaaaacaagagtcaaggctcacaccaacttgtaggctgtgggagctttgccataggtagatacaatgtagaagtatacttttttaaagcatgaagaagacaaggaacttcattataatgtaccaggtagaggacattattattcaaaggattatgcacagctcagtgaagatgaagttacaatttttctcgcagctttgttgctattattttcttctgcataaatgtatgctcatttcattatgtgccttgctccctgattgtgcaaagctatatatatatatatatatatatagatagatagatagatatatgagagagatatattcagtactactgaggatgtttttctgaggatgtttttgttctgctggattaagttattttccaagttactcttgccagttatgtcagtaaactattgtaatggcttagcacactagtcgtacagtcagtgtaaatgtttttcatttacatgttttcattatatcagcttatcaaatccttaataaaaaaaattcatagatttcattt

SEQ ID NO: 10086 - DNA, 607 bp, Homo sapiens
aacaaatgtaaagaatgtcccccctttacctgcattgctggacttctgtgcatgttggatgcaattgtctcacaccaacacgagtgtgtgtgtcaagcttattcattcctgtgtgactgtgcacgcctgctcaacattctcatactctcctgtgtcagcttactagcatcaaaaagccatcctcattccaccaggaagccctcctaaacccagttatagcatctgcttgatgtggatgcagtcatggactgaaaggtaaactggagccatcacatctccccttggaagtccagtgctcagaggaccgccacagagggttccatgtagggcaggctgtgtcaaagtcatacagccaaggtcagaagtcatgcatcctgtcaccattcaaacagcttttgcagccggacatttttcctagattgttagatggtctagctattttactgtggggtaaaacaagttttctgtttccttcttgcccgcacaatcagattttagccttcctgacattgtccatctttatgatcaccaccaacttctgcatccttttcatgcatgtcccagactccctgctttttagttttacacaatcaaagcttacctctgt

SEQ ID NO: 10087 - DNA, 10647 bp, Homo sapiens
gggtgtctgtgtgtttgcaggcaggtggggaacccagtgttttctatctttgtttcctctttagcacccctctccccttttcctaaagaagatataacagatggggatcagaggggcaccccccttcccagttcaatgagtggccctgcagtggacctcgctacagtgttcacatgtgctccttagcactggtgctcattccctcctggcaggcccactccgccccagtggtttccttagtggttcagcacagtgactggataggattgatttttagcagcaagtcctagaagtggaagatacctcagaataccagtgccctttactatttcctagtattcagatcagtgctttccattctgttgccaggtttttacataggtggttctagatagaatgatcttattaattgagttcctgtataagagacagcaaatggtgtgtggcaggtcaagattctgacctagcaccaactgctaaacaccacagtgaggccaggattccattcgtaattgtgatcatgtttaactaaaagaaaaaaatgtgtcttttgactgcctgtgagtatgcgtgtgcccacgcgtgtgtttttgtgcagtgcaggaagcagctgtcccattagtttgatttttttttgttctccccttccccctacttaatgagtataaaactcttacttttctcctgtcctacatctcacagtcctaataaggttggtccttcttttcctcaagtttcctgaatagggagggtggtggactggtcgtgtgagtagcacaacctttttctgctaaaagttagcccaagaagaaacagaacatagaaagcttggattcccgtcagtgaggtagggatgtcctaaaaagcttgcctgggatgactgcaggctgccggggttctggggcctgatggtcactttgtcttttcagacatttgtttgtttctaaatccctctctcatggaatacatttgcaagatgtaattaaagaaaatattttgatgtgaaaaagcaggataggtcagatagatttgaaaagatgggatctgtcaactccttgatccatcttttgcttttgaatttttcatgtttacagtagtgattctttggtaagatttgtaaaatgttaagacacttgtagaatcagtgtaccagttgtgaagtgatgtgtaatatctgaaggatacacattttaaagtttctttcaaagcagaatatggaaattagatataaattttattcgccctttggtccttttaaaataattcaagtacttgggtttaagtaaatttgaaaatagctttgggaaatgtttttaaaatgccaggattttaggggttaaagatcatatggggtagtttaggaagtttgtgactatgagatgaatttgtgaggtttcttgcctaccttttttcccccccagagaagggtggaactagattttaaaggcatctctactctgcttttgctgagtagtttcactgtcccttgagataccattggctatttatacctgagtctagtctaattcacatatatatatattttaaaagttgagagaacatacctattgatgtggttcaataattcatttgtcagggaatatttgatcttaattcctttctaataggtagtgattggatgtattttcctacttcctgtatgtaatctctttatgccatgctagttctaaccagtcccttcttttgaaagcttttctttctctgctttttaaaggaatgatggtgatcagcaggcattatgcagataccacgtgcctgaggttatggaggggaaatgtcacatgactgtatgaaatcattatatgccctattttgtatttattgatgtttctttttgtgggccaaaaatatgtttgtaatatatttagtttttttaaaatcatggtaattgattggaagatttatttttaatagctttgccttttttgcagagtgcaaaatttctaaattataacttatgtcataaagcaaaattatatttggtatcaccataaatttctattctgaatggtgagaacagataatttgaatatttctcacctgtgagtctatattagtaagcttttttattttaatgtactgtaatgaagtggtcacgagtagttacctcggctcaaaaatgtcatttagtttgttaaactattttcacaaccatcataagcataactagataactgtccattcccagcagttcagtttagtctccattgtgtatttaaaggttgtcgcagagcagcacattgacttcctcatcagccctttgacaaggaagggaaagtcgtgggtagtcgatttgaactttttctgtctacttgtcccctcatgttagctgcttgaaattcttcagttatgatacaaagctgagtttgcagtaagttgcacattttattgtttgcaattttctgttttatgtgcatttaaaagcccttctctgctttctagtaaggaggcatgaaattatcaggaatgttgctagttacagcttcacaccaaaaactttgagtaaatacattttcgtttggatgcccatgatgaaagctgaggaaagtggttgaggaattatcaacaacaaacttttcctcttattttatctagttcaaaacagatatcaaagtttgcaatttgctttgctcttgctgtttcttatgagtccctttttggaagagaggagaacatctataagcccagagagatctgtgtttttcttttacttaatagagccattctcgtctattagtaggaactttgctattaatatgtatagaaaggaatgaagtggcttttactccagaaatatgaaaattagtatcttttaaaatagcacttatgctatcacaaggcaatactggaatgaaaaacaaatcttatataaggtcctaaataggtagaaactagcttttattctagtgttgaacccaggagaaatagtggcaaagaagtttcactctgtttctgcagttctttgggactatttataaaggccagttagattgtgttactgtgatttaatttacaaagttgctgcagttaatggatacattctgtgctctgagaatctgaattccattctaatgtgtgatattcactggctatgatcagtagtatctgaagaaaagatgggctttttctcctttactctctctacataattattaatattattttaattaaagtacttaagacattgttttttcttctgtaaaaatggcttagcaatttgcacatctgggtaggttatgtagctagtaaacaactcaatagtaagtagcaattatacttaacccaccaagtgacagactatgcaatggaaaaattttctaattatcgtcacatagcttagacagcaaaggattattttctctggtgacctaccatgtgtgatataactgctttataaatgacttcctgagcaatttcatgttggcaggcagtgtggtgtgtctagtgcccctctatgagaagactataatttaatcagaaacaaatagtaggcatggggagcaagttggaaagtgaggttattattttttttccttaaaattggtgttactgtctttagtggcttgaggctaaagaaagctgatactttatctttgccaaataattatttataagatttatttttaaataagcccaatctctcacctgcagttaagaatcatcattttctgtgactgacactaaagctcttccttatcagagcttgttctcaatctgtgatcacagtccacagtggcaaagacaactctttgattaggaaggaaaccatgtttgggatgcacagaggtgccctgtccatacggttttcttcttacatgaaagaattgacctttctgttgacctataccattctgtttttataaagtgggattagaatttgagcatatctagtaaatgccgtgtggtcagtccgctgatgcttgcccgccgtctttgccgtgccttggcatcctaggggtgctggtgatggtcagtgggcatcatcggtcagcagtgcacgtgtaaggcaatctcctctcctccaggttagttcagaaggtcgctatgggttggtattgcaaaaagatgagtatatgaacactaaacttattaagaggtttgaaattcattaaaaattagttttcagtttcttcatctttcttttcagacttctttaaaaatactgttcttaatctggtatatatagaaatctaatattatggtcttctaaatggtcaacagaactctccagtttaatgaggcaatttagaggattccttgaaagaaaatttcatcatactgaacagtcctcatttgtatctcttttgttaccagtatttacattgttccaaggatttttttcctgacaaaaaatatatttctcgggagtggagagttttttatatatatatatgaaagaacatagatgtttccccccgcccaatacattaactgaatcttcactggcattctgtagaaaagttaaaacagtttaataatgtcttaacatctttatacattttcctatattctggaggaaaccagaatcatgtttagtagattaaagtaacattttaaatactacctttccaataatttgtaataaaataccagtgaaggacatgtttggatatctgttaagcatttttccctgactaatgaattaggaaagaaaacataaaacataaatgaatagttatgtctcttctaataaacagtgtcattaatgctgcagttgtgggtcaaacttagggagccttatttctaaatagcaaaaattctgttttcacttcagcccttatttttttttgttagtttttctctgcactgtgatacagagctaataagaggaaatgtgacgtttcagagagagagcaagcaaattgggtatgacttttttaccctatgttccccaatactggggatgtttggctactttgaacagcagtttttagtgatctaaagtttagatcaatactcgtataagagaaaaatctaactctcagtgagctccatagggcagcacagctttccatcttctctttcgccttcttgcgtctgcccaccacagtcccgaagaatgcacacgcacatatgatctgtacccatcccgcccgaagagtcatagaatcctcttctttcacttgtttcttttttcttcgtttgtttgtttttgtttgtttgttttttaagctggggaccactgaagtaagctctgtatgcacccaaagttccccttggaaaaattttcaacacgcagtgcagaaggctccagtgcagctaaatgccacaccattggttctacctgggggaatagactgatttgccctaaaatgactccaacctgcatcattaaggtacagttggctccagtggattagtgctgaaatgatgggaagtctgacacttgttgacattgtcttcatctgtttggaagggttgaatctgttcctctcaacagtgatagttcttttcactgtatagtattgagtatgtctcagggattccttgtggaaattagggcagtttttaaaataagaaaatagttttaaaagaaactaaaggtgactcatcattgaagagagcggaagaaagaggaaacatttggttttgtagcccacagtgtcttgcataggactttttcctttctcctccaggctctcatctcagcttcagaatacagaatcctttcccatcacgcacagctttaaaacttttatttaaaaatttccttccccaatgagctttcagaatacttattgtagattttaagagaaaaggtatattaatttatgctattaacatcacctcataaattataagttttatactaaagctgtatcgagtgtaatgaattatgttgcctatgtgtttaatagctaaatatatatgagcttttttttttttttttttttttgacaaaacaaactagtgaagcacctttttacactggatctctgccgtgtcaaggtgtatagctatcctttgctaccttgcagatatataaaataaaaggatatcctggggcctcaaaatgtagaacacctttagaccatttataactgttcctagaactgttgagaatcatgttctttagtaaatgatctgtggtttacacttaagatggctagaagcttagttacagggtacatagaaatacatagatcaagtaaaactccaactactgtagctggaatttgtaaactaagtttgtaagacctcttttatttcctatggagttattctttaatttacagtttattctgtaagttgggaagtaaaatagagaaaataataaatctagatgttctcagtgtcttattcaggaactttttatccctcctcactaaggaattcccactgtgactttaaaatagaactaaattacttgtgtgcatgtatatgtctgtattttttacacacatgcaaaaatatacattgggggcacgtgtgtgagagatatgaatgtgtgcttatataaaaatagataaaggtaaccgaatgtattgtagaaacatgatttatttagttgagggtattggagttactttctcattgtctctgttgtataaatacaccaaattaatcattatgttatcttatgttaaaaggctagctctgatatcatgtgcattttatgttaacctttggattaacttatattatgctatgttcataaaatgacatgagaaacaggaggttctaagatcagcctctcactttcgagcataaaaataagagagggagacagacagccccagacatgagctgtgtttatctattgtggtgatgggaccacagatctattgaatcttttttatgttaattatagatttctttatattcgagtaagaaaatattgttgatcatcttttcttggtgaagttaagaaaaagtataggcctttcataaacaatttttggaaggggctgctttgtttaaggagttggtgggatcatttcaccgtgcatatttcaaagctggggtgatttcatttatttccaaaatttttcaaaaaacttttactcagttctgctgttatttattaacttaagagtgctcccatccccatatttcagctataggaaaattgtgctacccctgattcatatggaattaaaaaaaaatacatccctttattttgagttttaagttgttattttgctatacatttattactggagtatctggtggtctgaaatagtcaaaagtagagttggtattaaatgttccaatgacatttatttttaatacttaaaaaatcatgtactttgaaatatgtcaaagcaacttctgataatatacctgaatttgtagttgtctcttgagcatcatttacttcatcttagatatagtgaagatctaggaaagctctatatgctgttcttttctacagttgtatttttgcagcatctcctggtttcattcactcttgttttgggatttttttttagatctgcatatttcttgtacatatgcatgcaaatgaaagaagggagtttgtactggtgccatttctcccttcagttgctggttaatgggatttgctagaaaaaattctcccggttgaagggtgaaaacagacccttatgtgtatatctgtacagagatgtgtatatgggatgtggtggcactttgctgaatgtgaacttgccttgtcaatggaaagattgaaaagtattatgtttatttatacatttgtataaatctatatatacacgtatgtatatgtgtgtgtatagataaagctatatacatatatttcccttaaaaatgtgtgtgtataataggtaaacagcctttgttaagcaagattaatgtctatggaaagttctggattattctgtaagccagaggaggtgacagtctagagtacatcatcagaacatactaaaatggaagtcctttggattatagttttgtttatggatattacacaatgaatgcttgtctgaacagttcttacttgccagttccactattcttcatcttcaccaccttctactggtcagtctttcatcacttaaaaaaaaaaaaaaaatcacacatcattgtggtttttttcccccttaattctgtctcttctagccagaagcatctggcttaagcatatttcatcaacttctctgttatttcttttaaagatctttatctctgaaattttcccagaagatacaagttttggtaatattatcaataggaattttgagacttgggcattcatctttgtctcaaaaacaaacagaaagccaaccttcaaataaaacaaatttgaaagttttagctcaataatttggggacattttacttaaattacaaaagaacataattatgattttatgatcgatattagtgttaggtttatttccacacttactgtcattaatttgtcatttacatatttttatttgctttgtagtttaatcataacttcaccatttacattttaatggaaagcatacaaggtcacatgttagcctcttgaattctgtaactaactcatttttctcatgatgaaactgctttgatgaattcctgtgtgatgaattctgctatatttccttttgacttttctcagtttgtgacattctgtattaactttgctgcagctctctagaaaacttgcatccctatatattgtgcctttaaagctcttatgcacacacagacaaaagtgtatatatacatgtcagagcatgtgtacatatgctttcgtatgtactcacacagtatgtctctagtatatattgtgggagtagatatatagatattcaaaggcaatgaaatattgctctccagatatatatgtatataaatagtgttgatataactgtatatacacatgtatatgtatgagttttaaatggcaatcttttacatttagcaaaatgctgcccctactggaatattgtcactgcagtggcagttgtatgtaatgatttaaaatacattatcaaaagttatttaaagaacatttaaagtctcatctaaagacatccacacactatttatttatcttccttttccttttattgttgtgtttttcttaactgaaagggagactgtcattttaaaaatgccatctgtcccatgagagtaagaaagagctggagattcacttgaggagctttgtgcatttttcctctctctgaagtggagatgttccacagaccagactgtttatttcacttataaagcaatcctaatatttccgttagtgtatgtcagccaccatctcctagatcaacttaattcaccaatttgcctcctcctttcattaataaataatgattattgagatcattttgcctgggggaagttaactactcccatgctgcagggaaatatatcacctaattgttattttgccttgttcaaaattcaaatttgaaagaaggcagctctctcatgaagctgtcttaagcacattttagttaagggccctcccaaactcttttttctttctttctttctttcttttttttttttttttgcgagttccaagttgcatgtgcttgaaatagatttaattcttattccccacagtttaggtatttttcattagtacatcaatttgacacactgaatgcaagactattaaggaagaacgattaaatattattttattttgtgaagagttggcagcagattacatctcaagaacttgcagagagaggaaggtagatggacaatcctaaattgtaagatgttacaaaaaacagtgaagtaagagtactcctgaagactaaaatagagaggctggggtttgagccattttactgagtagcttagctggaacctgatatcagaagtagcctttaacaaaaagcctcttggcaattgtatggtactaacaactagagtactgaagtgtaagttgaaaccaagttgcagtgggaaatcaaaggtgaggtagcttatttgaaaccagcaaatgagacaggttggacagttttaaaatctcttctaacaaagaaactgcacggtagcaaggactagcggttctcaaagcccttctttttcagtgttctcattcaccttggcacccaagtatgtttaacaggccatgcattaaaaataaatacaaaaatataaaagccgcttaaagggaacttacaaactgacaatctctcctctgtatttgtgttcatagtggctgggagtttaattatatgcacaaaagttaggagccacttgtttctgcacagactgtaggagcaagatgaggagatgggcaggttttggtaagagcccccagttctggtggacaggcatacttgtggcattgggtgcggcattgctgggaggaccacgtcttgggaggcgattgacttttggtttgtaatttccctttaaacaagaagagatggctcacattttccatatatatctcaatgaatgtactgtattactgttttaaaaatttgatgaaataataatgaattggtctccttttgttatctggtccttgtttaatttgtttaagggtttttgtatacaaaagtttacatttttatgtatatttttcttgtgtaaaaactgatgtaatatgtgtatgaaacactgtatgtattatctgtatatagtgtgacaaaatcatttttctttctttcttttggatgtattaataaatcttgctgtgaagta

SEQ ID NO: 10088 - DNA, 1105 bp, Homo sapiens
agcttctactaggatcccagttttgccgcagataattaatggacaactgtagtgcagtgatcctttacaggtttatttctttgtaaaaaaaaataataataatttgaatcatgtaatatttaaggttatactatgcctatttgaaaatgatattagttatcaactttgcagtttgaaaaacatgtattgtgtgtaaaggttaaataacaaaactatgcagatgctcttaaaagcattgataacctttgtgacgaacataaagagatccttaaattatgagttgttggcttatcttcataaataatttgtctgtaaaatggatgaaatgaaaagaggttcaattaaaacctacttttttctagtgctaaagaaaagatttaagcaccttgtcaagctgggtaaataggaaaaatacataatcatgctcagatatgtatctaggataattataattaataataatcatagtaacaatggctaatgataatttagctttattatatgtgctaagcactctggttttacatgcattatcttcttttgttcttgctacaaccctgtgagatagtagtattatctcattttactgatgaagactgaagcctaggtatattaaatagcttgcccaaggccacacagcaaaagtcaccaactcaaacctacttcttatttactccaaagcctgttgttcttaactgcaacatattatttcgtctcattaatgttgattctataggttgttacttctaaaaattagtattgagtttaatggtgaacacatttttctattttctcttgaatctgcttctataatgtcatggtgatttatgtggcttttttttttttataagttatacatgtatgcatgtatacttatgagacctcccttggaatgagggaggtctcaagagatataatttagattctcattgatgttctgtattcattatcctaacaccatctgtagtgttaaatcaactaaattatttcagcaataggagacaaaacaaccagctttcataatttttaattgtcaaaaccaaaaggaatcagaataaggatcactgagaatttaaaaaaataaaaaaggaagtaaaaattttac

SEQ ID NO: 10089 - DNA, 864 bp, Homo sapiens
gttattacttttccacaaatcagtatatggctttttatgtgggtcctctgactgatgctttcagattaaaattgtttccaagatagagagccgactccactttcatagttattgtttctggtcactatataggcatcacatttttgtgtggatatgaaacttaggaaggatcctcttgactccttgtgatgtggcaataaattttttttaaaaaactgaaaatacttaggaaggatccgcataatttttttctgcaacttaaatgaaatgcatcattcttgttaattataccatggtgaattaatcacttttgaagcaatatcagttattttttgaataataacttttctaaagccttaagtcttaatattaaatatatgattagccaggcacggtggctgacacctgtaatcccagcactttgggaggccaaggtggggggattacccgaggtcaggaattcgagaccagcctgaccaacatggagaaaccccgtctctactaaaaatacaaaattagccggtcatggtggtgcatgtctgcaaacccagctactcgggaggctgaagcaggagaatcacttgaacctgggaggcagaggttgtggtgagccaacatcacaccattgcactccagcctgggcaacaagagtaaaactctgtctcaaaaataaataaataaaatagataaataaatatatgattaactaattttaaaaatgttaaaatgtattcttaaattcattttaattttgtacaataacctgctagacacatttttaaaatgcaacatgtgtacttaatttctttatgtaatctatgtatatacatttatgaattaaagtaattgttggttatcttaaaa

SEQ ID NO: 10090 - DNA, 408 bp, Homo sapiens
aaaaccgaaaggccagagttgccatggcatcggctagtgtctaaaggaaacgccatgaggcagggggctggacttcaggcggggacccattgcctcgcagaagaaagttctcacttataaacctctgtacacacacacacacacacacacatatacacacactcacagacccacacacatacacactgtcatgcactcaactatatttaaaatatatacgtctattctttatgccttgccctagccagatggaagaagatgaagaaggaaaccaggtgaactcagcaaggcagactggctgcttacttcagcactattggaattatttcccgctgttgccaatggaaatcaaagaaaatggatgtgacgtctgtgcaggtggacggcagtccgaggggcttatttcac

SEQ ID NO: 10091 - DNA, 929 bp, Homo sapiens
ttggctataatttataagaatgttgtcattgagtgtgtcacttaaggtcttagactgcaaatctaaccatatttaatgaaatgtcttactgtacaaaaagtctaagccaaaggttctcaggggagaaagcacatgtgcagttttaaaacaaagcagtgctttgtcccattgctgtgatttttagtcagactttactcagtctgaaatgcaattaacattaaaggattaagtgtgagatttcgatttatgctatttgtgtatcccatactcctcccttttaataaacagtttccactgatgatatgaagggccggtataaagaagtctttaaatgagtaagctttcttggtaagattaaatcttacaaattatttttaaaaccttgtgatatatacaatgtttagctgagttttctaattttctggatgtaaaacaaaaggtttaacctatacattccttgagctgttagtgctatttaaatcttttgccctgtttaggtcctaaacacttttagttgagtaggatatgagcttttttgggtctcatatcatgctttttgccttaatttcaggtatatatatatatataaataaaggaattaagtaaaaataaaatttcagttactttttaaaagcacctgaaatctggccggatgcggtggctcatgcctgtaatcccaccactttgggaggccgaggcgggcagatcacctgaggtcaggagttcaagaccagcctggccaacatggtgaaaccccatctctactaaaaatacaaaaattagccgggcgtggtgtcaggcgcctgtaatcccagctactcaggaggctgaggcaggagaatcgcttgaacctgggaggcagaggttgcagtgagctgagattgcaccattgtactccagcctgggggacaagagcgagactccatctc

SEQ ID NO: 10092 - DNA, 4394 bp, Homo sapiens
gaggctgccgccgagggactcggccggagagctgaggggaggggggcgttttgtttggtagttttgccaaggtcacttccgtttaccttcatggtgctgttgccccctcccgcggcgacttggagagagggaagaggggcgttttcgaggaagaacctgtcccaggtcttctccaaggggcccagctcacgtgtattctattttgcgtttcttactgccttctttatgggaaccctctttttaatttatatgtatttttcttaatttgtaactttgttgcattttggcaacaatttacctttgctttgggggctttacaatcctaaggttggcgttgtaatgaagttccacttggttcaggtttctttgaactgtgtggtctcaattgggaaaatatatttcctatacgtgtgtctttaaaaaaaaatgtgaacagtgaacgtttcggttgctgtgactgggaagttgttgggtgtgctttttcagccagcttctccttccactgcttaaagtgtccatgattctttaaggtgagctgcagtttatagccccaggtcatacctaggaggggagcataatgagctcagggcctccccaaagtgacaaggttagggagtgcttagcggttttgtgttcagccttagctttgtttatagagggaggttcagtttcttttctgtagtgcttgtaataattctcactcctaacagcaccatcgttgtgtcttgaataagttagaggtagcattatagaggatctggcataaatatttgcagtagtgagagcctaagcgatggtgattggtggagcttgaattttaggctggtgagatggcagctttgtgcctgagaggtagtgggtggttcttaagcttcagtgatcccctttttttttttttttttttttttttaaggaacttgtgttataattttggtaaaagtataaacccactccctctggacaatacttagcgacagttgctaaagggggctcctttttaaatgtaaggactgaaatggatatacttctaataagtaaatttccaacacttatttgctccaccccctcccccctcccccctccccctttatcatgttaaacagcctttttgcttttcttattcctcctctcctggagagctgtgattagaaaccacacccacccttgaatgaagtgcttgaactgggggagggaggctggctacctgtgaacaaacattggcccaaataagggaaaataagtgttcctggactttggactagtttatagccagatattccaagagcagcaagacgttgctctctgccgtctctgaaaacaaaagagatgcataacatgcttgcacaaccttttaaaatatagatcagtatagtgctacctctatagttttcttcctcttctgagaaagcctgtatattgatgatcacacacacacacactttgcaattagagaatttggtttgctttactaatctgtttaactattccttcattcattatgaacgcttatattgatgaacatacacacagaggtttctttgctattagaaaattctgtttgctttcctaatctgtttaagcattcattcatgaagagtgtggggccattactggggaaggggggtgacagtgcctcagccagcaaaataccaatgaccaggattggggactaaatttaggaagctaaaatggccagagcaattaacatttgagaaaatcctgtctaggaaaacaacttgagtgtaggcatttgtaattcacttataccaaagttggaaaagtaaaatttaagcctaggacaatttttacttcatggatgttaaatagacaaatgcatagttcccagggggaatttaaacactttactggtgggaagaaacctagtattaaagttgtaaggactctcaaaaacttcacatttattaaaatgcactgctcttacccaatttatcctctgaattaaaatttcagtggattctacaaaacctcgtacaaatagctacagaactttgtgcctattttattcctctatttattcttctaggaagaagcctcttcctagaatcttgaaatagatcccttgactgaatgccaattcctctcctgtttttcaaatgagagaaccttttctgatcaccttgaccttttccctcatttcatatgtcttcccagaaagtagacagactgctctgctgccttcagtcattgtgcctcatttgggttgtccctccttctttgtggagaaatctggaaatgatgcacagtgtatccaaaagttgtgggatgaagtggatgaaagtgatttaattcatttttagaatttttttttgttttgttttagcaacatgctgaacaactaatttactttaaaaataagccagttaaaacaaaggacgctaagcccaagtggggggcaatattagtcaggatctttggggtctaattccagaccaactttcagaagcacttctttgtctctgttctcacctctgctgtccctctcttccctcatcccctaagagagacaaagataaaagcccacctgcatccctaagtcttactgagatcagccaccccaggggagagaaactggatctacttacagccaccccctgtttccatccatatagttacttcccccaatttgcatgtgattatggaaacaagtcatgctcatgaaagcaactgtaaaataaaaggttatggagtagttcagcaacttcttcacagccagctttgtggagctggggaggacttagggcccattggagtctcttatgtgtacagcttcagggctgtccctttcagtttgattttaagcaatgcctcacttcatagcttagggggtaaggattccattcaggtaggttgtctaaaggaactaatgggacctctcagtgaattagctgaccagattttaggaaatctttttaatttctatgattttccttctcacattttgaaatggtaaaattgactggaaataatttttcttggtgccttattggttttccttgcaaacctttctcatattttctcatgaccattgccagtgaccaaggcccatgtgtgtgttgtgtgtaattgtgggcatgtacaagcttaaataacgtgccgacagcactgtttcaaagttggtattcattaggctgttgcctcctgggctggagctgcgctaatcctgacaccggctgccaggagaaaacctcatggatcacacaccaaaccttaataacagcatccgtgacctgcactctccagtacagaatgggaaccccagagctaggaaatgtagttgtatattttaatgaactgctaccccagccaaagaagcttctttcacttttgtgctctacagaaagcccaaggggggtaggagggacagagctttgaataactgctttctaacactaaatgtggccaacaggacagagcacatcacacgtataggcaggtgtgagggacagtggctaagaattgcctgctccctctgcatgctctttcttgtttccaaagtccaatcaagtgatcctgggaaacaaatctgtctggattgcggagggtggttctgaaagaactgccaagacgttaaagaagggtgaagagtaggcagaatataagtagctaacctgagtcaagactctcaaaagctagcagcctgatgacaataggatttatttcagccaggatagtgtctgtctgtgagtgcatcattttaagacagtatgacttcatgttgttacaaactatgtatagtatgtatgttttgtgggttgtatatatacataatatatattatatatatatatgagagatttggtgacttttgatacgggtttggtgcaggtgaatttattactgagccaaatgaggcacataccgagtcagtagttgaagtccagggcattcgatactgtttatgatttccatatatgtatagtgcctatcccatgctgtagtcactgttatgttaaatccagaagttacactagagccagcgatactttatttgtagacaatcaatttgaatccatatgttattactggcagatgatacatgattacagttctgaatctgtaacacttacaaaaggaaacccagagcagcttgatgagtttttgtttctgcttcgttcctgggagtcagtagaaacagcagttgtatgtggttatgttagtctcaagatacttaatttgttgaccttacttcagaaaaattttgtatgtattatatttgtgggaaggtaaaataatcatttgagatttttatcaaatatgaagattagttatttatgaaaaacaaagaaatgtctatttttctttgttcccaattaatgtagataaattttaaaatgcattaaagtaatggtaaagacaataaaaagatgctgtag

SEQ ID NO: 10093 - DNA, 65 bp, Homo sapiens
aatatgtcctcttttgttgtttcttaatttggaaactaataaaatattttctgtgtgttcctggc

SEQ ID NO: 10094 - DNA, 64 bp, Homo sapiens
aatagcttaacactaccaatttcccattttggaacctaataaatatttagtctgcattgctggc

SEQ ID NO: 10095 - DNA, 65 bp, Homo sapiens
agtatttacgttttccacttttctcctttaaaatctaataaaatatttagcttgtgtttctggca

SEQ ID NO: 10096 - DNA, 64 bp, Homo sapiens
gctgtgcctgccttgttgtgatccccatagaaacataataaatatacaagttgtgttccctgca

SEQ ID NO: 10097 - DNA, 849 bp, Homo sapiens
gttcatacctgagctaagaaggataattgtcttttggtaactaggtctacaggtttacatttttctgtgttacactcaaggataaaggcaaaatcaattttgtaatttgtttagaagccagagtttatcttttctataagtttacagcctttttcttatatatacagttattgccacctttgtgaacatggcaagggacttttttacaatttttattttattttctagtaccagcctaggaattcggttagtactcatttgtattcactgtcactttttctcatgttctaattataaatgaccaaaatcaagattgctcaaaagggtaaatgatagccacagtattgctccctaaaatatgcataaagtagaaattcactgccttcccctcctgtccatgaccttgggcacagggaagttctggtgtcatagatatcccgttttgtgaggtagagctgtgcattaaacttgcacatgactggaacgaagtaggagtgcaactcaaatgtgttgaagatactgcagtcatttttgtaaagaccttgctgaatgtttccaatagactaaatactgtttaggccgcaggagagtttggaatccggaataaatactacctggaggtttgtcctctccatttttctctttctcctcctggcctggcctgaatattatactactctaaatagcatatttcatccaagtgcaataatgtaagctgaatcttttttggacttctgctggcctgttttatttcttttatataaatgtgatttctcagaaattgatattaaacactatcttatcttctcctgaactgttgattttaattaaaattaagtgctaattacc

SEQ ID NO: 10098 - DNA, 2236 bp, Homo sapiens
cagggaacaggttaagaaaactatgtaaatgtaggaaagatgggaggaaataaagccctgttctggatcccccatcccctccagaataagagcatgttctgcatgtattaatcttttatgctgtttatgaaacaggcaagataagtctgtttttccttctggaaccataagggtaaccagattttcatctacagacaagtggtagtcatttgtgtttatcatgcaacttacttacaaacaccaagatattaattgctgcaacttgatgtcaaatcacattactgggtaatttttaagactatgtacccacaccatacatacatacatatatatatacacatacatacaaacctgtgtgccaagtgacagctatttttttatatacatggtaattcattaaaattgccttagtaatatattagaatatacaaatatgtgtgtataaaataaacatacacacacacacacacccctatgtagtttttaaaacactggcaatgacccactccccttggaaatgcatgtatgaactaccctatgaaatgtaagctgcagaatagataaaacacaggtttccactaataaaagacatctgaacgtcctgaatatagagacagaagttttttgttgttgttgttgttgttttaacatgtttaaccaacagaagttatttacagaaattcatatatccaggcaacacaaaactcctttattcaaaatcactgctatctttgggactaaacacaggctactttctgtttactcctaacaaaataaagcaagcaaatttgagtcaaatattggtgcactttaatactatcacatctttgaaaactcaatttgagttttaccaattaatgtgtctcatgaagagaagacaccagttttaaaatgagccacaaacagtaaagccctatcagtataaaatttgaaaaaaaaaaaaaagatgattgtatttctagattagcaagaaattagttaattctggctgatttctatttctagctaatttggtcattctttgccatagcttactctattcaaataaacatatattcttgcttgcatcctagattggaaattaaaatttttcaaagaacaaagcttcaatattggatactgaagagtatacatgaaagaaaattccttttgaagctattaaaccatttttttcctatgtgaaagttgaggacaatttatataactcactttttgtcatgtaaaaaaggttactcaagttgtactacccacataactgaaaatattggccatttggccttatctgtgagatttgacactaagtttttgttagagattggaaattatactagtccttttaaggggtaaaaaattcaattcaatactgacaaacttttgcttgtagttttactgtacatttatttttaaagaaaaagaaaacaaaagccagacaaacccaagttgtccaggcaaataaactcaaatctttgtcacgtctgatattataatcttctatgtaagttttttaattaaagttatttctatatgccgtgtgttgcttgttattaaatgcgacgtattcatggcacaaagctttcccaagctgaataaaaacaaacattaacaaatttttaccttgtaatgcaggaagaaacccaagcaagctctagtctgtgcttaagtgttagcattcttattttttgaaccttatttctcaaaacttatagtagcctcaagaagtctattgatattggtcatgtttatttcttgccatatttataacacagcaagagtatttacaggaatgaagtagctgacacatatttttagactctgtataattcagaacagttataaatatttagtttatggattgactctgtatcctgtcatcttttcgcctacctgatctttcttggaataaaataatatatccttggggtcaagatccatagttccagaattttctcagccatctggttctgctacagcgtaaaattagactggaaataagacaacgttaagtaaaaagcttcttttacctaacccacctcccaagggctccatttgtaaaagtacagaccagaaattctaccacttcccagatcctttccagggtaccaccctattaagcattaatttcttcattttttaaatggggacaaaaatatctgctttattattaccacttacttatagaggtgatttacagatttaatgagaatatatcaaagtactttataactcacaaaaatat

SEQ ID NO: 10099 - DNA, 967 bp, Homo sapiens
acatctgcccacatcctggagtcctattacagctaatctcgttttaaatctgctcaagataaaatgtaacttggaaagcgaggaaacactaaacatgtttttacctgctctctctatagagaaggaaataaaatataaatataagattaacacagtggaaggacaaatctttgaagccaaaattctagttttccaatataaggtttaacttacagttttttatgtagccaaaggtaaacggttttctgaatcttgcctaggtgtttcatttatctctaaaattctaaaaagcataaatcattcaaatcttcaaaccaaggcagaaataattttatgtcgctatagtataaaaacattaataagatagcacattgacttttaaagggaaaagtaaatataacttagcatgtaaactcatttcggctaccatttgctccaaattccctagaacagtggtttttaccactgtactccaaccccgtttttaagcaatggaactctttcttcaaacaaaagcttatgcagaacatctctgtgaaacgctgctgagtgagaactgctttcattgaagctggaagccatcataccttactgccttgaaacccctaggactcagctaagtatttgcctaaccctgaccagggaatgccttggttctgtcaattgctgacatctgagaacacagaataatccatcatttttaatttcaagatattggtacattttataggtatcaaagcaatggcttttcttttgcaacagttaatgtatttattaacttaataattactttatgtcttctataaaccaggctgttaatacaatgatgacaaacaaaactggcaagatcactaaaaaataagtgaataaacaaataagtagtaaaataaggtaagaagtaaatatgtaaaagagataatttcaagcataagtgcaatgtaaataataaagtaagcatttaaaattc

SEQ ID NO: 10100 - DNA, 323 bp, Homo sapiens
aacaagcattgtttaggaagactggctggaaacttattttaatcacacccatgacaaactctccagatctgtttaccatcattcaggaaaacaaagcaatctggacggttcaagactgagcaactccctgaatttttatacatcttcagtttttctctgaattgaattcataccacacaaacaaagtgtctgctgctctagatgagaagaataaaatattgacaatctcaaatccaagcaccattctttattatctaccatgaatcaacaaacattcttaaaacaataaatcaataaacaattttggtcagtctggaatgttc

SEQ ID NO: 10101 - DNA, 3235 bp, Homo sapiens
aaggatagcatgccacctgcaactcactgcatgaccctttctgtatattcaaacccaagctaagtgcttccgttgctttccaaggaaacaaagagtcaaactgtggacttgattttgttagcttttttcagaatttatctttcattcagttcccttccattatcatttacttttacttagaagtatccaaggaagtcttttaactttaatttccatttcttcctaaagggagagtgagtgatatgtacagtgttttgagattgtatacatatattccagaacttggaggaaatcttatttaagtttatgaatataaccatctgttactgttctaaaaatgtttaaaagaaactcaatacagataaagataaatatgtgactattattgggtattacacttcacttctctttaatatttttcctccaactggagggcagacaattttctgacttgcttttctctaggtggttcattttgaaaggggacagaaatataactaaatgcttccaggagaaaaattccaagagttacaatctggacttggtacctaaatatcattttttaaattcttgatgcctatttggactagaggtaaacatactttcagattggcctgtttttgtcggtaaggcatacagccttcagaagccaacatttttaatcaaaaacttataaaacatgatgatcattgtgaaaattctgagttgaaggttagtttaagataagctaacaataacagtctgtgttttctctaaaataatctgagttttttggaactctttatttaaatatgtgtgtttttcagtattcaaataagatcaggaagccaattttctatgtatgaatatgctttaacctaggatttcagtccactctgactgactttctaaactttaacttgggtttttacagtgactatgcattagtgctgactctttggtataagccataaaatattttccttcctatcaatttatctgaactttggtcttttcactaaattgtacagtattctacttctgtttaaaaaggggagatgagaaagggaatactatctaaccaataacttgaacaaaaacactaaactaagcatttaatagaaatgctttttattgaggaggtattatccagagttcatgcttagaacaaatgcatctttgcgtatcctagacttaacaattcatcagtttctgagaccacagaatcaggttttccgtagtagataaagactctctggtgcttcaaattctgttcaagtgttttgactcatcagcttctactctttctattactgcctttgcctggcttgttttgtctctttgcaactgattttgcaaaaaaaaattgtagctttaaaataacagggtctaagtattttaaatgtgcctatttcacagctctcttggtcacaaaaacatgctatttttattggaacttcaaaccaaatccccactgagtgtgtactggttcctgcaggtagcagtctcctattatctcctgtttagcaccaaaagagctaatattattggaaactgaccttttaaaggccactggcagtaggatttaaaaagcagcccactgctcagtttccaggatcagcttcctccttctgtcacttgtgtaagttggcactaccttgtgcctctcagattgctgaagtgctgctggtaagcatgtgcatgctctgcctttcttgtgaaagttttcaatcagcgatatcagcacttacagtaagaagtaaaagtagtgcacagcaaagctaatttgcctttgcctggggtgttcagcttgaaagaataaagctcatttggtttagttaaatgtcttactctactgtgcctatgcttttagctgcgttactaagcaagggaaaaataacagtttctctgagccagagaagacttgatcacagttctccaagcatcgtgatagcaatgcttaaccccaggaagatttcaaggcagggagaagaacatttcaaataagattcttgttaacccatttatgcctagtgttccattattggaatgctaagcttgtgggagtcatttacatcctactgctcaaagtcattgccaaggtctgatttttcacacaaaaaattgcaacccccagcataaatgggttagctactgtcatcagttagcaaattcatccacacaaacacaattagagtttggtttttttttaagcttttcaaaacttactaaactggcacaattttatatgtatgctatttgttgtatttatgcttaagagcaaaaaagttttgatgggattttaaattcaggcaaagcctacaacgctgagacaatcccctaacaacatggtagtaactaaagaaacttttatactaggcttcttagttttaaaaggaagtggcatcattgtttcagttctagtttgtatttttctctcagatatttttcttctttaaaaatctttcccagaagttggttcctagaaaactcaataccatcatctcttatctctatacagggactaggtaataaaaccttcaaaggttgtcaaaggtcatcaagcagtgttcatttatcctgtcacatgtttctgtttctatagtaatttagaaattgcaaatagttaacttttcatcatgtaaaaagttaacattatcctatttccatagataccatggacggcggtgtggcctgagttgtcagtctttaatcctgagtcatgtggctctcttttcatctttgatgtcagttccaattatttggcatcaaaaaccttcatggtaggtagagttttaggtaaaagtggatctagggttactttctttattaacatttcctaaataactgaattgagagacatactctgctactatgtcctcaggttaatttttgtctgatcttacgatgccctgccttttactagctactttagaaatagaaaatgtgaagagtgactatttacatgtatactcctttggctgctagaactcatctgtagtcctttattatttacactgaattccaatttcatttctgcttccgctaagtaagagcacctcattcctgtgttttctctactattgagctgtagacgaactgtttctctaattataaagcaaactgtttgggatattcagggaaactaccccaatgttatgttgtcatttaatgggaaaggctgggatcatatgtatttctatgttctgtaaagtatttgacttactagttctcaataaaattttattaggactat

SEQ ID NO: 10102 - DNA, 7898 bp, Homo sapiens
gctcagttgtggttttttaggtggagagacacacctgctccaatttccccacccccctctctttctctggtggtcttccttctaccccaaggccagtagttttgacacttcccagtggaagatacagagatgcaatgatagttatgtgcttacctaacttgaacattagagggaaagactgaaagagaaagataggaggaaccacaatgtttcttcatttctctgcatgggttggtcaggagaatgaaacagctagagaaggaccagaaaatgtaaggcaatgctgcctactatcaaactagctgtcactttttttctttttctttttctttctttgtttctttcttcctcttcttttttttttttttttttaaagcagatggttgaaacacccatgctatctgttcctatctgcaggaactgatgtgtgcatatttagcatccctggaaatcataataaagtttccattagaacaaaagaataacattttctataacatatgatggtgtctgaaattgagaatccagtttctttccccagcagtttctgtcctagcaagtaagaatggccaactcaactttcataatttaaaaatctccattaaagttataactagtaattatgttttcaacactttttggtttttttcattttgttttgctctgaccgattcctttatatttgctcccctatttttggctttaatttctaattgcaaagatgtttacatcaaagcttcttcacagaatttaagcaagaaatattttaatatagtgaaatggccactactttaagtatacaatctttaaaataagaaagggaggctaatatttttcatgctatcaaattatcttcaccctcatcctttacatttttcaacatttttttttctccataaatgacactacttgataggccgttggttgtctgaagagtagaagggaaactaagagacagttctctgtggttcaggaaaactactgatactttcaggggtggcccaatgagggaatccattgaactggaagaaacacactggattgggtatgtctacctggcagatactcagaaatgtagtttgcacttaagctgtaattttatttgttctttttctgaactccattttggattttgaatcaagcaatatggaagcaaccagcaaattaactaatttaagtacatttttaaaaaaagagctaagataaagactgtggaaatgccaaaccaagcaaattaggaaccttgcaacggtatccagggactatgatgagaggccagcacattatcttcatatgtcacctttgctacgcaaggaaatttgttcagttcgtatacttcgtaagaaggaatgcgagtaaggattggcttgaattccatggaatttctagtatgagactatttatatgaagtagaaggtaactctttgcacataaattggtataataaaaagaaaaacacaaacattcaaagcttagggataggtccttgggtcaaaagttgtaaataaatgtgaaacatcttctcatgcaattattttattatccaacacactaatcttttgatactttatataattccctttcttcatatactgcatccagtactagaaccatcattattatgtatcattttgaaagaatacctgatgagatgaaggatgagaacaaatgacagagatgagtctccaagtaaagggggcctcacatcaataattaggaaacttagatataagtcgcccttttctgaaaattctaccccaagtcatttagatttttaaaaaatatttctaatgttaaaatattgggaccaaattagaatcaatagtataagattaattaattagagtaaaaatatctattaaggcagagaaagtttagagaaaaaaatccaaagaaatttgtgtttcttcctattctgaacaagtaaatccatccatccatccatccaaacctcctttatctaactgtgtctactaaaagcaccatgttttgtggggaacactcagataaatggaatatcatcctcaacttcaaaattctatgatctaggagatttaattaaaatgacattttaatttttctatgcgttccaacaatcagattgcatagtctcttttgtgaatagctgtcatataatcagttgtactgtaagatatctcctttaaactcatttgggatataagttaaacatccttcaaattgttgatgttgacaaacaggataatttcaataatattattcaaacataaactggtctaggagaatattgcatcactgactaattagcctatctagagtctaacttcaccattaaaccaaaagcagatggtggtccttggccaagaatattggagacattggagttggtttttttctaagctataagaagtgaggcgagctgaaaaagtatggtagagcaggagaagggtttgtgagattccttctagtgaagttcaccctcaaacttttcaggggtaaagacacagagtgattcaggggccacaatctaatagctcagggctctcctatccattcagagaagtctctaggaaaagggatctcatatcagtacttatgaaaaattgaatataagcctccctttctaaataaatctgcatcgagtcatcacagccctctttttggatactataccttgattttttttttctgatttacaatatgcatatggtttctactgggctatagaaagcagaatcactcattttggagaaggaaaaaatgaatagttaaaacaaacttttaactgttaaggtaacagaaatgtatttagtgaatgtctctttcctcctaagaacacaagacttctacatgttgggtaatacctagagatgcatgtaggaataatccaaaatgacccaaatgctttataatagcaccactttataattcttttgaatgatttctgtagtatataattgacttcagttgtttgagtgttttttgttttatttttgtcccccctgggaaaacatatttcagcatgtataagagggagaaaaaaagtttcattccttccagagaataacttatttagtccagtagggtagaattttaaaatgtcagttaaagtcttcaaagtgcttggggggatatcagattccagaggccaattgtagcaattgaaatttgcagaatcaattatgtaaatctgagacaaattagtattaaaattacacggagtatattttttaaatcacccaactttgtagattatacctattttgggcaggtatggaaaaattttgcagttaaatgattgcctaaagaaagtggtaaacaggtgaggaaagatggcctctgatctaggatagatccagaaccacaaagcatctgcaccacaaaaggtgttagactaccaagcagctcctggttttctgcatagtattagtagcacagcttaggatgagaatcctttctccagtaacattcttaaaatagcatgaaaaacaacgcaaaactcaaatttctattaaaacacacaaactaaaatcaagtgattcttttttgtagattagggagaaggactgaatatctaatttaagagaaggaatagtgtttaagtgttatagtgtgtgagctaataccttctaaaggaaagacatggcatgaagattgtgcatacttacaatgctaaggaaaaatcaagaaaaggactgtgtgaggctctgctactagatgaagttggaaggactattaatgtgcttcttgaagtatcaaaaatgaaaagaaaattaaaattgtttaagcctgacagggaaggatgtaaatacaagtttttctagagctctctaacctttatttcaaaactggaattattcatccatctgtaattgttgataatttaactagtatatgtagttcataaggtaatagaaaaggtgatcatgaaagcatgtatataactggacagaaccacgataatgctataagatgtagatttagttaggttatcagatgttaaatgattttaatattattaaataaatcaaactagaaaactaaccacaagtataatgtaacaaagttaaatgcaggatataaaaatgtaggatggattttgcatagtaaaaagataagtttgccatttaaaattgttgtttgttgggtttagctgaaagtaggcatatatggttccacttgggaaaacttgctttaaagcattacaatgaacaattttttctcattctcttattcctttatcactttttaaatgtaaagaaaattgtatttatttatttttttaaataaacaccaccttgcagaatttaataggcaaacatgttacatatgactaagtaagggtcttcaagatgaagtaaagaaaatgtaaatgttctattaccttatgcagagacaaaaaaaaaaaggagtggtgtcatttagctagcaaacaaacaaaatacagttaattggtgatatgtcctttcttttctcactatgccctcttgcctccaaaaatgacaacaaagaatcacaatttttctgataaataaatgctaaaccaagcgtttcaaactattgcattgccattcttttggactttagttattagaatgatgattgttatagggcaaatgagaaatccatgtgcatcagcttctagttgttaaaaaaaccagataaattaacttctactgtatactgtgggcagaggatcctagagctgatcctacaacatcagcttctagttgttaaaaaaaaaaaaagaaacagataaattaacttctactgtatatactgtgggcagaggatcttactgtgcctctgtttgtgtacatggacttcggtgtgtatcagtttgaaggacagccttgccccatgtaaacatataaatgcagattggtatcgcctggttgctatttgcttaagaacaaatattatacagatgagatcaggcataattttaaaagatcattatcagtggagacctcattattactgatattacaatggggccagtttttatacttctgggtagaattaataaaatttttctgatcccagagatctgagttctctctgcagttggaaacaagaagctgttgtgggcattgtgtcgggccaggggcccttgtgtttgtgtgggcaaatatcttttagcagtgtgagctgcttttttcttttcattaaaagtctctctaaaataatagaaatttcagatactcggttcaagtctcactgattttgtagaggtccaaaaatgtaggatctgtcacttttgcaggcccctgcctcacctaattcctggccaggtgacattttgggcagaagtaaatgcttctatagtcacaagctaaaatgactctaagccccaatttcacggggggtattcacatgcttcctctggaaaatactctttgacagtcagctttgcaagtaagtgattaccttgttaggaatcaaagaaaaatgtatttctctctgacctttagaggaaaatagaatccttcccttttttgcccattgacacaactggcactgctctcttccctttctaccaccctggttcaaagtagtcccccgatgctgtcctgttcctttcttaagccatagtggatctctgagatcctacaccccactttgtgaaacactgacttcatctttgccctcgaatgcctgattttttcataagagattctagcaatttggacactgtttaagtgaactatcaaactaccgcatagagaatatttaagctattaaaattatggtttcccatgaagatcaattctctgtgtccttccctataggaatttgagacgagttagccctgtgatgaatcttgaaactcacatatgtccacatacacttggtagaacttcgatttaatctttacataaaagctgtacatataaccaagaagttatttttgccagtaaattaacttatttgctttattcatcttatttggttcctaatcgtaaatattttgtagctgctgtaaatttttttctcccaaatgaggagtcttattatcataaaggtaaaggctattcagctttgataaccacctgcaattcttttttggatcattcatccatctaacaaatacataatgaggacagttcatgttaatgaaaatccatgttgtttaatagaatgccatcctttacctacttttgctctttatggacgtttttcttttcatgctctagtgagctttccctatatcatgagaagtggttatatttgtgcaaatatacaaatataggaaaacaaagattcatacctgtaggcaatagtctaacttgtccaaaccactttgcctttactgctatttttatccccaatgcgtagatatttcccccaggcctatagcctttgtgaaggaaagcaaatcatacctcctgtatattgacacgaatctggttttcaaatgtcatttccagattttttagttaattgggggttgtccttttcccttaatgtgagagtcattttcctgtatatttctggatctctcaggggctgggaggggggagtgaggggactacaaccatagcactccaagaacccttttgggattactccagtaatcaactacgaaagttattttctaaatgtagatatgtaaggtgttcttttaaagtaaggtactttgaaatatgtagcataaactggtactgctgttaaatgggtcgattattaaacggagcagctgtgtgagggcagctaactttgaatgcctgtctccctggctggtgtgtctccttctcatgttgagagcaccagggattgcgtggctgcatgctgaaaccgcattttcccatggtgtatgactagttcatctctttcttgagcaccattacaagaagatcaaatgaaaatgagatcaatgtggaagacaattcatagcacaaaaaaagtcatcttaaatctactctcaaacattcatcttatacatgcatcaaagtaatttactgacatcagtttgggtgagagagggagtcactttactgaaaaggcagaggcttaaggtgtatacatttgtactcacttccttattttcttaacttgtaagcagaaaacaagccctctctcttgtgaagtatcttcaaaggattggggtgcaaaaataccttgctggtaagccatcaatgttttatttaaatccctgcattcaaagttagctgcctttttgaaataaacaaacaaaaaatactactgtatgtttgaaaatgtgaatagtatttttatagcttgttaaagacatggctagttgcatttgtaaataagtataatgttgctttgattttcttttgtggacatctttatttggaacataattgtctttagggttgatttgtatataagtaattggcctgtgattgtttcttttttggttggaagttatcattttgacattacttgtgattctgtgttcagcactattgtgatgtgttcaacctctgcactcgcttacacaataggatatgccaattgtgtgtggtgtaatgttattttgatttttttccatgttattgatgaaggatcatgcacctaacacatactaacttttttaatgttaggcatatttttagtatactttctcttattctttcttctcctccaaccttttacccatcctccttcctttccctcattcctgttgttatttgagaatgagggagaaacagtattttacatttatgtaattaggcttttccgttagttctcaaggatcctcttttggctcttgggaaagaattgtacctgtacaaggcaattatagaatgcgaactgctttgcctcattccatactgatcatcccagctgaacaatttgaaaactgttctgcctttttgttacatgaatctgtcagaaatatatttttaatttaatataaatgaaattcaataaaatatgaaacaaacgtt

SEQ ID NO: 10103 - DNA, 7671 bp, Homo sapiens
gccttttcattccaaaggggacccctatgaagtaaagaactgcacatgaagaaatactgcacttacaatcccacctttcctcaaatgttgacataccttttattttttttaatattattactgttgataattcttattttgtggaggcagtgtcatttgctctgcctaattacgataaggaagaaacagaagagagaaggggcgggaatattgtttctttatcacctggcttgtttattttgtgggaatttaagagcagtccatttctaccaaggcatatcatgctttgaaaaatcacttgattcataaagattcacctaagagattctgatttgccactgatattcagaattatgatggaagacaggaaagttcagagttttctgggtaggactttggtggtttaaaaatggtataagtaactttattcttgaaagaagaatgtgtttcaaactgtaaaccaattttttgttcttcagagatcatggaacacaaacacattgttattttcagtgataactcctaagaggagctgagttgttgtgggttctatgtttacttcccctatggaatttataattcagtatgttttacactgtaccatatagcaaaacttttaaactacaggtagttaagggccacctacaatacatctgaggtcctgtgatcttatttttctaaacgtaagcactgtttttccatagttttgatgactggcattttatagacaccctggcagccttacttttaacacctttaaggaatagtatttttatgtagttttcagaataacatatggtctaagagtggataaaaggcagtcaataatttctgggagggacttctactttcataaatttgtttgagaggttttcttttaaagttgtaatgtgatggcagcatagtatatgtatttgtttctaaaagtatgcttacgattgtcactttatcagcatttaatcagtgttaaccagtcagcagaaaaatataattatgctaacagtagggggagaaaacccacttagaaatcccttttctggtatttctcttttcactagtttttttcaagatgtgacctcccggtgttctgtccatagttcattcatcctttactcttcgagtagaaggtcttaaaagtcttcctgtcggctgtttctttcaaaatctcctcagagcaattgctaatttggcctgaatctggtaacttgaaccctgtaaggttacagaactagggctatttattttagcatttcttcagtagtatttactactcttgttgcaaagaaaagggaatgggacttctttgtaacctgtaccttggacaacagataaaagaaacaaaaaaataagaaagtttacttttacccttcttggagtctagaatgtgacagaacccccaaaggaaagtcctgcacatttttctgtttccaaaacatttaattgtgtaagtccttgtcagaaatgaatctcaatcccttagtatagaattccccttacatggtataggttgccatatttcatgtgcagattttaatttcatttatgtgggcgctctgttttttctttgcagtccagccacattagaggggaggaaccgagtgatattgattcaagtcattttagggggacatacttggaaggcagaacttgctgcttctgtttggggaggacagacctgactgtgactggattatctgataaccatttgtgaatactgaaattctgttaggcagtaactgataactgctctaaaggatcattaaataggatgctgaaattatgtatcttaatacagtgtggtatgagaattaccaagtcaagagaattgtggacataagcaagtttggccccaatactgctcttaactcattttccagcttactatttgctatttaaatggtaggcaccagctaagcacttctaagcactaacacagctagaactaggcaaaaatggttagaactcagctctcttctactagtccctgtcataattatttttgggaaaatgtccaaactgccccctttaaatctaagggaatgcaccaaaacagagatatatagaatgtcaaccatttcatttttttttttctgcatgccttggtacatagtgaacatacaacctatttaaagataaagcatgtttttgagactcgctcacccccccccacccaaccactcccaaataataattgggatgccattttttttccttttggatgaggtaaataattttaaggttcacaattttgtcttttactgcaatttaaggaaacatttggatgtcagtcaatatgttcataattttggctgtgtgcgaatttctgctggcattatctatgaattttcttcctacttatttttttttcagtatatgaacaatcatgtatctacctgccccaggatgaaactaaatttaggtggaccctaaaccttatgaagacagtgctgaggcactttccttttctgatttcatctttttgggaatctgttttattgaaggtagttagtagttgagagtgcatttgctacaagcatatacttgtatcttcctagcttcatgaggaacagaaagaggtggatatggctcagggtgtggcagggacaattgaggacaaagtcaattcaaatttgtgggtcagaaagaatttttgtggacgtagtgtttttggagaaactctggatggttatatgtgcatgccttttcttcaaaaggaaatacgcaaggttgtagcatctaaaaataaacataagagtcagacaccaaataaatcaagttttacataacagttgtatgcccagtttgtttaggtgagatttcacattacagaaagtatttgaggagcatgaaaatgggttatcttctgtattttccagtttggcaaaagttcagaatttcatcacattgctttgccctaattttgcccagaattttatcttagcctctctctgacagtgatgaatcatgctcaaaagccattctaattggacctttttaagacagggaaagggatcagtaggcggattggaagaaatttcaagtcattgaaatattccattgagatttcctaaagggacaaaattgggaaaataagaaactacgacttagatttggctacgtagtagaaagtatctcccctacatacatacaggcaattgtatgtatgaatcatagggtatatgtgtgtgtatactacacacacattcttttaaagagaattcatggaaaaaaaagcagttggagtgatcagatgtattgcaaaaacatacagagaatttaaatgacagttaataccaagaaattagttgggtttactttatcaggtcgtaataggaatcactaaagaagttactagtgtgtctttaggaccagtggcaactcttaaactaaaactttgggtccttattatctacttacagaacaaagtgaaacaaacaatgattaagctgattggatatacattcaaagatatttaatgtaaagttttttggaatacgaagaaaattcagaaaataaatattatcaacagttacttattggcaaatagagaaagacaagaatagtttagtgagcccggtattttgtttttatagtttttatctcagttgtacaactcacaaaaccatgaagtctttggtattttataaatgtttaacaaaatttacatcagattaaggcatttagatgaaaattattatgttctcactatcttccaaattttatttcatcctatctccaaaatgatttcttagggtacaaaaagagcagacggggctgtaaaaatacaagcaaaaaactgtgtgcccctagtttcaggcagaacttaaactgtcagaggtactagctacatgatttgttttttaactttggattgttcacgtccaaaaatggataaattacatttgtgtttatcatcagttgcattttatgtattattttaataaatactatctgaatgaagactattctaaaccagaaaattccccaaatccaaaagaaaaaaaaagtgggaagaggtgaaattgaagtttgtgtatatgaaagttatcttagacatatttttaattctccagtttctgcaaaataattaaaatatacagtaactggtctcctaaatcctgaatttaatgtattaaatacttatgttctttatattggtgcctttttaaaatgcattgagagtgttggttagctgttgcagctgtacaacacttttaatatgcatttttaaaaatcacttaaaattgagtactatataattcatctctgcatttttagtgcaaatctttagagcaatttctaatagagaaattttcagctcagctgttaaaaggaaaaggaaactttgaaactagactttactacctttttagtttcatagtatttctgaatatgattacaagattatgcaggtaaaatatagagtgaaactttacctgtgaattgaattataatttgtgtttttgttttgtttttaaggaagaataagttctgtatcaaacaagaatttattagataattttttggtcaataaaatacagtattcatttggattttcatctccagactagtattgttctagtcttggaatctgtattttctaatctgttagaaaatagagattgaaaattgatggaataatgtgaaaaagcaggtaattaattctccttgaacaaagcaaaactgaacagtcatatcacattgctattctccaaagcataatctcaaatggtttcatatcatggttgtgtattacttgcaatgggtgtgttaggatatgacagctttttaaaaaaatgagctgctggttatacaaagcaaatggcatatgaccaagaagctgtgatatgctagtgtttctttttatcatagtgtattactaggccaaataatgacaccttgaatatttttacatttattgcagaaaccttaaactttggaatttccataaggtttttatgtaatattctatttctagctttttagttttatcttgctgtactgtaagtttgaggatatttttcacctgcactcttaggaataagttcataattctgtttatggggctttcctcccataacactgcatttgtatattttctgtataaaatatgtgttgtgtattaacctttatcccatacagagagtggtacatgaatgactagttttctaagatgtcctttttattgtgaataaaatataaaagttaaaggccctctgctaagtcacataaagtacagcatataagttcatataggtacaaataaatgagtttgcagtgaattgggccttcaaattacctcaagtgacagatagtaagaaaagcttcttgagcaggtggaggtcactgaatcccctactatgcacttaccaagattttacttactttaatttactggaaattgattttttaaaaaatgactacactgtaacaagggaagggatctgggtttttttgttgttttattcttgttttttttaagtagttcaaattctgaaactgtgatttaaaaattttttacagtcaagcattctgattttgaacataactcccttccctttctgtgtaacaaaggtctctctgttatctcttaaattttgttacatctccctcagcctctttctttgtccgtctcccttctgtcattgtctatggatgtttacctctctgttctcctaaaagtttgaagattaggtcaactcttatttctagttcattggtaatttaatcttaatttttttttcgtgatttttgttggttgtataatctgctgacgtatttttatactcaagtgtagttttctattaaaaagaaaagtggttggattaaaaatagtaagctatgtaaccctcatgttactttcactttcaaatattgggtacctaaaacattacttcagagattatgtaatcctattatagtatgtttgctttcctttattgttggattttacattctgatttggctttcctccaaaaaatgtatatcatgaaagactagacagttatttgcaagtgtttagaaaggtgttaaaaatgtaaagcaaagagtcttaactttctcctaattgggagaaaaatgctttaacattactataataatattccaggtttggagggggtctccaggccccatatttgctgttaatagttggaccttttagaccatgtgttatttgcaatcccagaatgattgcttctgctattagttaaaaagatactattcttttctttctgtacaagtgcaatactccccttgaagtcttaaaaactatggtgatttttttttcttttctgacctattcttcctttagctaatgacaaaaagaaactcataaaagtcatagtatgttaaaggacacaacaagcaaagagaaaaacactccacaatcaaaagattacagaatgtggaaaccactagtctgatctcatggtatctttatttaagctaaatttccatggaaattagtaatcttttgcttgaaaaatgtgtcctaaagttgaactttttacagattgaatcttcttagaccctcgcccaatgctctaaattaagaacctaatacttaatatttttattttacttctccccttttagaaataaacttttaaataaaagcaaagcacttagctgagttttaaacacttacatatcacctattggagaaattttttttaaaaatatttggagcagtcctgttttcatacaaatttaagtaagaggtatttttcttatacatatttatatgtagtgtgctaattttctttttttatacctgtgtccctgtagtaaaactgctgtaatataaatacatgttttgttaaaagataacatttctttggcatttcttttaaaggcagttactgcatttctgcatttgtacagtatgtgtcttggccattttagatattctttctttaacaataccaaaggtaattagactattttaaagactaattgcttgacagtttctagggtattttgtgttttagaagcaaaaaaagaaaaaaaaataggtcaaaccagtaaacctcattttttttcaaactaataatttggggaaataaaaactattgtttaaaaaagaaatatatatatatatatataaatatatatgtaaagttaaaattccataccttgtatgtcaggtttgctaagtgtaatgtagtttttttaaggctcaaataccatacctcagaaaatgaggtttactatggaaatactgaaacagtctttgcagctgtgtgacaagtcactctactacatactgatttggagacctccgctaaatagttttatcactgcagactaaaatgtgggacttgtatcttctttgtttttaatgcacacacatacatgttctgtgcatgtatgtggttactgtgtatatgtgtatgagtgttgtatatgcatgtgtgagtgtgtgtctgtatgtgtgtacaactaaagaagctgcagaaactttgtaatactttgtgaaaaggattatattataaaggtttgtactgtctgagtgcacagctactggaataaatttagggaatctcaggaacaagcatataatttgtccaagatttatttcttctcagaagtgtaagtgcagtttttaattctgtatattatttaatattttaccaataaaataaacttctgacataaaaagtttgctat

SEQ ID NO: 10104 - DNA, 123 bp, Homo sapiens
atattataccagatgaacatttcaaattgaatttgcacggtttgtgagagcccagtcattgtactgtttttaatgttcacatttttacaaataggtagagtcattcatatttgtctttgaatc

SEQ ID NO: 10105 - DNA, 1091 bp, Homo sapiens
cacttccagcaaactcaatctcagcgtgtgaccaatggcttcattttgaagaaaagccacagaagatacacttccgcaagatatcttcattttaaagtaaagtaatatactgtatggaaagttacaactgtgttagactaacaagtaattataaaaggaaatttttccttctaaggtcagtgagtgttgttgctactgaaatgaattcctgtatactcaacactgtgagcatgctaatgtatatgctggtgattcttatgcaaaggtgaagccacctcaagatgaatatcttaatttattactttcaataaaaagacagtttaaaaggcatggattttggtagttgaaatataagagtggagaagaaaagtcagatggtttgtggcaggtgccaccgggcaagcagacaacataatttatttccagaaaacaacagaatgaacatcatcatgaatacatgaatcggctgtgatgtgtgaactgctaagggccaaatgaacgtttgcagagcagtgggcacaatgtttacaatgtatgtgtatgtcactttcggtacctgtgaatgcatggggacgtgctgaacccgaaaaaaagtgcctttccataaggactgcaatagagagggcaatttaccctggtggtacacggaacctagattcactcctgccatgccttgccaatagtaagctgcagggtggaacaagaaatcacttgctctggggggaagggaggggggaatgggtgtgtcagctgggtagatacaaaccctgaaaagagaatccatgtgctactggcaggcaacattttttaaagctctttcagaaaccctcatatttggggtttcttttcaggaaacattcctgtggagggaaaacgaatatgaagataattttcagctaattatctgggtgacccagaatcgtgtatatggctataggatagacttcttaataatggcaagtgacgtggccctggggaaaggtgctttatgtaccgtgtgtgcgtgtatgtgtgtgtatctatacaagtttgtcagctttggcatgactgtttgtctcgaaaaccaataaactcaaagtttagaaaaactc

SEQ ID NO: 10106 - DNA, 1097 bp, Homo sapiens
atcatctttccaatccagaggaacaagcatgtctctctgccaagatccatctaaactggagtgatgttagcagacccagcttagagttcttctttctttcttaagccctttgctctggaggaagttctccagcttcagctcaactcacagcttctccaagcatcaccctgggagtttcctgagggttttctcataaatgagggctgcacattgcctgttctgcttcgaagtattcaataccgctcagtattttaaatgaagtgattctaagatttggtttgggatcaataggaaagcatatgcagccaaccaagatgcaaatgttttgaaatgatatgaccaaaattttaagtaggaaagtcacccaaacacttctgctttcacttaagtgtctggcccgcaatactgtaggaacaagcatgatcttgttactgtgatattttaaatatccacagtactcactttttccaaatgatcctagtaattgcctagaaatatctttctcttacctgttatttatcaatttttcccagtatttttatacggaaaaaattgtattgaaaacacttagtatgcagttgataagaggaatttggtataattatggtgggtgattattttttatactgtatgtgccaaagctttactactgtggaaagacaactgttttaataaaagatttacattccacaacttgaagttcatctatttgatataagacaccttcgggggaaataattcctgtgaatattctttttcaattcagcaaacatttgaaaatctatgatgtgcaagtctaattgttgatttcagtacaagattttctaaatcagttgctacaaaaactgattggtttttgtcacttcatctcttcactaatggagatagctttacactttctgctttaatagatttaagtggaccccaatatttattaaaattgctagtttaccgttcagaagtataatagaaataatctttagttgctcttttctaaccattgtaattcttcccttcttccctccacctttccttcattgaataaacctctgttcaaagagattgcctgcaagggaaataaaaatgactaagatatt

SEQ ID NO: 10107 - DNA, 142 bp, Homo sapiens
gtctcctaatcttatcaattctgatggtttctttttttcccagcttttgagccaacaactctgattaactattcctatagcatttactatatttgtttagtgaacaaacaatatgtggtcaattaaattgacttgtagactg

SEQ ID NO: 10108 - DNA, 2272 bp, Homo sapiens
aggagaggctcaggggcagaatgggaattcttccatgaggactcagcagtcaaccaaagttggacaattacatgtagaagagagtgagcaaatagagtttgcttagtgaaaaatgatactgaattctacataaatgtaaagtctttaatctgaggaccctgccccatgaattgtgcaggctgcattgaaacgccttggtgatctcatatttaggaagaaagttaaagagttggtcagatggatagttcataatgggtggttccattctgagagcccattgccccagctttggttttagttgtgtcataatctctgatcattaatcctactgactgagtggactatttcagttaataaaacaatatgattaatagagagagctgtcattgagtcccaaaatggattgccagttttaaaataattattataaaatgtatgctaaccccaaaataatactaggcatgaggtgacctctctgatttggtcaccttgtagaaccttggagggtgtcagggcatctctttgagtatcagttatgattattcagaagtatagatgtatcaaatgatagaaatgacaaggaatggctgggcgtggtggctcatgcctgtaatcccagcactttgggaggccaaggtgggtggatcatgaggtcaggagttcaagaccagcctgaccaacatggtgaaaccctgtctctactaaaaatacaaaaattagccaggtgtgatggcacgcgcttgtaatcccagctacccaggaggctgaggtaggagaatcgcttgagcccgggcagtggaggttacagtgagccgagattgcaccattgcactccagcctgggcgacagagcgagactccgtctcaaaaaaaaaaaaaaaaaaaaaaaaaaagagttatgtattcatgtgttgtacttgcattttaaattcccaacattattgatatctggttctctcatctttgtatattgtccatttctattccaaaagcctttcgctctttttttttttttttttttttttgatggactctcgctctgtcgcccaggctggagtacagtggtgcgatctcggctcactgcaacctccgccttccggtttcaagtgattcccctgcctcagcctctggagtagctggaactacaggcgcgtgccaccacacctggctaattttttgtatttttagtagagacggggtttcaccatgttagccacgatggtctcgatctcctgacctcgtcatccgcctgccccagcctcccaaagtgctgggattacaggcgtgagtcaccgcgcccggccaagcccttggcattttatctggaatagcatctgtaaactgaagtgtttgacctctgttttcttctctcctctttcatctgtttctgattcgttggctggcagctgcacctgtggggggacctctcatgcagacttgcacatatgcagggagtattgcactgaagatctttgctggaccttcttctcttcagaagataattttcaaaagggagcaatgctgtgaatgcagcttgcttctctctacagattgagaagtccagcttcaaaagttacttgccacttaagcaaggaacttgtcaagagatcatggttcatgttactgaaaagactttaaggatttgtaaggttaatccatagattgctgagaaaaatggaaatatttttatttttacagattttgcacttctgaattcaggttaaaaactaacttgtatttagtctgcttagaggactgtgacttgaaaatttttatataccaatgagctttttggtagcgtccacaatgtttaaaatatttcataggcgagatccgtgttctccatttattaatgcattgtagaccaatttaactgctgtgtttcaggaaaattcttcctagtttaataagcaagctaaaagttttattttttatatttagtgcttaatctttgcctcatgttatgtaaaattagcctgcagatattttctctcaattctgtagactctcgcaagataaacattcaaacagtgaaacaaacaataaaataaataaacctaaggatgtcgtattgttttactctcggtctcagaatttgtattttgcctttctgccttttttatgtcaaaatagatgagattgtgtgcatctataaattgttaccacagtatttttgataatgaataaggataggactatctctgtgattattaaaatacatggaattatccaggaaattttccttacaaggaattaaaagactcctgtattta

SEQ ID NO: 10109 - DNA, 863 bp, Homo sapiens
gctgaggaaacaaggtgtcctccatcccccagtgccttcacatcttgaggatatgcttctgtactttttaaaagcttatagttggtatggaaaacatttttcttatttttaagtgttattaattatatctatggaaaaactattcctgaaatatatacagtcttatgtcccaatcagagtcttttaacctatgatttaaaaatgtataagtaacagaaattaacatattttaatgactttactttttatttctaagaaaagtatttgaaaaatggaataattttaaatcaatgataattctagggatcatgaactcccagaagattttattatttaattgtaaaggtagaggccagacgcagtggctcacgcctgtaattccagcactttgggaggccgaggtaggcgggtcagttgaggtcaggagttcaagaccaggctggccaacatggtaaaaccctgtctctactgaaaaacaacaaaaacaaaaacacaaattagtcgggtgtggtggcacacacctgtagtcccaggtacttgggaggctgaggcaggaggatcgcttgaacccaggaagcagaggttgcagtgagctgagatcatgctactgcagtccagcctgggctacagagtgagactgcatctcaaaaaaaacccaaaaaacaaaaacaaacaacaacaacaaaattataaaggtagaaaataaacctaaattgtgtcgtaattaagattattaaaattagaattatacaatgacttatttttggtggcaaatactttaggagcaataatgccttatggtaattattgatgtatagtttcttttgtttatgaagtcaaatttgtataaattctcttaattc

SEQ ID NO: 10110 - DNA, 1446 bp, Homo sapiens
gagcagaggcccggaaggaaggccatgaccaccactgagggcccggagcagggtggggaggtgcagtggcacccccagagccaacagagggagcaggcagagggtgggggacctggcgggagccctggggtagtgtcagagcgggagtgaggctggtgcaggagcagttctgctatttccaatcagtcaatgccactctccacaacaacaatgaaaaccaacaccaactcaacaacaaagtgcaatacaggctgaacctggcccaacagaaaaaccctgccccaatgcacctgcaggcaaggtacccgaagaagcagaggctgagggcaggcaaagcctgtgtgactgtggcagtgccggaggccaagggggccaagaggaaaagcatctgtggtctgctctgctctcaccctgtttggttttgtttctcctggggctgtgttctgcaggcagccagaaaaggaggaggcacgggtgagctggcagggacacactgcctttggggctcctgggctcatttggatgggcaagattcgctgacaaatggctgtggggatggtggggtggatggtcagggagggatgctcagggagggatatgctggtgtgagcagccagagggagagtgtgtctccttcctgaaggaacttccaaatggaactcccgatttcaggtgggctaaaagagggcttaggtttggaaaagggtgtccttctgtgcccttgttaatttattttatagtgatttggttcaaagatgtttacaggacacacacacacacacacacacacacacacacacacacccctagagaaaagtacagatttccagtggatatttcaagcacagttctgctgctgtggcttcagctttggaagctgtcaatcccggagcaactttcccaactacccaaccccaccatggccaggacatgtgcaatgccagccccttcttgtcttggcacatgcacagacccagtcccctcacggtagggcacccctgacctacgggcttccaagagagcagctgcagtggttgggaggagcttgaccagtgtgccccaaggagtggagtagagcccaatctaagtattccttgctgcttggaaccctccctgtttggaaccctccccaaagaggcagtcaggctgatgctcagtgctttgtgctccctgctccttcccgcgtagccaggtgggcccaagggtgcctggcagggagcactacccctggacccctcctgctcgctctggggaccctgccagggaaggccactgggtgttcacctgcaaagtttctggttgtcactgcacagtggtcgcgtcatccatgggtattaaaaggacactgtcaagtacttttttaaactagtttttagggttttttaaaactctctgttgtttgtaatattctcttaaaagcttgaaaataaaacttctttccctacc

SEQ ID NO: 10111 - DNA, 4645 bp, Homo sapiens
tgcgtccccccccaacctttccctcaccccctcccacccccagccccgactccagccagcgcctccctccaccccaggacgccactcatttcatctcatttaagggaaaaatatatatctatctatttgaggaaactgaggacctcggaatctctagcaagggctcaacttcgaaaatggcaacaacagagatgcaaaaagctaaaaagacaccccccccctttaaatggttttctttttgaggcaagttggatgaacagagaagggaagagaggaagaacgagaggaagagaagggaaggaagtgtttgtgtagaagagagagaaagacgaatagagttaggaaaaggaagacaagcaggtgggcaggaaggacatgcaccgagaccaggcaggggcccaactttcacgtccagccctggcctggggtcgggagaggtgggcgctagaagatgcagcccaggatgtggcaatcaatgacactattggggtttcccaggatggattggtcagggggagaaaggaaaaggcaaaacactccaggacctctcccggatctgtctcctcctctagccagcagtatggacagctggacccctgaacttcctctcctcttacctgggcagagtgttgtctctccccaaatttataaaaactaaaatgcattccattcctctgaaagcaaaacaaattcataattgagtgatattaaatagagaggttttcggaagcagatctgtgaatatgaaatacatgtgcatatttcattccccaggcagacattttttagaaatcaatacatgccccaatattggaaagacttgttcttccacggtgactacagtacatgctgaagcgtgccgtttcagccctcatttaattcaatttgtaagtagcgcagcagcctctgtgggggaggataggctgaaaaaaaaaagtgggctcgtatttatctacaggactccatatagtcatatataggcatataaatctattctttttctttgtttttttctttcttcctttctttcaaaggtttgcattaacttttcaaagtagttcctataggggcattgaggagcttcctcattctgggaaaactgagaaaacccatattctcctaatacaacccgtaatagcatttttgcctgcctcgaggcagagtttcccgtgagcaataaactcagcttttttgtggggcacagtactggatttgacagtgattccccacgtgtgttcatctgcacccaccgagccaggcagaggccagccctccgtggtgcacacagcacgcgcctcagtccatcccattttagtctttaaaccctcaggaagtcacagtctccggacaccacaccacatgagcccaacaggtccacgatggatccaccagtcccaccccagccttttcctttcatctgaacagaatgtgcatttttggaagcctccctcactctccatgctggcagagcaggagggagactgaagtaagagatggcagagggagatggtggcaaaaaggtttagatgcaggagaacagtaagatggatggttccggccagagtcgatgtggggaggaacagagggctgaagggagagggggctgactgttccattctagctttggcacaaagcagcagaaagggggaaaagccaatagaaatttccttagcttccccaccatatgtattttctaggatttgagaggaaagagaggaaaatgggggaatgggttgcaaaatagaaatgagcttaatccaggccgcagagccagggaaggtgagtaactttaggagggtgctagactttagaagccagataggaagaatcagtctaaactggccatgctttggaagggacaagactatgtgctccgctgcccaccttcagcctgcaatgagggactgaggcccacgagtctttccagctcttcctccattctggccagtccctgcatcctccctggggtggaggatggaaggaaagctgggacaagcagggaacgcatgattcagggatgctgtcactcggcagccagattccgaaactcccattctccaatgacttcctcaaccaatgggtggccttgtgactgttctttaaggctgaagatatccaggaaagggggcttggacactggccaaggagaccccttcgtgctgtggacacagctctcttcactctttgctcatggcatgacacagcggagaccgcctccaacaacgaatttggggctacgaagaggaatagcgaaaaagcaaatctgtttcaactgatgggaaccctatagctatagaacttgggggctatctcctatgcccctggacaggacagttggctggggacaggagaagtgctcaatcttcatgagacaaaggggcccgatagggccagcagccacaaggccttgacctgccgagtcagcatgccccatctctctgcacagctgtcccctaaacccaactcacgtttctgtatgtcttaggccagtatcccaaacctcttccacgtcactgttctttccacccattctccctttgcatcttgagcagttatccaactaggatctgccaagtggatactggggtgccactcccctgagaaaagactgagccaggaactacaagctccccccacattcctcccagcctggacctaattcttgagaggggctctctcttcacggactgtgtctggactttgagcaggcttctgccccttgcgttggctctttgctgccagccatcaggtgggggattagagcctggtgtaagtgcgccagactcttccggtttccaaagttcgtgcctgcgaacccaaacctgtgagtctcttctgcatgcaggagtttctcctgggcagctggtcactccccagagaagctgggccttcatggacacatggaactaagcctcccaaatgggagttctggctgagcccagggtggggagatcctgggaagggaggcactggaggaagacggcacctcttcccccatggcagggtgtgagggaggcaggtttggaatggtgcgagtatggcaatctaagcaggggtctggtctctttgactccaggctggcctttggccgactgtctgctcacccagagaccttggactccggactatccatggctccgaatctaagtgctgcccactcccatgctcacacccacagaaggtcttcccatcccctttagattcgtgcctcactccaccagtgaggaagatgcctctgtctttcccacgactgccaggagatagggaagcccagccaggactgaccctccttcctccagcctgccctgacccacctggcaaagcagggcacatggggaggaagagactggaacctttctttgacagccaggcctagacagacaggcctggggacactggccccatgaggggaggaaggcaggcgcacgaggtccagggaggcccttttctgatcatgccccttctctcccaccccatctccccaccaccacctctgtggcctccatggtacccccacagggctggcctcccctagagggtgggcctcaaccacctgctcccgccacgcaccggttagtgagacagggctgccacggcaaccgccaagcccccctcaaggtgggacagtaccccggacccatccactcactcctgagagggctccggcccagaatgggaacctcagagaagagctctaaggagaagaaaccccatagcgtcagagaggatatgtctggcttccaagagaaaggaggctccgttttgcaaagtggaggagggacgagggacaggggtttcaccagccagcaacctgggccttgtactgtctgtgtttttaaaaccactaaagtgcaagaattacattgcactgtttctccactttttattttctcttaggcttttgtttctatttcaaacatactttcttggttttctaatggagtatatagtttagtcatttcacagactctggcctcctctcctgaaatccttttggatggggaaagggaaggtggggagggtccgaggggaaggggaccccagcttccctgtgcccgctcaccccactccaccagtccccggtcgccagccggagtctcctctctaccgccactgtcacaccgtagcccacatggatagcacagttgtcagacaagattccttcagattccgagttgcctaccggttgttttcgttgttgttgttgttgtttttctttttctttttttttttgaagacagcaataaccacagtacatattactgtagttctctatagttttacatacattcataccataactctgttctctcctcttttttgttttcaactttaaaaacaaaaataaacgatgataatctttactggtgaaaaggatggaaaaataaatcaacaaatgcaaccagtttgtgagaaaaaaaaaaaaaagccgaaaaaaaaaaaaaaaacacctgaatgcggaagagctcggctcccgtttagcattttgtacttaaggaaataaaaaaccaacaaaggatctcacattttcttaaaaagtgaagattgctgtatactatttattcaacttataatttatgttactccttgatctttgtcttttgtcatgacaaagcatttatttaataaagttatgcattcagtt

SEQ ID NO: 10112 - DNA, 208 bp, Homo sapiens
gcccccagcgggctctgccctggtgcgcttcacacagcaccaagcagcaacaagaacagcagaaggggaactgccaaggagacctgatgttagatcaaagccagagaggagcctatggaatgtggatcaaatgccagttgtgacgaaatgaggaatgtatatgttggctgtttttccccaacatctcaataaaactttgaaagcagaa

SEQ ID NO: 10113 - DNA, 1670 bp, Homo sapiens
accctgccccttgcccagggccagtgccatggggaaggggcttgtggggaggggacccatgaatcctgaccactcttgaacccagaaggaggactttgggccaatttcggaggagagaagaaagtgcaacgtggggagagggaagtgaattgcagaggggagggggaaaagagagagagagagagagagagagagagagagaaagatggaggagaagaacttggattcccctgggtagatggaaactgcaaaaacccaaagcctccaaaactaaccaggtccacctaacaccccctccctcccctaagaagatggatgtcctcaaaagagaaggaacaaacctccttgggaatccacattttttgggggaatggaaaagctctgtctccctaactcaactgctttgcaaggggaaatcaagctgggagaatctttttctggccacctgtggggtaggttgtcaaaccaaacagagccaccgtgggacatcaagtggaagaacttgtttgcttgaaagtatctcagacccaaggcacctcaggtctctttgctgtgcctccactatattgtcgtgtgggtgtgtgtctgcacccacatcctcacacattgatctagatctgcctttatccactcgaattataaacagctcggcttgtccttgtcccatgtgtttgtagacacacatgcatactgtccaaagattagggttggtggtggcagtgcagcaggggagggacaaacaaccaagctatgggtgacagaggctctctcctggtgcctgcacctgcactctagtgaccctgggtgccgccagacccttctcttctacaaagaccccagcaggagtgggagggtctgcaatggcatcgccctgtcctgccttggccagaagcctggagctttggtttgaggaggtagagatatgtgtatccataggaagagatctgtcagaacaggcagctgttgagctcggggtgtcttccccaaggcatgtggctcagcagcaagaaaggcaagttgctcctgctggggccctggactctgccttagctcccacctctcagccttgttattgggtttcatgcccctggaccagccttatctcagacctgcttacctgcatgatgcctttttgggggctggggattgagtcttgctgctctgcccagccctgttctattctgcagggtccctgtgttggaattctccctggggaacctactttctgctcagtgaggctccggccagaaacctggagtccttatcctcccctctgtaagtgttttagggtctggcttttgcaggcaccctctgacctcagcagagctcctgggcctgctgcctgcacaccacatcgcctacctacaatgccaaagcctcactgtcaccctttctgccttggtttccctagctgagccacgctgcccatgcagcagagggcagaaggcttgcacttgggccaaagggcctaaggtccactggacagttgggaaaacacctgaccaccatttaaggactctaagccagaatggaaaattcaccaggactccattcttaagcctatgcgagtcccctagagagaggcattgtactgatatataaatattatataatatatacatgagacatactgacagaatctgtaagctaataaaatgtaagaaaaggtt

SEQ ID NO: 10114 - DNA, 1312 bp, Homo sapiens
aaaccatcgatgaaggaatatctcttctcagaaggaaagaataaccaacaccctgaggttgtgtgtggaaggtgatctggctctggacaggcactatctgggttttggggggacgctataggatgtggggaagttaggaactggtgtcttcaggggccacaccaaccttctgaggagctgttgaggtacctccaaggaccggcctttgcacctccatggaaacgaagcaccatcattcccgttgaacgtcacatctttaacccactaactggctaattagcatggccacatctgagccccgaatctgacattagatgagagaacagggctgaagctgtgtcctcatgagggctggatgctctcgttgaccctcacaggagcatctcctcaactctgagtgttaagcgttgagccaccaagctggtggctctgtgtgctctgatccgagctcaggggggtggttttcccatctcaggtgtgttgcagtgtctgctggagacattgaggcaggcactgccaaaacatcaacctgccagctggccttgtgaggagctggaaacacatgttccccttgggggtggtggatgaacaaagagaaagagggtttggaagccagatctatgccacaagaaccccctttacccccatgaccaacatcgcagacacatgtgctggccacctgctgagccccaagtggaacgagacaagcagcccttagcccttcccctctgcagcttccaggctggcgtgcagcatcagcatccctagaaagccatgtgcagccaccagtccattgggcaggcagatgttcctaataaagcttctgttccgtgcttgtccctgtggaagtatcttggttgtgacagagtcaagggtgtgtgcagcattgttggctgttcctgcagtagaatgggggcagcacctcctaagaaggcacctctctgggttgaagggcagtgttccctggggctttaactcctgctagaacagtctcttgaggcacagaaactcctgttcatgcccatacccctggccaaggaagatccctttgtccacaagtaaaaggaaatgctcctccagggagtctcagcttcaccctgaggtgagcatcatcttctgggttaggccttgcctaggcatagccctgcctcaagctatgtgagctcaccagtccctccccaaatgctttccatgagttgcagttttttcctagtctgttttccctccttggagacagggccctgtcggtttattcactgtatgtccttggtgcctggagcctactaaatgctcaataaataatgatcacagg

SEQ ID NO: 10115 - DNA, 403 bp, Homo sapiens
tggctgcagcccctgcctgtgtgtctggtgttgaggggacgaagggacccctgcccctgtctgccagcagaggcagtagggcacagagggaagaggagggtggggccctggatgactttccagcctcttcaactgacttgctcccctctccttttcttctctttagagacccagcccagggccctcccacccttgtccagacctggtgggcccttcagagggaggggtggacctgtttctctttcactttcatttgctggtgtgagccatggggtgtgtatttgtatgtggggagtaggtgtttgaggttcccgttctttcccttcccaagtctctgggggtggaaaggaggaagagatactagttaaagattttaaaaatgtaaataaaatatacttcccag

SEQ ID NO: 10116 - DNA, 1281 bp, Homo sapiens
ggagcaagcccccattttcacccgatcctgggctctcccttccaagctagagggctgggccctatgactgtggtctgggctttaggcccctttccttccccttgagtaacatgcccagtttcctttctgtcctggagacaggtggcctctctggctatggatgtgtgggtacttggtggggacggaggagctagggactaactgttgctcttggtgggcttggcagggactaggctgaagatgtgtcttctccccgccacctactgtatgacaccacattcttcctaacagctggggttgtgaggaatatgaaaagagcctattcgatagctagaagggaatatgaaaggtagaagtgacttcaaggtcacgaggttcccctcccacctctgtcacaggcttcttgactacgtagttggagctatttcttcccccagcaaagccagagagctttgtccccggcctcctggacacataggccattatcctgtattcctttggcttggcatcttttagctcaggaaggtagaagagatctgtgcccatgggtctccttgcttcaatcccttcttgtttcagtgacatatgtattgtttatctgggttagggatgggggacagataacagaacgagcaaagtaacctatacaggccagcatggaacagcatctcccctgggcttgctcctggcttgtgacgctataagacagagcaggccacatgtggccatctgctccccattcttgaaagctgctggggcctccttgcaggcttctggatctctggtcagagtgaactcttgcttcctgtattcaggcagctcagagcagaaagtaaggggcagagtcatacgtgtggccaggaagtagccagggtgaagagagactcggtgcgggcagggagaatgcctgggggtccctcacctggctagggagataccgaagcctactgtggtactgaagacttctgggttctttccttctgctaacccagggagggtcctaagaggaaggtgacttctctctgtttgtcttaagttgcactgggggatttctgacttgaggcccatctctccagccagccactgccttctttgtaatattaagtgccttgagctggaatggggaagggggacaagggtcagtctgtcgggtgggggcagaaatcaaatcagcccaaggatatagttaggattaattacttaatagagaaatcctaactatatcacacaaagggatacaactataaatgtaataaagtttatgtctagaagttaaaaccc

SEQ ID NO: 10117 - DNA, 4679 bp, Homo sapiens
ggaacaaactcctgggttggcagcatgcactgcatatttgttactgctgcccacctcacctttcctctgctgaaggagaatttggaattctacttgatgcgggagcaacaaacagctcagggccaaaccaaaagacaaaaattggagtaacgtagaatgctccatgctattttatggaaactttggtctcacatccgtagctgattatcctctttttctcctatgagtggcacttcttttgtcttaggaatacatgttgtaaatatatatctgtgtatgtgtgtatacacacacacagacacacacacacacacacgggatgaatggagccttaaagagttaggatgagccaccagaatatgcctgctcaaaattaatagcacagcagtttggagaagaaatgaaggtgtcaaagagtccattcacctgagaaatgtgtgaagacatacttatcagttggcttttagcttttatgttccttgagtagtttcactcaagtctgtaaccttttgtgtttccttattagtaaaattcactggaaagccagctcttcatgttacactaatgacagtttgttctctttgcaagagaggggcattactgtcacctgacttgaggagctgttttgttgttgttgttgtctgcaaatttcatgaatttgtgatgtctttgctgtttacatgcagtcccaagaaatggattgttggtgctttggaatatgttacagtcccacatttgatatttcttatatactttgttttctctaaggagatttcttcacacagtatgttcatcatatatcatcatcattattatggtggtaaagatagaatcttttttcttttttgtcattctgccatggagcagcattaccctaatggattgcaaccaaaactttaaacaagtagaaagataatatttctccaattgggactccccagcaggaatacttagggataaggaagaatgctagcatctctgtctctcaaacatagggaggataagaagagtgttcttctggtaaagctaaaattctggaccactgaagctaaaagccctattgcaagtatgaaattaagtacttgagctgtaggacaaaccttgggcatttaaccatttactgtctggctttgcccttaaaatagggttgcaattaaaatgtgattggcttaggtaatcccaaaaactaacaaataacaaaggtgcataatttatttatctactttttaggtgctctgagttgaggcaaagtagagcggcaacattaagtgctatgctagtcacttagctgacgtaaccagcttggttaagcagcttatgaaaccatataaagaattcttttgaggatggaattctgtccacaaaataattttgtgagcccagatatcattaggatcacacagagttaaatatagaaaaatgaaaccatcattatattctttcgtgttttttcttttattataaacaaggggattattctttagttctcagaggtagggacaaaaccacatcaggttttcagaaggaaaaaacatttaaaaacccaccatcacatgagagaatcacttgaacccaggaggcagaggttgcagtgagctgagatcgcatcattgcactgcagtctgagtgacagagtgagactccatctcattaaaaaaaacgaaaacaaaaacaaaaaaaacacaaaccatcatcacagaagatgcaacatcttttctgaaagattgccttaagagagctccagtcctactcttggaacttggatgtattctaatgtagtaaactattctaagttttcattctttgaattataaatggcctcagcagttttgctcaactactgataaatgctttgcctcctaccatctacctatataccttattgtaatgaatgttccaaaatggtagagtggtagaaaacgccagagtagtttagagcagaggaaaatatttgttttaaaactagctttaaagttttgtttcatttctaccaggagcctctttggtttggtttgattttgcttggaaataattggttttcttataaatgagtgaagcggtgataaaattctttggctagttattaattcttttacgtgtctttgcatttgagaggcactgttaaaaattattgggaaagatttaaagtgcaggctgcaattaaaacatggagaaaagtagaaataatgccataagtctagattgcctcatgaagcagcctcatttgaattgctttcatagctttcatgtgtgtatggtttagaagtacacttacctcagaaacctgatttgatcttcatgtcttgggcaggagttgttgaaaataggttattggaatatataagttatctcactgctcatgtacttgcatgtttgggactcaaattttacttgatgtctgtccattcttgtggccctatcagccttctccttcctttactcctttaatctacttctttgactaccagtggagatttcagctggactatgttgatggggtttgttgttgtttttgagctggctgtatatattttaaaattataaatagataatatattattttttgcacattgtgatcagtttgcccagaattggggatggggcagttagcatgttggggccaggaagggacaagttagataaggactgagtgcttccgttgcaggcagtttgcacaatacctaattaaccttcctattgaaaataccaaatgtgtggttacattactttaaatgacattgaattggaacttgatggcaattagttctagatacaaccttttgatctttgttggaattttaagggaaaaatgaactaaacttcatatttgttgattttaatcacctaatagtactgaaggttggaaagttgcatgtggctggatgctgttaatttctttaatagccatgactataatttaagcctatgagaagatagactgtttcgtagggatatattcacatgtgtgtgcacactcatgagttttgtctcagcaggatagaataagcaaatccatgaactggtcttctattaatactttgattctaaaaattatttgtttacttgctatggtctgttcattctgggcctaaccttaaaggctcaataacaaatacaacaaatgtaaatatgtttacattttaagacatatgcagtggttcttacagatcagttaattaactccagaaagcaaatgttagactacacatttatttttctccttgatcaagtataaaattctgaaacagaggctttaaaatttaaaacctcagcaaaataatccatgaatttactgattcttctgtatcgtgtgtagttaccattatgtaactatacacacatacagctacggatataatgaaaattatctgcaaacacctaaattaaagagaaaaaaaagtagtttgtaaactcatttgtgatctactgaaaagaggttatattaaagcaaattaaaatattttccttctctgtcctctgaaatgactgcagtagatactcttagttatcccatttagggtggttggagggcctttttaatttaattgaccccccgaggtggtcttttgttttaaacagggggcaacagctggatctccaagtacatatggattttgtatatataggagatttttagaaaaatcaacaacctaacaccagattcaagtcacataaaagtgttccaataaaatggatggatgtctttttcctccccattttgctttatactgagtaatgcactcttgcaagtgtatacaaaaactaaatagacttctgccctccaacatctttttattgcattacttcaaaatcctaattttgtctctactgatatgtcttattaacatctgaaaaaatatatattttttattggaaaattctaatttgttaggccttgaaagttttgtgacaattattttgctgtgtttaaccacaatcattcaccttatggcatgctttgattactagacttcaggcagtctcattcattgtatcatacttacacacaattagtaagttgtctccatgtgtgctatatgtctgaggtgtatggagtttttatttaaaaagtgtgccagtctgaatataagcatttgattttgtaacattggacttttcttaaaagtacagaggttcaaagtataggtatgtccattggcataagaatagagtgggtgagggtctggaccaggttccaggttggtccagtcagatgccagaacaaagaagaacagtcaactaaactggtctacttcaaaaatagtgggcctgtgtgaagagtgagaccacatgtgggtgtgcacacctcttgtccccaggtttccctccctttgagcttttctttccctccctaacttctctggcctattgtcattgttgtttctttaaacttaaggagagaaaaacaaaaatgagattcctacactttgcctaattgagccactaccaggttttctggcagctgtggccacattatttgtgagatgattttttttctttatgttcagagtgacttttgattctgattctttatgttttgtatggagcggcacttttatctgtgttttagcagaactgttcctctgtatcctttacggtttttctttgtttttgtttcctttttaaattatgcatagagtttttttgtgtgtatgaaattaaagcctttattaaccttc

SEQ ID NO: 10118 - DNA, 420 bp, Homo sapiens
aagcctgccccacctcctgtataggaagagggtatggtctgagatgtgcagactgggaccagcgctagcctgaggagctcagagcctaaggaaagactggcttttggggtacaagggtgactagaaccttcctgggactctggctatagtactttgaaattatcacccatataaaagagggacatggactataacgttgatttcttattgctgtacattgcgtttttaacctgcaagttctcagtttcttcaccatcactccatcaaagtccctggctataagatctggattttacccactccatcttctctttccttcttactgtgtcaattcctattttctttcagaatcttctaaaaacagttgtatctaaccgcatgtgctgttgtgcctaatgctctataaagcatgttaaacag

SEQ ID NO: 10119 - DNA, 92 bp, Homo sapiens
caggacttggtggggggaacagggaattggggatgggagggaggcaataaagatatttggccttctttggctttctttgcttagcagcgcct

SEQ ID NO: 10120 - DNA, 694 bp, Homo sapiens
gcttcttcagccctcccaaattgcccttgccctacctgtgctcccagaagccctcgggcatgcccagtgcaccatgggatgatgaaattaaggagaacagctgagtcaagcttggaggtccctgaaccagaggcactaggattaccccagggccatctgtgctccatgcccgcccatccccttgccgcctgactgggtcggatggccccagtgggtttagtcagggcttctggattcctcggtttctgggctacctatggcttcagccttcagctcctgggagtcccagctgttgttcccagcaacgtcgccactgccctcctactctccaggctttgtcatttcaaggctgctgaaatgctgcatttcaggggccaccatggagcagccgttatttatagaactgcctgttggaggtggggagtcctccctccattcttgtccagaaaactccttagctctcgcagtgagccatgttcttagtctccagggatggatggccttgtatatggacccctgagaatgagcaattgagaaaacaaaacaaaaggaacaatccatgaacttagattttattggtttcactcaaaatgctgcagtcatttgacctgaacttgtggcaagagacttgtgctttctaaattcaaagactagaaggaaaatggataaaaatcacaagtgccgtttctcttgc

SEQ ID NO: 10121 - DNA, 580 bp, Homo sapiens
acggggcggtcgggtgcctgcggcctcgcccgcacgcctagagtctcgcccgatcccatcggcatcccggggagggcccgggagcctccgtcaaccgtcctctaatccagagtttactccacctgccgcacttagcagggggacgggaccgaagctccctcaatccttgtctggtactagatttgctcctgtcccaccccgcagtcccctgaggagggcgatgtgcgccctctttcactttttttcttctaggtctccaggtcccggaggggatttgtggacctctcttgtctccccaccactccagtgcatttccgcctggctcctagaagccccattcaatatcactactctttaacgagtgccaaatcttttcccacttttgctcttccccaaggaactgctcccacctcagcacgtggaggcctctcacggtcctccttcctgggacctgagcaggtttggtgaaagccaccgtcctccgtgacacacggcccccttcctcctgtccccacactcccaggagaaactcccggtgtgtttctgaccctttcagccccattaaagctcctgagctctc

SEQ ID NO: 10122 - DNA, 62 bp, Homo sapiens
gctccacggccccagacaccttccctgaggacactcaataaaggttcctgaatcttcctgcc

SEQ ID NO: 10123 - DNA, 1640 bp, Homo sapiens
ttatgcagctataatccattatttttcattgtggtatagtgtcccaatgtgtgcctgtaccataatgtattcatccagaatgaaggaagtttgggctgtttctatttgggactgttggcattcgtgtatatgtgtccagttacataagtacaagagtttttctggggaataccaggtactatgaaggctcacgtgattttggagtcttatgaaggttttttttttttttttcctgcgtagttgttaaattggtgaccttgcgggatggaaccttctattccaccaccttgctccaccttctgtcttttctggggaatagacgcaggagtagaattgcggaggcttgggccatgtacctgttcacttgctgtagataaaccaaactatttcccaaagtgcatggatttctttagacacccaccagcagcattagagagttcccattcctccacatccttaccaataactgctattgtcagaatttaaaatttttgccagtaatggtaacttgtggttttaatttgcatttccctgattactaatgaatgaggatgagtgtctttttgtaggttattgacactttgcatttcttcatgtgtgaaatttatgatcaagtctgtggccatttttctcttacattatcttgtcttttttctttttggtataagttcttatcccaattacaaactctttgccagttatgcgttgtggatatcttctctcatcttatgatttgtctttactccctttattgtgtcttttgaagaataaaagttcaaagttgaattttaaaggtatcaactttatcagtctttttattttatgattggtgcttttttatgcttctcctaagaagtccttctctacccctaggtcattaagatattttcctctagtatcttctaaagactttatatttttgccttttatatttgtcttttgtctatatggaattgatttttatgaatagtaagtcttgatagctggtagtatacgtcctcctacttaattcttcttcaagattgtcttggctattcttggccctccctttgatctcttacataaatattcaaatcagcttatcatacatgcacataaaacacttcttgagattttgattgggatttaattggacctatagatgaatatgaggagaaatgatatcattataatattgagtcttttactccatgaacatgggctatttctgtattcattaggttatctttcctgtctctcaatagagtgtaaagttttctccatagacatttagcacatccttagttagatttattcataagtattttatatttttgctgttgttatatatgacatattttttagttgttttatttctgtttgttgctagtttttaaaatgtcatttttatataggtattatgttcagtgatcttggcaaatcctcttattctaataatttatttgttaattttcttgttttttcatgcacacatttgtattttaaatggaaaatgacatttttttttctttctagtccttacacctttggctttccttactgcattgttaaatagaaaagtgttgaacagaagtggttatagaggcatctttgttttgtttatcatctcagagtaaaggactgcaatgtttcactattaa

SEQ ID NO: 10124 - DNA, 83 bp, Homo sapiens
atgcccgcgcccagcctctccgacatgccgctaggggtcacgcctggccccctctccaccgccagtaaaagcatctagtcttt

SEQ ID NO: 10125 - DNA, 782 bp, Homo sapiens
aaggactccaccgctgccctcctggaactgctgtactgggtccagaagcctctcagccaggagggagctggccctggaagggacctgagctgggggacactggctcctgccatctcctctgccatgaagatacaccattgagacttgactgggcaacaccagcgtcccccacccccgtcgtggtgtagtcatagagctgcaagctgagctggcgaggggatggttgttgacccctctctcctagagaccttgaggctggcacggcgactcccaactcagcctgctctcactacgagttttcatactctgcctcccccattggggagggcccattccatccatcttaggcccctttgggtgggcttgcgcctcagttgatgctgctaaattccctgggagccagcatggatctggctggacccgatgctgtccagaactgggaaggccacaggggtggggcagccatcccggccattctgaggtatgacattcctccccggccacactcctcaagacacatccagagactgttgctgtctgtgggcagagttctgtgttctggccaatgtgaccgtagtgccggggactgggggaggtgggttggatgtgcttgccacccccccggctaagctcccccttctgctgaaccatgatccccaccccctccgccggtcagtctcccataccttatttattggagtggagggggaagcccatgggagaattttggggatgttttggtcttttcttccttttgtaataaaaattatttaagttgttag

SEQ ID NO: 10126 - DNA, 1055 bp, Homo sapiens
tctgttgtggcctcagctgctgaggatggacttggagaacagcttccaagcttcaccttgaaagaagcttacatggcagcaatatttctaaaatagtgatacagtcagaggcctcctgtaagggcgagagaactgaagttgatgttgacaggcccacagggaattggccttccctgttcaagtggaagccagtctctgagaatcccgtgctctcctctcttttggtggaggttctgtaggttcaggtttctaccatggactttaggtatatagggcaagtcagcaagaaagcaccacacactcaggaagccttgtctacctttccctagcgtctctagccagccagccccagatactcctcagagacccacttctctcttttgcatggaataaaaagcactcacagtccctgcttttgggattacttatgctgtggaactcataacccaattcacttccttcactgggtcccaccccattgttgtctctggatgaagtctagccatcagtctggtccttcagattcttcgtaaacttttctgcagttgccagagctaagtctccatttggaaactttgatctcaagaactctcttgatggtgggcacaagacagataggtgattgctgctttcctttgccaaacttggatgcatttttctctttgtttccaaagtataggcaacaggttaaactaccacgtggggtagtttatcaatcctcccgcctcatccttctgcataactgggactaaaggcacacaccaccacacctagctaatttttgtatttttttgtgtgtggagacaaggctttgccatgttgcccaggctggtcttgaactcctggactctagtgatctgcccacctcaacctcccaaagtgctgggattacaggcatgagctaccacgcctatccaatttctggtttatttactttcgatggttaaatgcctccttattcaaatatcctgtatatatactggcgtttctgtcctgatgtcaagtctcgagagaagatgatcaaacaataataaaataattataataagaacaac

SEQ ID NO: 10127 - DNA, 441 bp, Homo sapiens
ccagaacgcctacttctgccctggttaatttagccctaactctcatctgctggagagtcagctcccaaactgttctttcttgtaggcagaggatatgtgtgtgtgtattacatgggactgtctagaggttccatttcccaatagggtgggttgcctttccttgtcttaattaggcctaactgttccagagcagaggccatgatttagtggaccatgaatgattgagattttgcctgtgtactatcaatgccacttgaaccccagcattcactttaatacttactgagcatctcccatgtgcaaggtcctggaactacagggataagacagggtccatgccgtctcaaggcatttacggtttaaaaagacctttgtaattactaacgaaaatgcaaagcagaaagcagtctgtaataaagattaaaataatgccgtgggagc

SEQ ID NO: 10128 - DNA, 688 bp, Homo sapiens
gtagggctgtgaggaatgcattaagagggtttgggagtttctgagaacctggaggagcaaagcttgattcagatcctgtctgcctcgctgggtccttggcaggtcccctgtcctcctgggtgggagcttatggggtggtggggcagaaggactgaaggtaattcactcctagatcgcagtggctggctgcttggccaggacagtgatgccgccagggagagcttccgcttggtgaccagggacatgtcccagatggacatagaagcccctctctgcctccctgggattttttagacttttacttttgatttccctaggatggaagagtataggtgggagataagggaagtggggtgagaggagaaaggaaatgttggcatgggcctgtgtgatgtccctgaggcagaagagccggggactgatgggttcaggtgggagctgctgggtgaggcagggaacccttttcactcccattccttagctttagtctaatggagccaaggactgctgggaccttcaaccctgatcttttgtcttccagtcttctcttagtgtcctgctcctaggtttccctctcttctggttcttctcccaggtattctcttcccaggcctctctggccactgctttgtatcagggtttttcacgcttttgtagaactgaggtttcaataaacagtttcagttgc

SEQ ID NO: 10129 - DNA, 166 bp, Homo sapiens
caaaagtttggccacttccctctcaaagactaacccagaagggaataagatgtgtctcctttccctggcttatttcatcctggtcttggggtatggtgctagctatggtaagggaaagggacctttccgaaaaacatcttttggggaaataaaaatgtggactgtg

SEQ ID NO: 10130 - DNA, 1066 bp, Homo sapiens
acaaggctgagcagggttcctgtggcccaggatggaggccaccgctgccctgccatcccgtctgcctgccatgggacggctcctctgagtgttccctggccccacgtgtgtggtgtttgtgtgtctgtgcctggccaagggaggtgccaacactgggcttgccacagccccaggagaggaatttggggcctaggaaccgagggcacacgggactctagcctcatccccaggacccccttggctcagagtgtggtgctagaaactggcccccagcccagccccagtactgccacctttacacctacccctgcaagtccccagagggctgcccacgatagaagctgccaagcagggagaacctgtgccaactgtggagtggggaggttgggcctggaccctcaacccctgcaaccttccctagccccctcaatagatgagcaggtcaggctgtggcccttacctcacccgcagttctcgcccagtgctgcagccggctcacctctctccgcttcttgcacatcactggcctgtgtgtgctgcttgctcctgttctgttcgcttgctcccgttccgttcggcttttgctttgcgttagggtgaagaccctagcgtccagctcccctcaacgctatattttgacactaaaaaagaaggtttctaaattgtaggagcaggatggaaatactttgctgcccttgccatcttttaggatgggcccccaggagactgaggtcttcctgggccctcattgctgcttatcgtaccccccatcacctgcacatgggacagaccgggctggagggtgaccttggctgtgtgcgtcccagcaaaagagctctggcccgcatctcgctgtgccctgaagggggatgaagggcgatgcctcgcccgaggctttgggctgctgcactgcatgctgggactgctcctactctctgtcccacccctcacccagctgtggtccggctttgggagagtggtgaattgcgctgcccgaactcggagcggagcagggtagggaccgtgtacagcttgataacccttaataaaaagggagtttgaccag

SEQ ID NO: 10131 - DNA, 289 bp, Homo sapiens
aaggtaggccgggcatggtggctcatgcctgtaatcccagcactttgggaggctgagacgggtggattacctgaggtcaggacttcaagaccagcctggccaacatggtgaaaccccgtctccactaaaaatacaaaaattagccgggcgtgatggtgggcacctctaatcccagctacttgggaggctgagggcaggagaattgcttgaatccaggaggcagaggttgcagtgagtggaggttgtaccactgcactccagcctggctgacagtgagacactccatctc

SEQ ID NO: 10132 - DNA, 73 bp, Homo sapiens
agcagctgcctggagcctattcactatgtttattgcaaaatcctttcgaaataaacagtttccttgcacggtt

SEQ ID NO: 10133 - DNA, 601 bp, Homo sapiens
gaccctggggccccttggcgggcagcccagcctctgtccctctttgcctgtgtgagcatctctgtgtacccactcctcactgccccaccagccacctcttgggcatgctcagcccttcctagaagagtcaggaagggaaagccagaaggggcacgcctgcccagcctcgcatgccagagcctggggcatcccagagcccagggcatcccatgggggtgctgcagccaggaggagaggaaaggacatgggtagcaattctacccagagccttctcctgcctacattccctggcctggctctcctgtagctctcctggggttctgggagttccctgaacatctgtgtgtgtccccctatgctccagtatggaagaatggggtggagggtcgccacacccggctccccctgcttctcagccccgggcctgcctctgactcacacttgggcgctctgccctccctggcctcacgcccagcctcctcccaccaccctcccaccatgcgctgctcaacctctctccttctggcgcaagagaacatttctagaaaaaactacttttgtaccagtgtgaataaagttagtgtgttgtctgtgcagctgc

SEQ ID NO: 10134 - DNA, 97 bp, Homo sapiens
gccctcttggaaagacttctctgccatccctttgcacctgagaggggaagttctcagctgagctgaagctggattattaaagtggattgtcactcag

SEQ ID NO: 10135 - DNA, 427 bp, Homo sapiens
ccccaccctgtccccgtgggccgtggcatggccacaccccaccccacttctcccccaaaaccagagccacctgccagcctcgctgggcagggctggccgtagccagaccccaagctggcccactggtcccctctctggctctgtgggtccctgggctctggacaagcactgggggacgtgcccccagagccacccacttctcatcccaaacccagtttccctgccccctgacgctgctgattcgggctgtggcctccacgtatttatgcagtacagtctgcctgacgccagccctgcctctgggccctgggggctgggctgtagaagagttgttggggaaggagggagctgaggagggggcatctcccaacttctcccttttggaccctgccgaagctccctgcctttaataaactggccaagtgtg

SEQ ID NO: 10136 - DNA, 2524 bp, Homo sapiens
ggagtagattctgctatcttggcctcacagcccttcctgttgattacaaagcccgtggaagaaaacagaacacaccctcctcagttccgtctaaatgtgtttcttctgcttcaattacaccagttctggggcaaagacactgatgaaacaacacccatacctgaaaagaataaatgtgtgactttcaaatcccctttcgcagtgaaagaaacagcaaacacttaagattcagcatctgttctccagttgcactgaggaatgcactgtctcgcagcaccagctctgcagagcccttgccccagactctttgcggttttatttatatgtatttccatatttcattcctgtgtgtcactgctgcattggtgtggcagcaagtgaccaaatgctacaggtcttactatggacaccaggtcaggtgcaaccacacaaaacaaagccagttccatgagctgcctatgatatgcattgcggaagtaacattttacccagggtgtgccattgcagtgatataaatatatttttttcttagactaaatatgagctgactatctcttttgatgtgtgtacataggtgtgagtgtgtctgtatgcgtgcctgtctgtgtgcgggtgtgtgtatgtgcgtagcctcatgcttaggactacccatgaatgttgtggaatgctacacctggagagttctggttttccaccagtttcaagatgaagaactacatgatacagtggacctggagaccatccccttggaaagacaacccagagatgttcagcatcctgtatctacacgcatcctgtatctacacgtgtattttgtagctgtcacactaaccttaataagaattctacagctttggacagaggcattttcaccttaatggtgaagtaatttaaaatataaatccattcaggtgacaacccatcatcaaaattacaaattttctgattgaactcatctgaatcatcagttccttgatggagagagagaaggagatggaatgtgtctggtaaccccaaatggagtacaagtagcctttgttttcctgcataaatggacttgttgaatgcgaacgaatatatgcaattcatatacttttggagatgaacgtagatatgtgtgtcagctttgagatggtgtgtcctggattaatactttgtctcccaatatcacagaaaaatacatgccagtgactcttgaggttaaggtagttgggatgaaatggcctcaggcaatttcacattccctaattacctggaaagttctacagtaattaatatgcagctaactcctgttgccctcacaagagcatcagccttctagaatcggagctccggagtgtgaagattcagtattgatatgatatgtataccaaactccagccaacttactgccatttttcataatctgagtggctgccttgcttatcctaagctgtggttgcagaaaccgtggccatttatataagctataacatcaaatcagggaaaaatgaggaaaaaaaatagattctgaaccatttattgttgaataagtagagaaaatcatcaataaatatttattacattctgacagggtgtgtggcattgtgttctatgccagagtgacaaagttgattcacccctttttggggaccttaatatattttttaagggatgtgcctatgcattgatgcctgaaaaatatgtataaagaaatgaggttgactcttctgagcagttcatcttttccagaggtaagggtaggaggccaacttcagggtctgggtctgagcccgtgggcaagccctggccgagtgagctccaatgctaactcatgtgccgatctctagagcagtgggaaactaccccgctgcaccaaatcaagtagcttcaccttgtgtatgcaggccccaagttattttttagcaatcttacgagtgaaatgttctggtgggttgaaaaacgttcttattttaaagaaaggttgtgctcgctacactgctggtgtgtgcattctgagacctcttgtattcaatctgtgaaggatatgtgtattaatccgtacacccgtatagcctcaatatttgtctgaagacacttaaattctgacccataaaggaaagttctagaagcaatattttcacttatttaacattctccaaacaacatcaagcattgatacacactgaagagtgcgtttattttttgtatcactctaagtatgttggaatatgcaaggactgtggttcaaattagaatgtataaggcatattataatttagttcatactgaataagaaattaacagaacattgttcggttcacacgttccaaactttgagtgatttctggagttagacatagattttctattttgttttaatttgtcaaggtatttttcttcccttcatgaactttaggtacacataacttatgtcatttatttatggtcttttatacctagtttgtaaaattgtaaaatagcaaactaaatgcaaagagtttgcatttgaaaataataaagtagttgccgtatacaaccctgc

SEQ ID NO: 10137 - DNA, 1520 bp, Homo sapiens
gtgaactgtccacttggagctaaaactggccctgtttctggtcttcgcagcctagatatgaagaatctgctctgaaaacaaaaaaaaattacccttttgttggggggggtggggcagtggtcccaataggagacaaaggagagtgattgattttcttcctccaatagttggtttcaaatccttttgaacacgttcgacaaaagcagtggagaagaggaagacctggagcaataaaagacaaatgcaacattttaaggcaatggtttcacatggttacatatcaaaacatcccaattctttagtgctgatcatcgaggagctagaacattccatttgcttgtgtgcgtgcgtgcgtgtgtgtgtgtgtgtgtgtattgagatttacccagactggtttgggcaagcagactgttctaaaatataatagaataccctaaagtataacatgtcgatgttcgatgctgatacttctacaactttaaaactgctcatttcatgaagcaagaatggaggaatccttgactcttacacactggaaattgaaataaagataaatgcaaccatttttaggaagctagactagctgtaaaggacctcctaaataaattatttgttactgtatcctcatttgtaatctagttgtcaataaatggcccggacatgtcttgctaacaggatatgggctaccaggaagaaggacttgtttccctttcctgtgtggggagaggtgtgtgacgtttttccagttcacatttatttggtagcccacctgggttggaggaagggcacggtggagagaaagtgacatgcattcacatatctgcttatcagtgtgcaatactgtgtacctcatggatgctttggcaatgcccaaggcgatataagcaaaatcagaagtatatttttgcaggtgcttttattttcacagcccataattcatagtgatagagtgcagtgatgtttgccatttgctggacaaccaacacccgggttgctcctttgattagagaccagatcagataattatgcttttaaactgattacgtttacattcttctcttttctatgaaaggcagggcaagaacagaagtgttcacatggctctcatgtacttttaaattatacaatgatatccaatattaaaagattataggaactgaggtttacatacgtttgtgtggtgacattttagaatgtcaataaatttgctttttgagatgttgagaggaacaagaaggtggaaggcagtgttatttatttctttctattcttggaaccacgaatgaggtaggcacaaatacattccttttagagttaagaactatgacgtagcgagttagtgagactagacatagtaccgaatttagttcatgcattggtcttagagggtgatggaacaagagaagtactatctttgtgttgcagcctcaaccaacaacaatgtgttgtaaaaatgtctttcatgtaaaaagtgcagtaaatatttactatttataatgaataaacagttatgaaaactt

SEQ ID NO: 10138 - DNA, 475 bp, Homo sapiens
cattggtgatctgacggcagccaagcccagctcggatcaaggtcccttcatgcgcggtgtctctgcgcctgagtaacgacatggaactgaaagaccagagggacactaggaatcaaaacaaacatttctattctgcttagtttttctgttttgtaaatctttctttcttaaccactttcagcccctgggattctagaactgtgaattgtgctctgttgtagggggcaggggaagctctcactctgttgccattaaatgtatgagactgggcatctctgagcaattgtagggccggggatagagggtacttgaatcttcagaagttgaagtagcttttatgccctcaggaaaggccctggtctccggagtttcctcgcattaaaggagagagagagagagtactcttttgggcaacggccctccaaaattgcccccacattggctgccttataaatatgtctgtgtgttgactggt

SEQ ID NO: 10139 - DNA, 428 bp, Homo sapiens
agattggtctctgtggtgtgattctcttcccaggtgtccctttctcctcccctagtgtccttaagtcctcctccacagggaacatctatttgggctttgatgtttaataaagtagaaagcactgtctggctgtgtgggtagagaccatcctttccctgcatattaggccagcttgtgccatataccagtgtggtgtctgtgtgtgaagctgcattgttgggtaaaagccccgtggagtgctggagaaatgcactagcagagtgcaggatctgttctgaaaggcagacgtgctcctcagacatcagaacatcacattggaacggattactcctgcataacaagatcccatttctttccttattgataaaacaagataatcgatgagaattcatgttgcatgagttcgagataactgaggggtttagctt

SEQ ID NO: 10140 - DNA, 487 bp, Homo sapiens
gctgctttcattaattaccctactttcattcctcccaccccaagcaaatcccaacatttctcttcagtgtgttgacttctatcctgttaacactgtaatatctttaaatgatgtacaggcagatgaaaccaggtcactggggagtctgcttcatttcctctgagctgttatcttgtgtatggatatgtgtaaatgttatgactccttgataaaaaatttattatgtccattattcaagaaagatatctatgactgtgtttaatagtatatctaatggctgtggcattgttgatgctcacatatgataaaaaagtgtcctataattctattgaaagtttttaatatttattgaattattttgttactgtctgtagtgttttgtggagtactggaccaaaaaaataaagcattataaatatatagttttatttataaggccttttctattgtgtgttttactgttgattaataaatgttatttctggac

SEQ ID NO: 10141 - DNA, 3322 bp, Homo sapiens
tctgagagctgggcggcgtccacacctaagaacagcagctccaccaaatgaagtccctctcacgcagctccacagcgctgtctcgtgaatggacagtagccacttacaaacaaatcaacatttttaaaaagaaaatgtaaaggtgtgttttggggcatttgtggaacttacccatggggactaatatggaaaaggtctgtccatagtggttccctgaagactggaattacttcagcaaaacttccccatgaacagctaatgtgtagtgaaagaatgagctagcaaatgagttttagcggggacaaaaaatcaaacaaaaaagtgaatgcttagaaccttctcaaagcagtcacaagtacagacacttcacttagcctagggggccttccagggttcttgtggctgttgtcagagcaggagctgggggagggaagacttgttctctctttcttgaggggtggcattaggaacttacgaaaccagagacctttccctatgacttggcagtatgtgaatatcctctacacttagttattgataaacttcttaaagagatctgttattttcaggtagtgccataatctgcacttagcattggcttgcttcagttgtttctcttcccagccagtatgccacaggtgaactttcggggttgtcattaagtaagttgtgaaatttctgtaataacaaaggcagtccgcattcttccctttcccccaaattcctagggcaaaacttttttatggtgctgttaacatgggagtcacacaagccgcctgactttttctcattgccattagtaatgactgatggaaaacccagccaccactgtgatgcgaaatgatcagtctgttgcctgaaacagcccagtcctcttaactgaaacagcattctacttcttgttccaagatgagcctctgcaatattctggcaatttaatataccccctacaaaagcactccacagcttttacactattttgactttgagttataactagtattattcatgttttcataaaaagaagttagtgacccagagctataatcatccatcaagtcttccacaataattcccaactcataaattgctttcctaacaactagcaaaagctattgttcataatggcatttctaaagcttttgggcactgtgtaccaggatgaggaagagaagaaatgaggagcctgtcttttaatattccagtatttgtgtgtttgattttttttgacaacagtacatatatctatttctctagggatatggaagtaagtggagaagggcctacctttttaaaggacaaatataaaaatagcaacagtatctttgctaatcttactaatagatattgattaaaaaaaaaaaacctcagtactgcatcactgtgttgggatcataccaggacaatagggtcattccatatgataaaactaaaggactaaatttgttttataatgatgtcttagagggactgaaaggtttaaggaggcgatcaaactaaaatgtcttaatggctgtgtgacacacgtaaggaaaggaaagggggtcacgcacatcatgtactggaatgatctgcattaaacatagacttgtcttcagaaataagactgaagggttttgttgttccttagagttttcgtgttacatcacctaaagagatttcttttaaaaactttctagactctttgcaaaatgtatattactaacatagtttggaagaaaaattgagtagtggtaagttttgttcaagcacaatgttgaatgttaagcttcctgtattaattttagttcagttaatggttcagcccatacaaaggtgctatcctagggattttatgaattcctgaaaggaaaatagaatatgatcaattccttgccctgtggaagagtgcagaactgtggttttgttttcctttgacttctgtaaaatgtgaccgtttgacatctgtggtagattgaacggaatatcacagctgctgagtttactccatagctttcaaaccttttttattttaagaaattcttgaaaaaccctatgttccatgggaacataaagttattatagtgcctcctaaggggttaatataaatcaaggaggaagtttatatttaaggaagaattggagtgacgtatcttagaaaaggaaaggctgatgtttccatatagcttgctctccaccaggcctatcatttttctttttagagacaaacgtgacaggctagtcttgtctctctcatatgctaggtagcaaatggggtgatatttttatagaagtgggcaaaaattattttctcaattttactgagtaggcacagaagaaaagtacagataggctgatggttattgccttattttgactgcatttctcttaaatggatcatttaaattagttcttcaagtaacagtttactggttgttccattcctgaatatgcaggctaatttgtacagatagggattaaggaatacagactattagagaagatccttatatttacatctagtatatatgtggtaaggaaatgccgattcttcattataaacaagttttaaaattgttctttcttagttcaaatgatagcaatacccctatagcattaggtagaaacaaattattcattacatcgtaaatctctttactatgtcctagctctgtcctgctacctaaaggatataaagaaatactattgctctagaatgtattactttgttctcccatgaaagaattcagtttgttagtacctatatttttaaactggtgaaactgacccaaatatgtaataaataccatagtagctcagacccaaggagatatttttctaaaatcagttttcgttaaagtacttctacttccgttattggatatggtatctcctaaagtgtaaaaaaaatctgttactatatagtgataaaccatctgctcatcgtaagtgtaaggcttaacaaataagtaatacatgctatatttattcaagtgtctattgcttaattgttaattgtgagcagatttattgaatgcctattctattttctgcagtttacaatacaataactctttgagtaagttgaagtttaattgtgcaacaaatttgtattagagtacaatttaaagtgtttttctctatagccttttttgactggggaagcaaggggtaatgttaattagtacactttgttcttgtactagctatgtttctataagatatggtgccctgtgtatcccagagatgctagaaaactgttctttgctcctatttgtgggttctgtttttgtgggtttttttttttgagaaaatgtacacaataaaacattccttgcttgtt

SEQ ID NO: 10142 - DNA, 706 bp, Homo sapiens
agagtatacaaaagaaaccatgcaaagcaacgactactttgctacgaagaaagactcctttcctgcatctttcatagttctgttaaatatttttgtacatcgcttctttttcaaaactagttcttaggaacagactcgatgcaagtgtttctgttctgggaggtattggagggaaaaaacaagcaggatggctggaacactgtactgaggaatgaatagaaaggcttccagatgtctaaaagattctttaaactactgaactgttacctaggttaacaaccctgttgagtatttgctgtttgtccagttcaggaatttttgttttgttttgtctatatgtgcggcttttcagaagaaatttaatcagtgtgacagaaaaaaaaatgttttatggtagcttttactttttatgaaaaaaaaattatttgccttttaaattcttttcccccatccccctccaaagtcttgatagcaagcgttattttggtggtagaaacggtgaaatctctagcctctttgtgtttttgttgttgttgttgttgttgttttatataatgcatgtattcactaaaataaaatttaaaaaactcctgtcttgctagacaaggttgctgttgtgcagtgtgcctgtcactactggtctgtactccttggatttgcatttttgtattttgtacaaagtaaaaataaactgttatgagtagta

SEQ ID NO: 10143 - DNA, 1510 bp, Homo sapiens
gttcagctgaatccagaacttggtgttaagaatggcatcttgggagctggcatgcttcccctgggctccaggctgacttctgtctctgcaaagaggacctcagaacccaggagccagaggaaccagggcaagaggtcccaggggcattctctggagcttcctgagcccagtgggagccccacatcagacaggtgtgctggcacttcgtggaaaagccctggccggtcattccaggtcagcagcccagctatgggtgcccacctgcacctgtcttctcatcaccttgaatccggggccagaatgaaggtcctcaaccgggaaaacagctttcagaagcttgaggccgagacgaatgttgacaccggcttgaccatcataaattctgaacccaggcagacttattttggcggatttccaagggatttacagaccagccagccaccattctgcttgccagcctcttccttgggggtggctacctccaaaaacaacagtgtccttaaggaaagagtctctcctttgccacttgctggccaaagggaccttggtaccaggaagacaatttcagaatgtctccttcatctgcaagttcagggtgaagaaaaagaagaagatgaagaagaattctttatatagcataaaataaatgtggttttctaaaacacaagatcagataaaatgttctagaaatggagtactgacccagaatcagcctgttagttgttcatctgaggggggctgaatgctccccatgcacaatctgtattgattttatttcaaatgttcaaagtctaaaggtgctgggaatgattgtttatttgccgtcacagtcataagagaacacagccaacacacagggaaaaaaaccgaatgcttttgttccgtggagatgcactaacccagctggatgtgttgaatccagcacctatcaggataattgcattgtatgcaaatgaatcggtatgttatacaacactaattagtgtctgtaatttggttttaatttttacttaggttgcatagctcatccccctggacaatatggactgctatttactcttgaatgctttttaattttcatgtgacctcttttggtaactaggccttgttcacataccctccttgtgattttgtctttaaagttgtttgtatctggaatgagtgaaaatgcaaagtgttttgaaaattataaacagttaattttgttttcctgtttaatgagccaaaatactggaagccagaaaatcaggttgaacatgaatgctaggctctagggctttcctgctcatctgcttctcatttgtttctgcactatgtcaaagaggacagtggttcttgttacaaaccaaagaggaacattgagcacagtgggaaaattggactggttgatctggtcactggagcaggacttgggttcttctggccagattttgactcccagattcctttacaaaacgcactcattcattcatttatatatgttcattcaataaacattttttgaatacct

SEQ ID NO: 10144 - DNA, 4093 bp, Homo sapiens
aatgcgttcagaaatttgatttattcttggactgtactcttcgcatggactgggaagttcttttaaatcattaaatattaagacgaccatctcttctattaaattacagtacatgttctagaccattgagatcaagcctttactccctttgagagtttccaacatcagttgattgagcttcaggctttacaacgtttatccctgtagagatcatctttacagttcctcgggaaaatgtgaatgtgctgcgttttgttttctttactgtatgaaaacaggaaaataaaagagaaatttagaaaatacagctcattacaataaaattgttggatttcatttccccaggtcttcagtgttgatgtaaatgtgttttgtagtgttgcttagcactttgcgcattgtgtaagttgggtaacaaaaatggcaaaagaaatgcagatttcccagttatcttgctctgaagacatttctttagctagtcttatttaattttaaaggtttgataaatatacaaagacccaagcatacaatttgagcatgctgtattctaccacttgcacttactcatcttctagccttatgaccaggaacctttgttttgggctcaagtacacatcctgatttggtttctccctgttgtaatttgagatttcccaaattaagtcttataatgattaggttttgttctgagttatttctagagaaagaaagtattttagtatgtgtaaattgtacaataatttttttgctgttgtactcactgctaatagtggattgtatagggtggtgtttttatttcatttattgtagacaaaaataatgaatttagtatacacatacccactaattcaagtatgtcagagcacaaagttggcagctggttatatttaattcagcccctctgaaaagcacatacagtctatactttgtttataaataccctaggtcctccctgcccctaaatatatattttggtgaagctgtggtgcactattaattttctgtttcaaaatgcaatctaaagatgcaataaatatgatgaccttgatagttttaatgaaatcttcaattcttgcagctgtgttttggaaagtgattaagcaatatttctcaaacctgatgattcttggatatttagctattgtcctccaaagagtcatcgtttcacgttttcaaacatgtgctttgtgctgaagattcttgtcagatatcctgtgcttccagagtatttttatcttcaattttatttaattttgtttcattttgttttcataagacaatgtttcagatatgtaatggggcaaaccactatagatttctgttggatagaaaaatgaaatgttactaataagtttaaattgacccttcgttgactatcagtactgttgatacatttattagaatgtatgtctcagaagatggtttctgtttaaatttatggtcaagttacaacaactgaattctaatatggattaaaaactccacataaatatttttccccatgcgtcttgggttataattttccttttagacttgcaaatatgcttttattgcaattttgtctccatctgtactgtagaattacaagccttgtgctctttatctctacattttccacttctacatgatgcaattaagatgccaatgaaaagtattgtgaacattattctcaggacacttttaccatacttgagtagtactaagtcaggtgtaacatggaaagctaagggtttcaccttctgattttgacataattggaaattttctataatggtaagatgtttataggaaagtaatggtagttcatgtttgagaatttttttattgctttcatttcccagttaaatgatatttaacacctgggaaaacaggacagctcagattgtcgagttagtaaacatgagcgatgtaaaaactttatttgaaatctcctaagtgagacattaaacattttagtgctagtttaagccattaaaagtaaagtttaagtttacgtcattgtctcaagtgtggctgtaaaaatcagatctagagtttagagacatacttgttaactttggagcacaggtttgatatttatgcttctaaatacattaaaacatttctgaattgcagttgaatggttggagattgctggcgatgtgatgctgcactgaaaaaactggtcacacaaaatgtttatatgtttgactgcataagtattattttaggtcataaaggttataacaaaatacatttaacattgctttctttttagcaagaggtcacagatgctattttttctcagtttttaatgctttaatttgaaagaaaaatgcatcctaaccattccatcctgttggtgcagagaaattttggtgatttattagaagacttttaaggagggtggatacatagtttttcaactgcaaaaatcatgtcatctcttcagtaactgttaaagtgtaattctctgccttcattatcaagtccaggacagtgtttattttgaatcgttaacattatttaaagactgaaaattcattgcaattagggaacgcacagcctcacaaaaagtggttgtgattgcaaggattctttatgtcagtgaacttaaaaagggaatgggggaagagatgcatgcctttctaaaggtatgctagagtcacctgtgtagcattgtaattatgtactatcaaacccccaagatgctgatgataggccttctctgtaagaatccttctcatagtgaagcactgttgatgttttgttcaccggatatgttgggtagcagaaaaggcctagaaccagttttaagattatgcctacatctctagaagactagtacactggcatcatcttaggtttctaaatattatttaattccttaatttggaaagcagttttaatgtttacagtttaagatactcattttcagtaactagtgttaaagatttttatctttgcctgtctactgtaacttaagactttcatagaataattttttatagagtatatggtatattgtgtcaatcttggaaggaaagctgttgcatatcaattgtaggtcatgtattttactatatgttgcatagtattttgcattctgtaaatacgaatgttaaaacatttcaggtcagcaaaattagaagtcatttctagtcctcaaagcagaaataattagaaatgttaacatttaagtgcttatcatatgccagatactattctgaatattttatgtatattcattcatttagttgtcatattggctttatgtgacataactgtcattataccagtgttgtccaaggttgctagcaggaaatggcagagccaggagttggacctaggtttaatcctatccatattccatgttacaaattgacatgattttccatattaaaaaattttcatttattttgtacctcattcacatgaatagtaatgtgacaaactaaagttaatacatgaagcattgcaatatggaattttgcacatttttgttagctttacattatttgctgataccaacttttggtaggaaggaaaacagggaaggtgattgctgctattctggaatgtgtccattgaaaagaaaataggcgctttgtctcctacaatcttagagaaagttttacatacttaagtgggtaccacagataggcatgtaccttaaattcaaatctacagttttacaaaatgttttcctttgtgtgcctttcctatgtcaaattagccagaaggaagaagagacgttaagaatggcagataaatttaacaggtaatgatacagagattggccattacgccagctctcaggagaaaaacaactaggatgtcttgaaacccgtgcatttaattttagaaatggcaaatttgtaagcgtgtcatttaagtaatttgatgctcagttttagggtctaagttgacctcgagtgagccatgcaaaaatagctttaaaattatacatgagcagctcaaagtaaacgtgtattttttagtaacaatgaaattgtcaaatttcaagattttaataacaggacagttcaactaataaactttattgcatacaagatttattgcaatgtgggaaaattaaaattctcagtctcag

SEQ ID NO: 10145 - DNA, 631 bp, Homo sapiens
gggctctgcagcatcagacccacctctaagagaactttctgaatttgcagctaatctcggggaagagaaagataggtttaatttatttgaagttttcatggtgttaatatttttgtttacctcgctagcttcagaattttgccaacctctgaatttgcacattttgtataatttttttttctttgagcagtgttgatcaagccaggttgaatatttgccatgaaattccagtgaatgtgtagctcaaatgcaaaccctaagtttgctgtcagttattgtatggtcagtaccccagtcctagtacacatattttaaaggttaaagtgaatgtttttgtaacatttaagcatatttcagatgtaaataaaagattgtaaaatatacggtttttaccaaatttaaaagatcctttttagttaatactatgacagtactaaaaatatatgaataacatttcagataccattatattaaaatatttgtgtatgtgtacaaaagcgttgataaatactaatctttaaagtttgtggagttcctttatttgtaatatatgtgctcttaaaagcaatgggatgtgaaattatgaaagtattttattgttcatagaaataaaaaacacagttactttgca

SEQ ID NO: 10146 - DNA, 1029 bp, Homo sapiens
aatgaagacctaaatgacctcagcaaatcctcttctaactcatgggtacccagactctaaatatttcatgattcacaactaggacctcatatcttcctcatcagtagatggtacgatgcatccatttcagtttgtttactttatccaatcctcaggatttcattgactgaactgcacgttctatattgtgccaagcgaaaaaaaaaaatgcactgtgacaccagaataatgagtctgcataaacttcatcttcaaccttaaggacttagctggccacagtgagctgatgtgcccaccaccgtgtcatgagagaatgggtttactctcaatgcattttcaagatacatttcatctgctgctgaaactgtgtacgacaaagcatcattgtaaattatttcatacaaaactgttcacgttgggtggagagagtattaaatatttaacataggttttgatttatatgtgtaattttttaaatgaaaatgtaacttttcttacagcacatcttttttttggatgtgggatggaggtatacaatgttctgttgtaaagagtggagcaaatgcttaaaacaaggcttaaaagagtagaatagggtatgatccttgttttaagattgtaattcagaaaacataatataagaatcatagtgccatagatggttctcaattgtatagttatatttgctgatactatctcttgtcatataaacctgatgttgagctgagttccttataagaattaatcttaattttgtattttttcctgtaagacaataggccatgttaattaaactgaagaaggatatatttggctgggtgttttcaaatgtcagcttaaaattggtaattgaatggaagcaaaattataagaagaggaaattaaagtcttccattgcatgtattgtaaacagaaggagatgggtgattccttcaattcaaaagctctctttggaatgaacaatgtgggcgtttgtaaattctggaaatgtctttctattcataataaactagatactgttgatctttt

SEQ ID NO: 10147 - DNA, 4611 bp, Homo sapiens
agaatgcgaaattcaccaacacgtggccaagagaaacttcctagggggctaagacttcctagactgtgctaagagatgtcatggtgctcattttggactccctttcagtggttccttctgttttgtcgtggttattcccagagtcctctggttccttacacattaagcaaatgctgcacagatggatttgtttggacctcccaatctagggagcctagatactcttattttactgaggatgatcgaagaactggctttacttaaaaatatgctaattctcagaaaggcaagtagatgataaaggccagattacaaattacattactgaaaacttcattcttgggttaacagtatctcaaacaattgaagtcaattactctataatacagtgggcttctggatggattttataggaaaaaataaacaggtcaatgaatgaaactagaaagcagagattttcaacatttcaaaatgatttcctctgtaatctatttttccatatactttaaataatggtaaaaccatgacgcaaagagagatttttttttaaagaagaaaaaaaaaaattcacactgccagcgttaacagttcctttcaaaggagaatgaatcatgatggcaggaaggcccacagtcgccgtattccagagatgcgacattagcataaacacatcacagatgaatataaaacattatgttctcttctgcatttttcagagaatagaaatgcctactttggcaacccttttgaaaagtagcaattatggaaaaaaaatattcaataagagattaggagcctaaaagctattagtgaatattaaggtagttattcacaaaaattgactccccattgcagtgaacttccagacagactgcttttccccagtcggggtccggcgtgtcacaggtgcgtgcgtgctaatgggactgacgctacatggggctcactcaggcaggcacgcgcttcatacaaagcatctcactcccctccccaggagagcctgcacagcttcttgcactcacaacggacactttgctccacacacataatggcagctcacacagggacgtgacagagctatcattatgcacttgggagaaaattaagggccgatttaattaaacttaggtaagaagattcatttaagtcagggttaccccatcaggaggacatggcactatctttaaacgaaacaaagacaatttataatttgaattttatgctcccgtggttggctgttacaggagcatcccattttgccaattttaaagacattcttatatttcatatcagtcttgtaccaaggcaacagtttgacatttggcattagtattttctaaaaaagtttagaatgtgtgtcaatttataatgattatttttttctgtaaagcaaaagatccctttttctgttttgctaggaatttggtgatctaatcctaaatttaaaagatttgttggaaaaaatttttaggaaactcaccttcctcatctaaaagaaaaaggcattttagagaaaactaaagaaatttctcatgagcgtgacactcattttagtgctttgtttccgtgcacttaaaaataattgagaagaaaaactcaattaaaattttgtttataagaaatgttttccttgccaaaccttgatttgtaatgagctcttatatgcagaacacatttcaaatgagttttgctatgggctgcccccagggtggcaatttattttaagagtattttctggtaaaaagaaaaatgtgtattttaagatgaaatattttcttgatgtagcagaatatttcctagttcatttgacccatttgatattttttaaaccatgctctggcatgttgaatatttttgtgcacctaaaacttaagccaatttcaatcttatttgtgattacctttctccttcccaaaaagctttatctattaccaaaagtcaaccctcctaaaagttcaacctgttcatcttgaacttggcctgagaacattttctgggaagaggtaagggtgacaaatggaacatcagaaacgtatcttgcttgctaattattttaaacactttaatgttggtattagaatattatcttcataagttaataaataagtaaaaaaaaaaaacccacacaaagacaggctaaattatgtagacagtttactccacagtgagcttgggaaggtatcagactgttcaaaatgttagtattacaagagctgtctctaaatgcagcattaacactgccctctaattttacaaaagtattttaaaggatcaaaagggcggaaaaataacttcttggaatagaagatcctgttaccttaaaccattattttcttcacctggttatatatcaatgtgccttcaattaccctttctctgtggaggtgatgaacaaagcttttaagttgttctcctaacccattattggagatgatccttatcaaacccttctctccctgcctccccaccaaccttgtagactggaacgtgcctagattgccctaatgggaactgttctgttctgtgcccgtgctggaaatctgggatgcttccttctgggttctgattctcagtgagtggagcccattcatccaggcaggtttccatgctatgagtggccctttcgttctgctctcacactccccacattgaaagctgagtcatcgctgctttggatggctacctcctctttagccccgtgcccgtctcacacagcctttgttttccacctccacccttgcagtaggcatctcccagttggtgccttagtttcaaatcccagttgccatctaagatccacccaaacttgattttgtcaccctctggattagaatccttctgtgactccgctgcccatgaagtccaaatgacttcctatggggtgaaaggtccagtggggactgttcgagggttccctctaggagtatttcctgtcatgatgaactgtgtgcagctctgcagacactcccagcacctcttcgactttgctcctgcttcaccagtgatgtcctccctggggtcagtttaccctgcgtgggaggtgaattccctgggggaaacttaggctcccttctgctgctcttgtgcagtgcacggggctgtcctcattttctccgttccccattgcttctttaatgtctcagtgcacttccttcattccattgccaaaatgcaagccccttgagggcagggaccatgcttgactcgtttttgtatgcctaatgcctagcacagagttgaacacattactgccaattcatttttttcaatgacaattccataaacatcattaggcattaggtgttcagctctgcatataaggtcttcatcagcaagacggttacaagtataaaccatttcctatttcagaatattttaatattcaacatatttgtatacccacattctcttgttacaattattgccagaaagccaattgataagctttcaaaatgggcttatcacacccctccaaaaatagatttttgttttttctataaacagaaatttcagaaatgagatttgagagatccgactgagaagacccttcagtaaaatgtgacatgacttaccttatgctgtaatctgtattccctcaggatttaagagcttcctagcataaaatctttgctaaacgtttgtgtacatgttattggtgctccgaaaaatagtcaatggaatggtgcactacaattgggctttatcatcttattttgaacctcgtgtagattacagtaaagcaaaccattcagtgtgttccaggaaattatattagatctgtgtttctatcagctcactggaataatctgataattgttacttttacttggtatggctgcaagaatagtggaaagaagaggacttgagagttggtcgaacccaggtttgaaatctggcttagtcatttttcagctgttatcctgggtgagttttgccaactttcttagcttcatttccctcattaatacggtgggacataacagctactcttgcattgaaaattaagttagattacctgtctagcatacccatcatcatacacttactatggtcacattttgtatttaaaataaactaatacgaaaaatatttctttttttttacacagaattatgattctcacagggtatataaattactgattagaattatttatatgtggccaattcttaatgtcattgggaatgctgtttcatttcaatcctcaaagttactgtagcacagaaaatatcacaatttcctgcagggacattatcagtaagttctgcagggaacaaacaattgacattaaaaatcagtactctgcaattgtcactgttatcatctgctagaaactctgcataatgcattttaaaccaccaaggctggctgccacatccatgtgaaatgcttgaattttatggtgcttaaatatttaatgattcatgggaaaaatgtgaaatgtgtctaataaattgcatccctttctctaacctctggttgtaaagttaaagactttcagcatgtaacttttgcaagatgcctggtctgccattggcacttaaatatttgttgtattacgatttataatatggttcattatatataaaattctgtgatgacttccaaaaa

SEQ ID NO: 10148 - DNA, 1560 bp, Homo sapiens
tttaatgggaataaaatgtaagtatcagtagtttgaattaatttgagaagtacacttgttttcaaagtcatctttgagatgatttaaaaaatcaacccttcacgtagaaagcacgttgtaaatgcataacactctcatatcagtggttgatttgggaaaggtggagagaattttcaattagttttgtgttgtactattcaaattttttacctcttcactgtgtgtagagaaaggagaagggaaggaggatgagaaggaacggaagtcatcctgaaaataaaagtacaggactttttttttttttttttgagacagggtctcaaaaaaggctggagtacagtagtacagtggtgctatctcagcttactgcagcctcaacctcctgggctcaggtgattctcccatctcagcctccctagtagctgggactacaggtgcgtgccactatgccaagctaatttttgtatttttagtagagatgggggttttccatattgcccaggctggtcccgaactcatggactcaagtgatctgcctgcctcagcctcctaaagtgctgcgattacaggcatgagccatcgcgcctaaaggacaggacctttttattgtatttctttaaagaataaatacataacctgaatgcaatcaagtctttagatctaattctcagcttgcagggaacactaggacaaatccaaaaagtgggtcagcgggcacagaatggcccaattttcaacaggaaaatgttataaaagaaaaatatttttgagggaactgttatagattaagagaatagaggcatgtttcagctaaacacatgtaaactttgtcagagataattgggaggagtatgtagaagaatcggattattgttaattttggtaggtctgataatggttttatagtataaaggctgagtaccccttatccaaaatgattaagatcagaagtgttttggctttcacatttttttggattttggaattttgcctataataatgagacatcttggggatgggatgcaagtctaaccacaaaattcatttatgtctcatacacactttgaacacctggcctgaaggtaatttcacacaatattttaaataactttgtgcatgaaacacaattttgactgcattttgactgcaactcatcacatgaggtcaggtatggaattttccacttgtggtgttacgttactggctcaaaaagttttggatctcggagcattctggattttgaatttttggattagtgatgctcaacctgtatacagaaatgtcctcatttttaaaaaaagaaatgcatatttatatgttttaaaattacttcaaccaaaagcaacggggagatgtttactgttatatttaggtgacaggtacatggcaattcattataccctcctattttcctatgtttacattattcattaattaaaaaacaatacctagaaaaacccaagactttcaaaagctattttctatatgtgccaatctttaaaaaacaggataacaagggtatttatcacattaaaatgttgtaaaacagcaaagctaaaa

SEQ ID NO: 10149 - DNA, 1304 bp, Homo sapiens
cttcccacctctgacagggataccatggcaaataccactctttgcctaggattataattctttgtgcacaatgcatcccatcccaaagacagtccacagcaggacttgctccatctctgaactggtcttacccccttaaacctgcctttatatctaggagtttctttattttattttatttttttgagacagagtctcgctccattgcccaggctggactgcagcggcgtgatctcagctcactgcaacctccacctcctgggttcaagtgattcttgtgcctcagcctcccaagtagctgggattaaaggcacgtgccaccatgactggccaatttttatatttttagtagagatgaggtttcaccatgttggccaggctggtctcaaactcttgacttcaagtgatccgcccgcctcagcctcccaaagtgctgggattacaggtgtgagccaccaggcccagcctatatctaggagtctcttgatgagcattggtcgacagaaagaagtctcttctaaaaattgttaatgcttttatagactactcatagtctgagtcataaaacatcatttgcctttcaatttataccttccaagtgaatatgattattgaggattatctaattattatctacgtttctctctagatataaaaaacaccatagatcctatacacacaaaaatggtttttctatcagaaatggactcactcgcctggcaaaaggacacagattagattattctaatctcaaggccccttaggcttatgaattcaaaaaaaaaaatagaagaaatgaacaaaaacttaaatcacagtttgttattaagtaatatctgaaatgaattagaaagaaaccataagccttaacaatactccaatcacagttaaattaatttagacagaaaagcaaatagcaattgacttgaaaataagaagtggagccgaaggtggatacaagaaatccaggagggctaagataaatcccaaatccaatgttcatcaatgcctacacattcagtacaacctgatggcattaattctgtggttggggaaatgtgaaagtgaaatcgataataccacagttctaaatgtgcactgttggctgaacttatggtgtggtggggggtggtaaaaattaggcttctaagaaaggatgggactctgccctccaggcaaggagtaaatggccccagcagatggaaaactaaagcaaatgtaatcacctgcattttgaaaataggtgtgtttctgagaatttgtttgaattagttctttgtaaataaaacaggattttgaatgca

SEQ ID NO: 10150 - DNA, 2186 bp, Homo sapiens
cctcatcgcaacaaacgcaacagtggctttcaaagttatgcaataataaggaaagattttgagatgggtggcatatgttttgccataacttgacatgctttgcaaatctggattccaatggacctttcaaaaccacaacaaaacctcagttttagatgagttctctatgtgaccaattttactggatgcaattgacaggacccgtcatcataattaaacaacccatattggggaccccctgtgactagtagcagctggaaaattctggtttttatcacttgtaaagacatgcagatggcgtggaaccaaaccatgagaaaactccagccatcctggagttgatattcaccatttgtgaggagaaatactaactggactgaccctattgctaggcttaaatacttatttgatcttaccaaagaagtcaacacatgggacctttgtgtcacatgaaccattttctttcctcttctattaagtgtatttctgtttaagttacagttctctaagagaattacaatgtttgtcccatttctaagggcttctcttcaactctaataacagcattattcacgttatgatttgatagtattattatttaatttttttatgattattttccattttgtgctctgagttttgctgttgaaagtctccctcaagaatagcttcagatcctcttgtgtatttgcagaatacacaaggtcatttcccagtggcctgggagaggcagtgagccttctctccaccaccatagacaggtgttaatgcatctatgggccaggtgcagtggctcactcctgtaatccgagcaatttgggaggccaaggtgggagttttgcttgaggccagaggttcaagaccagcctgggcaacacagtgacacctgactctactaaaaaattaaaaaattagctgggcagcgtggtgtgtgcctgtagtctcagctacttgggaggccatggtgggaggatgggttgagcacaggagtcagaggctacagtgagctatgattgcaccattgcactccagcctgggcaacagagtaagactctcatccccctcctcccaaaaaagagcacctgtgtggtgtctgtctaaaataggaaaacttaaaggaggtttctagaagtattagaaataagaaaacactgatggggggagtggaataaaacacctgattttgttttgttttggtttttgagacagtctcgctctctcacccaggctggaatgcaatggcgtgatcttggctcactgcaaacttcacctcctgagttcaagccattctcctacctcagcctcccaagtagctgggactatgggtgcacaccaccacgcctggctaatttttgtatttttagtggagatggggtttcacaatgttggccaggctggtctcaaactcctgacttcaggtgatctgtctgcctcggcctcccaaagagctgagattacaggcgtgagccaccatgcctggccaaaacacctgatttttaaatggtagcaattgtgctaaataaaatgtgtaaaaattttaaagagttgttaacattttttgatgaattctgctgaaaattatctgaacatacctgtttttcgaaacttcaagaaacttcaataagggatgcattgagcagtctgacagtgagaataaagaatgctgagtcaagatttatattaaggctggaagctgtggctcacacctgtaatcccagcattttgggaggctgaagtgagaggttaatttgagggtaggggtatgagaccatcttggccaatatagcaagaccctgtgtctaaaacaaacaaaaaaatttttaattggattttgatatggtttggatctgtgtccccaccaaatctcacgttgaagtgtaatccccaatgttagaggtggggccggctgggaggcgactggatcatgggtgtgaagccttcatgaatggtttggcaccgtcccctcagtgctggtctcatgacagtgagttatcgtgagatctggtagtttaaaagtgtgtagcacctccccactctctctttctcctgctttggccacgtgaagatgcctgctcccactttgccttctgccatgagtaaaaattccccgaggactccctagaagcagatgttgccacgcttcctatatagcctgtgagctaattaaaccccttttcttacaaact

SEQ ID NO: 10151 - DNA, 1758 bp, Homo sapiens
taaggcagtctgccgtatagatcattccttccctttattccaacttagattacagtggtttgttctaaatgctctaaacattctcaaaacatcacatcacattagcagaactataaaaaaaaatctgctactcagatccactgcatacagaataagtcagaggaaaagcaaaatataggtctgtccaaattcatacaacttgtgggtgagttccaaagagcttggattagaagggctggacaaagagagaattcaatggggcccaaattagaatgcttataatgagacccaatctccaggaaaacaacactcacataagtttaatcatataaaatgatttgtaatgtctctaattagatgaatcaactagaaacaaactcagtggtcaaaataatttttaagagtattccgtaacctatattttacttttctgattatattaaggggctgccagcccggagaaatacttaagatatgggtgagaaatccccagacttttatacaaaagatttccactttcaaatcaatgtcagtagacattgataaaagtatagcagcatcctctactgaggtgatttcatttattccctgcagcccactgataaatatctcacttctcccaaatagtatgtggactcccagctaagcagaaaactattgtcattcaactgaagaagaggaagataaaagattgtcttgtttccatcactgtattacttgtgtaacatgattacataattcttatcctaagagaaagctttcatatttaaaaaaaagtcttttcagataaaatctgcttgtgtcttgaataatatgaaatacaaactttcactttattttattgtaaattataaagagattattgtcttaaataatatattgagttagcttcaagcttcctaaaatatgaagagattgttgtctaaagtcacatattgacattgagctcagtggcctgtttcatcacgtatgtgctgctacctgtacagcagacatgccgctccagtgacatttataatgacagaagcagggtaatggtcttgtgtttgacatgatcagttaggatcatagactttccctgactcgtagatattagccttgaattgggggaaaagaagactttgacacattttagttattttaataacagagatttactcttttgaaaaataaaggtatctaatgtctccctaataagtcttctttccttccaactaaatgacctacacggacttttattttcttgatcaaagaggtgtttattaaggacttctggataactatacttttactctatttttaaagatcacaaagtaattttaaatgtgaacaggttcccataccatgaatgctggcctcaccttctctatcatccacattttgaaatgcaaagaaagctcccttgtaagccatacttccttccccactcccatcctaggatacttgcccagtgctcattaggcatttcttattcagatagtccaaatttaggttattatgcttaatttgacacattaactaaatgcccagttttaaaatatatccatcaattcacgctgaaatgtgcttctttgtgctatcaaatggaatagaatacacttattttttaaacaatcccagaatactgtgtgtagacttttgttgtgctcaaataaatgtttacttatcttacaaagctcaaatactggattgtaaccatgtgatgaagttatctatgttgtacctaacattgcaaattaatcaataaatctctgttgt

SEQ ID NO: 10152 - DNA, 1659 bp, Homo sapiens
atgaacttgagacgcttcagcaaaggcagcattggtcacggagttcaagggaatagatgagtaagcaacgtttcaaatttgggatgaaaagactgccaaactattggctgaccaaggtttttaaattcagaagagcaattctaaatctaaagaaatgtatcattaaagtaattacgttacattgaaacctgctgctgctgtgactgtgaggagggtgggagtgtggatggggaggaaggttctaggctctcttatttttctcatttcccaatgcctctctgtgggagagctccatgccagttttcaccacgctcaggcaaatactctgcagctgttattggatgggccattccgatctgccttatgaaattccacaagaatgttaggggcacctatgggatctctagtggggtgggcagggtgctgatggggacgctggccgcagggaggaaggaacatctcgggagggccctctgttcctctcccacggcagatgccctcctctgtatgcaaatcagcacagcctttattgagctttacaactaacaacctgatagttggcagttaattcacagttacagataatgcttttatttacataaatataccaagtagtaccctcttattgtattcacttcatctattttcttagaatacttgcaattactaatgaccccttccctttccctcctgctgccctgtccaccctctttccccttctaacatccttagagggatgaaatctcagcatatgttgcaggacaccaaaaggaagaaaacaatcaagcaaataaaataaacagtcaaacaaaccaggagtttaaaacaacaaccccaacaacagaagccttggcaaagaggaataagtgatcagcaagtgaacacactctatgtcaactctccttttatccagctgagatttatggtaacttatttaattaatggtcctgtctgatgcatccttgatggcaagcttcaaatctgatttggtatcaccgaggaaaccttgcccccatcactcagcattgcacttagatacagaatgagttagataaacttggcttgtctagagacccatgtcatcttaacctaaagggaaatcttattgcgttatcataaaattgatgatatcttagggtcagaattgccctttttttttattttgaatgggaagttctcactaaaacaatcctgagatttcttaatttcatggttctttaaatattataaacacagagtcaacatagaatgaaattgtatttgttaaaatacacacattggaggacaagagcagatgactacttttcgaagtaatgctgctccttcctaaaagtctgttttcaatcctggtaatattaggggcactgcggcacctaagaagccttaaatgagagctaatccaatctagagagcgatggtgtcagcatttcggtctgcatatctgtgtgtccgtatctgcgtttgtgtgcgtgtacgtgtgcccctgtgtgtgggcccagttttcaggcatgtagaataagcatggagtcatattgaggaggactcacttcttgaagatatgcttgttgctttacaacatatgtaagctattctttagcataaatgcattcattctttaataaaaatatgtttgcattaataaagctgaggagtttcata

SEQ ID NO: 10153 - DNA, 910 bp, Homo sapiens
tctttttttggattatttttcaaaaagatgagatactacactcatttaaatatttttaagaaaataaaaagcttaagaaatttaaaatgctagctgctcaagagttttcagtagaatatttaagaactaattttctgcagcttttagtttggaaaaaatattttaaaaacaaaatttgtgaaacctatagacgatgttttaatgtaccttcagctctctaaactgtgtgcttctactagtgtgtgctcttttcactgtagacactatcacgagacccagattaatttctgtggttgttacagaataagtctaatcaaggagaagtttctgtttgacgtttgagtgccggctttctgagtagagttaggaaaaccacgtaacgtagcatatgatgtataatagagtatacccgttacttaaaaagaagtctgaaatgttcgttttgtggaaaagaaactagttaaatttactattcctaacccgaatgaaattagcctttgccttattctgtgcatgggtaagtaacttatttctgcactgttttgttgaactttgtggaaacattctttcgagtttgtttttgtcattttcgtaacagtcgtcgaactaggcctcaaaaacatacgtaacgaaaaggcctagcgaggcaaattctgattgatttgaatctatatttttctttaaaaagtcaagggttctatattgtgagtaaattaaatttacatttgagttgtttgttgctaagaggtagtaaatgtaagagagtactggttccttcagtagtgagtatttctcatagtgcagctttatttatctccaggatgtttttgtggctgtatttgattgatatgtgcttcttctgattcttgctaatttccaaccatattgaataaatgtgatcaagtcaagg

SEQ ID NO: 10154 - DNA, 340 bp, Homo sapiens
tcatagcaagaaatgcagtgtctgcctgttacagcaaaagaaacaaatcatgatttcttttctaatgttatcacctgagtcaaggaaacatgttacgccttcttgttgtaggaaaaacggcttgcagattataaagagacatttggttgatattcattaatggccccatggacttaaagtgatcaggccctaaaacgttgttgtgatgaggtttctttagcaagttcttgtttaaattatcatttatttgatgagtgaagtttttaacatgctttgctgtgtgaaatttaaaaaagggatgtttttccaggctggaacaataaatgtggctgtgcagttt

SEQ ID NO: 10155 - DNA, 2396 bp, Homo sapiens
tatcatgtaatgttccgtgtaggtttcattgtaatactcatgcctacctcgcatggttgctgtgaggcacctatgacaggacgtgggaaagcattttgtacggtaactggcactgtcatttgtaaatgccattgtcacagcctcatttgtaagcagcactgcctctctgtttggggagatgtaatgctggaagatcttaaggactacatacattctagagatgacagtgttgttcaaagacagcctagtaagtaattggtagaaatgcccttataaaaaccattctcttgtcatctactgggactagggttttaaatacagcttttaaaaacaaaaacagggaataaaagcttttcaactcaaccacttctttgtaagacaaaactgaagtatctgtgtgcttccagaaagcttacagataaatgggtttcaagcacaagaatatgactagatttcagaaattaattattacagggagctattgatctactagcatcaaacaaaggcaagctctaattccacaggtaatacaatttagtgcaattaaagaaacacggcttgtatttttatgagggaattctgcagctagggattgtgactcctaaatcctcctctaaaagaaggcacttgccattaatcctaattcagtgctatccagttataaatggaatcttgagacaaaaccttaacaaagaaataacagtaatgatttccttagcagaagccgtatttgtacgcacaacattaaatcaagggctacaattcaagcacttttattcgtatcattggcctcttagatgatataagcatgaggtggggcctgtaatatttttttctgagtttcttctgcccaaaaatataatatagaactaattgctaactgacaaataaagttaatagttaaatcatctccaaggaatgttgctaatccaaagtataacactatcaatttgtgaggataataaatggaatgccattagtgtagatgtctgtgccacatctgacactggagtagtgataacaaatagcccatctctagactctcgtgttgttatatagaccattcatttgcctgagcgtggcacagttttaaaaatagttctcttgattgatttcatacagaagatgactgtgatccatgacatctaataatgccctttctttatctgagatgtctatttttctaagccaaacgtttttcagactgcagaatgttcttcccagatcatttgaaatttctggctgccttacttgtttacagatagtttaagactatttaaatttctactcacaatttgatcatcacacacacacaaatccttgaatatcattgccagtgtcttaggtcaaatttacctaaagtgaatacagcccattctcaattatccttcacaattagacgcaggaatgctactaggaattggaatcaaacaatgccaccccaagcgtaattttagccagcagtttcagttatactcaaccatgcccttctgagctgttaacaagtgattcaatggacaagttctctttttgttccatctccattatttcctgctctaatgtatagtgggagtggttgtgtaatgaaaggaccaccaaaataataaaaggcagctaatggaaaggagagacaaaagcatggttaatatatatacttaatattacctccaatgactcgggaattgcctgtaaattattatagacaatagattgcatgtcatactccatttggttcaacacaacaacctatgtgttatcattacagctttggctgctgttaaagaatccagctctctattttgataaagataatcttaaagctgaggcaatgctccctcctctatctctctctgtgtaatttaccatagaattaggatgattagattgaaacacatgttgtatgttttaaaaactacattgcttcattactttcattttccgacaacatcaaactaacaagaggcagtgttaaatattttaaatggtgctatagccaatgtatttgaatgcttgcactgctggttgtgtatcatcaatatgaactttttatccaatgactcaactctaattacatctaagttagacttgctcacgttcagtttgtacagttgtgtgttgacttactatgttttgaaagtggtgacttctaccgaatgagtggaagttcccattgtcaaaaaaaataaagacctgcttgcagtattcatgttgacaacagagtaaaagagaatactgtaaagaattactgcaaatatttcctgtttatgttatttgccgttgtttgaagatattataaagggttaattgtatatttatatcatgtgctttatcgttttcccctcatgtatccaagtaatttttatttacatacaactaaataaatgttgtcctctttg

SEQ ID NO: 10156 - DNA, 191 bp, Homo sapiens
atttctactaccctctcagtcaccatgttgcagactttccctgtctggaggctcaccttagagcttctgagtttccaagctctgagtcacctccacatttgggcatggcatcttcaaaacaattaatttgcatagttaatttgggatggggaagcaaatgactctaaaataaaaattaaatgaaaaagctc

SEQ ID NO: 10157 - DNA, 187 bp, Homo sapiens
ccctgttctgtaaagactgaagcatccccacctcaggattcagctgatgggaccctggcttggactgttgattgccagtgagtctgggatgtaattggctgccctcaggacccaaacccagacacttcataggattatcacaccctccatctttattctttctttttacctttaaaagtctatatct

SEQ ID NO: 10158 - DNA, 2674 bp, Homo sapiens
cggaaggacatcctgttcaggggaagaaagccctggccctgaattctggtaacggatatcgcgttccagggttttgatgtggtgggatgatccgcaccatcttcactgatgtgcttccctttgatgcccattgagtgccagctttgctcattataccccaaagaccttttttccactgcccagacagcttataccacccagtgttcagggatctctgaagaacccacagaccaggtgaattactgatttctaagtccaaaaactatagagcagaagaattgagaaagagaatgagaccatgtcaacaaggctgtttccaactctccccattttcctgttcgactgggaggttctggaaagaaagagagagagagaaaagaggtaaaggagggagccaagagagtcagttattggggagagtgtcttgggcagaggtggggtggtagggatgagtgaagtccctttttagtttgggtgtcccagaacagagcagacttgcattttccagtcccttctggaactgtgttgccaaaagcctcactgagatgacagcaagaaggggtggtgttggggctgggcaagtagcatggatcaccccaagtttccagtgagcctcagaaaggtgaaggaagccagccacacctttccgtgcccgtgagaagactgcaaaatgactgagtggggtgttgatgacatccaagagccatgaggggggagaggaaaggacacttctggggaaggaagaagacaggcccagggctggaagcacacagcccctcccctatcaccatcagggtgtccacagcacggagtgttggtgctggcccagggtgaagagagacagtgagagacggcctgggagcggggagaccccgacctgctttctatcttaaacagactgggaagttgctcattacagctagcttccttgaaaacaatggcaaagaatcaggcctgccttggttccaccataggagggtggaggaggtgctgtcttactcacctgcatcctggctgggcagctggcacccgtggcactgcccatggagccgtccctccctggcagctgggagggagatgaggcagctaggcacaagggtgtggccttgagaaagaaggcaagggggggtccctgctggtcccaggaaactgtaaacaattgagtcacgcctggatggcttctcaacggatctggaggaggagtgcaagtgacagcggaagcctcccaatgactcagctgctccggagagtgaaatgatgagaaggatccattgtggggtggttttgcatgacagagcgagtgggatgaggagtaactgatgagacttcatgtgagcaaggtcttcaggaggaaaagcaactgaggtctacttgtaggatctgggctcagtgggggctgaagggcttgggaggggtggtgacctgaggggaagaagagaagcatttggataaacctggacctgtggggaggaggaggaggaagaggaagaggaaaaggaggggaagctgagccgtggccctaggcttgaagcctgcagggagtgcagggtgggtggggaacctggctgagctgcttcctgcctgagagctttcccagctggcctaagagccatggacggacaggagtcgccttctcaggagcagctcccgctgttgctgtgttcaagtggcaccctgtacacctcctcctaggtggatggagggaagggtgaggaagagagcgtcaatgaaggggtggaagtggatgtggaggagtgaccagaccagaccagaccagaccagagggatcggaggctcaggccccctgagctgggcctctaagaaccacagccacagagtcaggctctgcagacccagaggtaaggctgcctggctgccccaaaccccagacactcctctccttgcctgcaggctgccctctcccatggccaccctagacagagacccacccgtgatactctgagggagccagactttcacatgcaacggggcatttggggctggttcgggtcagtgtctacgggtggtggatttagtgaccaccctcctcccacttctttctctgcacgaggagttgggagcctgcctggtggagttgagtgatgcccgtcatgtgcacttgggtctaccaatgtgcttaaggccagatgggcttcctaagagacaagggtgggtggacctaaccaactatcatccccagcgatgttcaaacataaaatcttatctatgtgcagcatgactctctccaggtgacagaaagggctctagacagctgagaggacctgatcatgtagggagggacggggaggggagccaggacccaggagctgcatggctgtaagaggaaggtccttggagggtatcagcagtctcagtgtgatgtgacaactatggacctgtgggtgtgccctggggacccctgacccatcccaaaacactgtggaaagaagggcctcttctccgtggggacccgtgtctgtgggagcgggcacaggtccatgctgcaggccactacggctgctcggcaggagggccgagagtttggacccacatagctgcaacccaagctggcccataatcagcagtggggcccagcagcacaggaggggcggacggttagctttggaaaaaatgacttgattaatctgattcgccaaataaatagattcatgtg

SEQ ID NO: 10159 - DNA, 276 bp, Homo sapiens
cagaactggcagttgtcatcaaacataatgatgagtaagatgatgaatgagatgtaaatgtgccaagaatatattatataaagaattttatgtcatatatcaaatcatctctttaacctaagatgtaagtattaagaatatctaattttcctaatttggacaagattattccatgaggaaaataattttatatagctacaaatgaaaacaatccagcactctggttaaattttaaggtattcgaatgaaataaagtcaaatcaataaatttcaggc

SEQ ID NO: 10160 - DNA, 442 bp, Homo sapiens
cttctgtccctctgctttcccttttccatttgaaagaaaggactctggggtttttactgttacctgatcaatgacagagccttctgaggacattccaagacagtatacagtcctgtggtctccttggaaatccgtctagttaacatttcaagggcaataccgtgttggttttgactggatattcatataaactttttaaagagttgagtgatagagctaacccttatctgtaagttttgaatttatattgtttcatcccatgtacaaaaccattttttcctacaaatagtttgggttttgttgttgtttcttttttttgttttgtttttgttttttttttttttgcgttcgtggggttgtaaaagaaaagaaagcagaatgttttatcatggtttttgcttcagcggctttaggacaaattaaaagtcaactctggtgccag

SEQ ID NO: 10161 - DNA, 627 bp, Homo sapiens
aaatccatccctctgaaaactgccttggcaattcccggctgattcttcgggatgggcctcattgatggggagtctcagtggatgtttgacttttgctttctacctgaccctagtcagagattttttctttttccttttttttttttttttttttctgagacagagtcttgctctgtcacccaggttggagtgcattggtgtggtcttggctcactgcagcctctgcctcctgagtagctgggactacaggcgcacaccaccacactggctaatttttgtatttttagtagagatggggtttcgccatgttggccaggccatcttgaactcctgacctgaagtgaccttcccaccttggccccccaaagtgctgggattacaggcatgagccaccatgcctagcccagaaattttctctttgaatactatacattgatgagttctgtctttatgcttatgatccacgcaggtaggtcgtctcagatttaattttcagtggtttttttctgtcttgatggagtctgtgtaacatttaaaatattgctaccaaagcagtaattcttactatagttattaaaatgcaagaacaatatatttaaaattatttcataataaagttaaaatgag

SEQ ID NO: 10162 - DNA, 1883 bp, Homo sapiens
gtggagccttaaagtggcttcacctggaggggccagagggtcacctggagctggggagacacatctgccttcctctgcagggatgccttcacgtactgtccctagttcagcctagaaattctgaccagcacctcagtttccctcagagggaaacagcaggaggagggatccctgactgctgaggactcacactgaccagacgccacaccttgtgcttcttatctgtccactgccactcccccagttcaaatccttaccctgcagaaatatcacagttagctggggctcagcagtcctccctctggggactccctgccaccactgccagtttctgaaacggtcccactgggtcctcactgtccttcccagttcctgttcaggttctggcaggggcccagggatccaggggacctggttccaatctcagccctgctgtcaccaccttgtcatgcaccatcaagcatatcagtctacctttctttttttctgagacagagtctcactctgtcgcccaggctagagtgcagtggcgcgattttggctcactgcaacctccgcctccggggttcaagcgattctcctgcctcagcctcccgagtagctgggactacaggtgagccccagcatgcccagctaattttttttaatttttagtagagacggggtttcaccatgttggccaggctggtctcaaactcttgacctcaggtgatccgccgacctcggcctcccaaagtcctcggattacaggcatgagccaccacacccggccaatcagtccacctttctaggccttggttccttgcctgaaaaatgaaagaggcgctggctttccacagtgtcatgctttggcactttagctatggttttctttctgtgtgtgtgtaagccactgcttataataaaaccaacaataccctcagactgaaagggcggaagttattatctgcatctttatcaaccccaagccccacttcctccctgacctccccatgccctccccagcctctcccagcacaagtggggcaaagccagcatgcaagcagaccccaccaccacagcccacctccgtcctcacatacgtgcaggctggctcgggagtccagtgagcagagcattggacttggctggccagagggtctctgagggcaagagacatggccaaccaagggcaaggagtgaccctgtggagggttctgccgaactcaatgcagtgagaagagggacagggacaagtagtccttgaaactgagccccattctgaatccctgcaggccaagtcattgctcagccaggactcagttcatggaggaaacttgtcctgctgcagtccctgagtcttgtcctcctgagaggaagccctggcttccaaggctgggagctggaggatgaccttcggtcggtctgtctgggttctccctgcagacagcttcctagctcatgcccatagctcatgctccctgccgagaaagtggaggacgtggtacagggttgcagatgtttagttttaaaaattcaattataaaaataataaatgctcatgatagaaaatttggaaagtgcaaataagcaaaaatgaaaacaattttaaaaatgtaaaacctctcttgccagggaatgggggaagggcaagtgaggagttctttaatgggtgaagagtttcagttttgcaaaatgaaaaagttctggagatcagttgtgcaacaatatgaatatacataacaatactgaactatacactgaaatggttaagatggtacattttatgttatgtgtattttaccacaatttttataaaaagaggattaaatctaaaggaaagaaaaaattaaaaccacccataactttactctgaagcagtaacagtggcatgtttcctccta

SEQ ID NO: 10163 - DNA, 515 bp, Homo sapiens
aagaagaatgtgtgtacatttcaagaatttgggttttttggagggaggaggaaactgtttacttttttcctccacacgtttgatttttgacacatacacccctaattccctcaacagcagaacctacctgcagccaccaggggaccagctctgtgtaggtaaccagatggctctttttcccaagccaccatcttccagctgaccagactaaactcccaaccccagaccagggcaggggacaggtctcaagtccttcccagcatacacacagggaacaaacacataccacaaaccggtaactgtacctgtcaccctccttgtctcctccttgggccctacaggctacacatctacctttggcccctggttttggaaaaattccgtgttcctgacccatgtttagttttttcctaccatttctatttcatacattctcatacatttaacttgtaaaatagactgtgatattattacataatgtaattaaaaatatgaattaaaatattcctacagtc

SEQ ID NO: 10164 - DNA, 326 bp, Homo sapiens
gcctggctgcccgcctgcacgcccccactgcccccgcacgaatcacctcctgctggctaccggggcaggcatgcacccggtgccagccccgctctgggcaccacctgccttccagcccctccaggacccggtccccctgctgcccctcacttcaggaggggcctggagcagggtgaggctggactttggggggctgtgagggaaatatactggggtccccagattctgctctaagggggccagaccctctgccaggctggattgtacgggccccaccttcgctgtgttcttgctgcaaagtctggtcaataaatcactgcactgtt

SEQ ID NO: 10165 - DNA, 38 bp, Homo sapiens
taatcagcattttttagcaataaagtatttttaaattt

SEQ ID NO: 10166 - DNA, 2041 bp, Homo sapiens
gacttatccattttttaatgtattaaatacacccagccagttatgcagctactttttctttactgtatctcatgttttcttttttcaatgctaattatagctctctacatcacggtaatcatgcctatgcctacataagaatggctgagctaacaatacacattctggaaacataacactctacattacaaagtttgttacctgctgaaatcaatgtaactcaacttgacagacacttatacagaaatgttgctggtgaatttataagaatgtggtatgatactagtaatgaaggcaaaatggacagtgaagtttaacacaactgaactctaagaaaatcaaccattaatctctcattttcatctgcaaattgaagcaacagtttagtttcaaacctagctccctgggtggaatgacgacttcactatacttagtgaatatcctttaagagctgggatttttttcaagacaacaaagatcattcatttggttctttatactatgaaacttgagtaagtattacctccttaatttttaacaactaagaacaaaaattaacgagaaaaacaacaaagtacagatttatacataaacctaaaagcatttgaacatgacacccgaacacatacatatatgttcacttatttgtggcagaaggtgatcagataagctccagcccaaatggaacctgtggggtggtattttgcattgcaaggagacgcaaaattttattttaaaactgtcctccataataatcaaacggtgattcatctaaatgacttctagcaacctaagtaaaaacattcccctcctatgtatgattcatttgatcatataaaacatcatgatggctctaattcataaatacaaaaatatatttaagtctttatagatataaagctttacttagatataacttgagtgagtagggaaaaaaatctacagtagataaagcaaaagataattaggcaacaaagcattttcaaactcaaattcctgtttccaacttcaaatagttttttctataaacacaaaatcagtgtttattcaccagtaggaggttggactagatgaactctattatttctttctaaatctaatagtctataaaaattatgtttcctctgttttttattttatctatgctaaaatgagccctttcccttatgtccagtttaagatgatcatttgcatgattttcatttcaataaaaaaaagagaaactgtccttaaaacaaaacaaaaaccaaaaaagtcaccctatcaggtttcaaacagatttgtggctgttcttttctgaaatttcccttattcaggtttctgtgggaaaaatgaaagattaaccttccccactggtgatgacctaggcaggaatcatctcttgaaataaatactagctgagtaaaggcaagcaggtgtgaagagcagggctcagcagcaagtcacatttttctactatttgaccaaaaggaaaagaaaataaagaagaactctggagtggtctaagactgataatagcagaagaatatcaagaacacagaaacttaattattgtgaacttttgctgtttgaaaatcttagacattcattcttaagtagaaatcagaccaacagattttcccaacccaagactattgtaacacataaagacagcaagaattcttatttctataataaattaacaagattcacctaacctttgaaaataaagtagtattgaagacttacatggtatgttttttcctaaaggcactacatcacttacacagttcaccctctcgcttgttaagtgaagctgcccaaggtgacataagtgaatgagtaaaacctgagatctaaggttccatttaagtcagatgagtttcatattatacttactgtttataataaatttggcatttgaaaactaaatatgacttcccctacacatgccaaaaaaaactattggtaaactactgttatttaataaacactttataaatctataagaaacgtgatccaaaacttttttgcaggagatagaaagtttctgggaggactg

SEQ ID NO: 10167 - DNA, 780 bp, Homo sapiens
cccccacccagggggccagcgggagcagggcctgcatgagaccccgacagaaggtgggggggggggggctctgggaagcacaggccagcacctccccaggtggcaggatctggcttggggtgcccggccctcatccctgcccacgcagtgagtgctcatgtgtcttggccccttgctcgcaaactggataaagggtgcccaagcctctcctgatgcatttgtaaacaagaaggtttcagcagtattacaccacctccctcatgcctccgagggggtggaagggggtgggcacactccagggccccccatgcccctggcccccagggactggaagaggctcccaacccagagtgtccctgtgggaggcaggcagaaggtgacaattgacacgatttcctgcacgcgtcctcctctaccttggaagcagttagaatctaccaggcacagatgaggccgcccttgcctgacggagcttgatgagcagcccttggtctccggttccaggactgagagcccagctgcctctgcccacccttccccaggcctctgccagcctctggctgcacggtcaggccctgccccatggcaggcctgccagagcttggctggggacccctcccgcctctggctccctgatgggctggatgtaacttgtgtcttctagccccttaaggagcccaggtgttttaaggaatgaattggtcactgcatcttgtatcgattatggttctgagaaaagcaaatatcacttttggctgcattaaaagaagcatcatatat

SEQ ID NO: 10168 - DNA, 1872 bp, Homo sapiens
ccgcgccgctgcacggctctactcccgatgaactctccggctgatgccacaaacgtgggtttcctgggcatggggactggctgcctggcgcctccaatcccaaatcctctgcttcctttgagcacagggacggctcctctgaggcctggccagtgcatgtagtcacttagctctgcaacacgtggcagccacgggggctggtgcagctctggatgtcgcccacccagctgccagtaggtgctgggctctctcacacagcacccggccccagctgcctttttttttcttttaaccagaaaatgcacaacgtgtgcgtgaaccgcaggtatggaggcagcggcatgccgttgctccgctgtgggaggtgtgtggggtcaggccagccactttcctccgtgttcagatgactctcgttcgccctgaccggcttctcacagtgtctcaggccactgcgccaccgcgctggtgctgagcagaagcgggcagaagtggggtctgctttcaggacttcatttcccccactcgttccggccccgcatgctccacgtctgccctttggtctgagttaaaactgcgatgctgaaaagtgcgagctctttccacgaggaggagccacacagggtggcctccgagggtgagtcgctctgctaagcaagggcagccgctgcacgtcagcccgcaggccaagggtccagcttatcctgggtgctctgtgatcagaaggtccttggatcccgaggactgcagctgctgccgtccacagcgcctcagcctctcttcctgtgtggaagcggggcaggcagggctgtggcagacaggcctggcatagcccaggttccaggtgtcctgggcagcctgaccggtttcctgagtagcctcaatgaaaacacctgagaaaaagaaaatgtaaactaaggaagggttttcccacttaatccaacccagatttctattcaacttaaaggatttaattggcatttgtgagaaataatagtacctgtgtcactgagttgattgatttgggacatagacggttgactttcccagacagcagcttagcggaaagcagcatcccgaagacggtgtcgcatgtcctgagcctgcttgtcacctgggcctcacggtttctcgtcagccccgtcactgatgggaagcagcactgaagtgtgagggcagaaaggacaccgctggagtcaggcgctcccctgcctgtgacccttttccaacaagctgatgctgagccagcggcctgctttgtccctcatactcctcccaacagtccaaacccctaccagacagaagccacgtcgcttctgcacacgtgtctgagagcgtctgccatagacgtctgtgcgtttccgtgaagcactgcgccctaaggacccaactctgactagcagctgcctcccactcccaaacactaaccccgctcaggagactcgcactgggtgtagactgcgtctttgcagagggagatgatagaggcttctgatgacgccagagctgtaagtgtcgtgacgagctgggcgcccagcccttcttaagctgttctgtttctgtggctttaactgacatatttctgtagcatctgccttcatctcatctcagcgtaatgaaatattaatgaaatcgctgaaaagctttgccttcgagaggccagaagcctcgcggaatgtctgcaagtccaaagacgcgtgtgggttgtgccctgaagtgccgtccagcaggcgcgtgcggccgggccggcctgtgcgtgtggcctttgccttcttccctttcttcctgttttctgtttttttaatttggggattgagaaagctgtacgattttgttaaagaaaaaaataaaccattttttaaagttgtagccctt

SEQ ID NO: 10169 - DNA, 729 bp, Homo sapiens
atttccagcttttgggggtgttttttcttcttttgatacaggatttcgttcctttggctccctgggaagtgggggcctttcttccttctgcatgtcctacggtagtgatgggacaggcagcttcaagtccatgtcgacttccactgaaatagttgatggtaaaaaaatcaccaccaagagaatcattgagaatggccaagaaagggtggaagtggaggaagatggagagttgagttaaagtccttcataataaatagcaaagagcagttactccgcattgacaccaagtaattccagtccacatttgactttaagcacatctggaggaatagcggactttttttaggattgaaagtgaactttactttcagaacagctgtacccaagaatttataaacacttcatgccaacacctgttcttatcgttgggactacacggataggacctctgtttgtctttcaatcgttgtaaaatatctgtatgcaatttgctatttattaaacttaagcctgaggcagacaatgattatttgctagtggtaggacagaatgttcagttcagcactttgagcattacctttttccgttgggaaagtgtgagccaggtggtttgctctaaatcatttgactttattgtttagtgtgtagtggtgaaatctacaaataatatcaatacttctggcttaatttaatgatggttcaaaacaacatgcatttattatcttaata

SEQ ID NO: 10170 - DNA, 736 bp, Homo sapiens
ctaggttatttcggagtgttatttatcttcccacttgctctctgtttgtatttttgttttgtttttgattcttgagactgtgaggacttggttgacttctctgcccttaaagtaaatattagtgaaattggttccatcagagataacctcgagttcttggtgtagaaattatgtgaataaagttgctcaattagaatttttagggttctctttgataggcctgtttttctgatgtgtgtgttttttttgggggggggttatttgtttgtttgtttgtttgtttgtttgtttttgagacagtctctctctatcgcccaggctggagtgcggtggcacaatcttggctcactgcaacttccgcctcccgggttcaagcgattcttctgcctcagcctcccgagtagctgggattacaggcgcgcgccaccacgcctggctaatttttgtagttttagtagagacggggtttcaccatattgaccaggctggtctcgagctcctggcctcgtgatccatctgcctcggcctcccaaagtgctgggattataggcgtgagccactgctcccagccgtgtgttcttttttaaatttagatatgtccagagaatcctctctcctgtttcccatttcattcgagaatattgtttgcttgtgagacgtaagttcgagccctgcatgcaatgacccttgaaggaaaataaacagtcctggtggtcccagacgctcctgcagccac

SEQ ID NO: 10171 - DNA, 2964 bp, Homo sapiens
tgcgcccggagcgaccggggagcgagcgagtgcgtcaagaaagaatgaatggatggatggatggttggatggatggatggatggatgagcgagaacccgcgcccgcgaacaaagagcgaaccaaagcgatgcttcgaatttttaaaacggaatctctgcacccaaatgcaggactggtgacttaaggagctgcgaagtctgatttaccggcctactctcgacctgccccccacccccagctcaggggaccttttgtctgaacgccagagctactgaccaggtcggggggccgcggtggggagtggaagagccggtcctgctgtccgccctcccagccccaggtggaaggctcagttgtcggaaagacaaaagcgatttcttcccactcctgcagggccagaagttcaggctgccccgcctccactgggggatcgcacctgtgaattacctgaggtatgcatttcccagaaccgtgggcgtacccaccttggggggcatgttggttctggggggaccacctctccttgcattcaggggctgtgaagctgagtaattttcggtcacagggcaggcccctgttgaaatttcatttgtcctgctctgggcccaaaggtggtggtggtttgggtcatcagaggactgcctgggacggttcagcgggcacggagcgctgtgctggcctggctggggatggccgcggaggtgcccttttcctggtgctttgtggtggctgcagaagaccagttttgttgagaactgcttttcagcctggaatcagacatcttccagatggtttggaccctgtccatgtgtaggtcattatcacacaaagagaccaataaaaataaaaaaaataaaaaaaaaaaaagacgaactattggaggtggtggccaatgatgcatttactgtttgcaggatagttaaaggtgtttaaagggtaaggcttttggtgtaaatgctggatggggtgtgtgtgtgtgtggatatagggacctccctctgtactgtgtactgtgtaatcggcattaatacctagactcatatgtatggaattttaaattctcttagcctactgattggtttggatgagcacaccagctgcaggtgtgtgctgaattgcaagatggtatttttttttttaaccaagggatgtctcttgtaatactaaccgcgtgataatgggttttcagacatgatgaaaaaaaaaaacttttacaaatgaatacttaccttagaaatattcaccttaggaaaaaagactttgctctgcccttttatattcctttatgctgcaagtggtgacatgttcagatttctaatttggttcattgtggcctatctggtttaagtctttcattaaaaatgtctcgttagagtatttgatgtcatgcaccaaaaaaataaaaccccaccttgttgcaaaagctgacctcgttgcatggaattaaaagagaaggaaaaacacaaggatgaagtctttccgaattcattcttgtgggaactggccttcggagccagccagcactttgggcaaatgcaaacaacaatgagtgcttgagataaaagaaagtgtgacgtcatggtcactggtactcaggcacttcacagtttacttgaaagaggctttggaaaatagataaagtgaaagaagaataaatacatatttttaataatgtaattttaaaaatcctttataatcaggactgagtcttggtttgcagaagctgtcacttaccctgaaacacagtatcaaaagggaaacttaaaacatactgtttgatttttttatttcctcttacaatccatgttttcaggtagaattatgactttccccccattgttacacatttctttacaaaggaggcctgtagaaattggacacgatcatgcttgagcatgtgagttagtcaaattatgagtccctgcctattgtccattacacaccgaatgttaatttaagaaccagaggcagaagttctggcttcctgcttgaaacccaattcttatatgaaattttttaaaagcagaaacctagcagcccatctgctttttctcttttgtcggtgtatttggtacccctccaatgctggtctttttgtagaaactcagtagagaaagtctagctaagcagtgttgaaaagcctgcaagatttcagtttacatatcgacagcatatccactgatttctaaatgggctggtcccatcatctgaagattctgtatagaattattaaaaaaaaaatccatctttctttattttcttcacatgcgacaatttcttaagcactttgacattttggtagttccacactattgagagaataatatatttattttgtgacattgcagatgccaaatactgtaaccttctcatgataacaatacttaggttcaagatcactgttcaaaccctgtcatgctttaaaactgatgcgagatgattttgttttttgcataatcaatacttaagggtgcaatcaactgttagtaattgtgcagtaaagtaaagccctgtggtgtatcaactactagttaagagtctcagttgatttctgtaatgtttgacctaataatagcccgtttcgtctctgacccaacagaggaagcacagatcaaatcaccttggagtggtcaccagggggacagggagccccccaccaatgtatcaatgggtgatttatgatgccttctgccctttggcgagtgaatgggtttcccataggggaagttggcctccctccgtgagctttggaaatgttttctaatagacacagggaggccagttctgtttcagagcaattatcttcccaaattctctgttctggtgttggaactgtgtgccctggtttctgttttcctttctactgctgtaattctctgtctcatcatccttctcttttgtttccatagccttttataatgcatatatgatgctgtgaacagaaataaattatttatacaatc

SEQ ID NO: 10172 - DNA, 250 bp, Homo sapiens
gggtccagaagggccagggcctggcacccacctggagaagcccccgcacccgagggaacccatggtggactccactgtgtttgaagcaacaaagtcacagcccagctgtggccatcccaagcaaattgagaatatattcactaaatgggcttaaaagactgcttttgaaggggcttacagccacaccagaagacacgctaaatatttattatactatcctactttgtacataaatatctctatagactgg

SEQ ID NO: 10173 - DNA, 535 bp, Homo sapiens
aagaaagagaaaaaggcaaaaaagaaaaagtaatgcctttctgaagaaccatgcttgagtctctctgggatggagaggaccccaactcgccaaagaaaagattcaccattgcccgcctgaagaagccctcaggggaaggaacttagcagtgtgcaggtgagctgatgccgcaaacccgctaaccactgcatgtgctgttatgcctttcccaggctggacacctagctgggtgttcatcataactttccacagctttaatccacgccaagtttgtatataactgaaattcactcttgacaccctccacagtctttccaagttggactcttcctctcatcagtactagttgtcaaatttaaaatgtgacagttaaagaatattctagtttgacaattagtaagcaatgagtatatcatcagtacactagctttttattaatccatgtacactgtatagtatcttgcatctattttaataaattaattctttgctctagtaatagattttatataatgaaataaaggtgttgtccttg

SEQ ID NO: 10174 - DNA, 755 bp, Homo sapiens
gcgtgggtggccaacatcatatacctcttgaagaagaaggagtcagccatcgccaacttgtctctgtagaagctccgggtgtagattcccttgcactgtatcatttcatgctttgatttacactcgaactcgggagggaacatcctgctgcatgacctatcagtatggtgctaatgtgtctgtggaccctcgctctctgtctccaggcagttctctcgaatactttgaatgttgtgtaacagttagccactgctggtgtttatgtgaacattcctatcaatccaaattccctctggagtttcatgttatgcctgttgcaggcaaatgtaaagtctagaaaataatgcaaatgtcacggctactctatatacttttgcttggttcattttttttcccttttagttaagcatgactttagatgggaagcctgtgtatcgtggagaaacaagagaccaactttttcattccctgcccccaatttcccagactagatttcaagctaattttctttttctgaagcctctaacaaatgatctagttcagaaggaagcaaaatcccttaatctatgtgcaccgttgggaccaatgccttaattaaagaatttaaaaaagttgtaatagagaatatttttggcattcctctaatgttgtgtgttttttttttgtgtgtgctggagggaggggatttaattttaattttaaaatgtttaggaaatttatacaaagaaactttttaataaagtatattgaaagtt

SEQ ID NO: 10175 - DNA, 697 bp, Homo sapiens
gtgcagccactcctgggggctgtggggaagacaccccctgcctgggccatggccagctctaggtggattctgattcactgtcaatgctgggttgctcccgagccctagatgttcctggaagttggccccctttatgaaaaccacttcccacagccagtgggaactgccagaggaagatctggcgtcacatggctcccaggaaagtgctgtgccctatccccactgataccatctgattccccgatgcctgtgcctgttccacctggacggtggccccctcagcctggcagcctctggacagagaggaaggaaggattggaaaagtccccgcagcacagcgacggtgggaagatgccttacgtctgatcttgatgggggcactggcctggagcctgggcccacctgcttctggggggttggggagcaggccagatggaggtggtggtgccaggaagaaatggagcgatgactgactgtggggtgggcccaggatttccacatcttggtgaagttgcccctgggaagggcagctgggggcagtggcgccagttcccttccatggtctcccggctggcaatgtggtgaagctgagtttctgtccaatgagcaggaagattctgagacatttcgcctgagatataagttgtactgcgtatgcagtttttcctccaaaaattaaattgcttttgacaatctg

SEQ ID NO: 10176 - DNA, 133 bp, Homo sapiens
ggggtggcgcgcggccaggagcacgcatggtattgacttaaaaggttcattttgtgtgtgtgcacattgtgtgttttgtgtactcctgtgggactcccatggttgtaaataaaggtttctctttttttttcct

SEQ ID NO: 10177 - DNA, 558 bp, Homo sapiens
ccaatgccagccagagtcctgcgggggtgggcccggccctccctggatctcctccctcctcccaggggttcagatgtggtggggtagggccctggaagtctcccaggtcttccctccctcctctgatggatggcttgcagggcagcccctggtaaccagcccagtcaggccccagccccgtttcttaagaaacttttagggaccctgcagctctggagtgggtggagggagggagctacgggcaggaggaagaattttgtagagctgccagcgctctcccaggttcacccacccaggcttcaccagccctgtgcgggctctgggggcagaggtggcagaaatggtgctgggcactagtgttccaggcagccctgggctaaacaaaagcttgaacttgccacttcagcggggagatgagaggcaggtgcactgagctgcactgcccagagctgtgatgctctgtacatcttgtttgtagcacacttgagtttgtgtattccattgacatcaaatgtgacaattttactaaataaagaattttggagttagttacccttg

SEQ ID NO: 10178 - DNA, 2337 bp, Homo sapiens
cccctgccccacctcagcccggcagccagcgaggtacaccaggtggtgcttggaagagatgaaagatcttcatggctgtttccactgaaatggacacatatgctcatgttgctttttttgttttagaaaaaaaaacaacatagttttctgaaggggcgacttaaaactgtggagagtggggagagttcggaaagaaatatgtttttatatataaaatatatatgtggagttttgtgggatggggaagagattttagttgttatttaacttgagaaagactaagcgcctcttagtgtcagggaagttgcctcagtgctcccagaagtcctgtgactgtgacgagacctctgtctgctgcaccagctggggactctggcttccagagctttcccagggtgtttggatcagatcaaattttgtcctctcttggggactgctttttatctgaattatcatttagtcaaggtagagtgtttttttatacataccaaatggagatagcagcctctcctagttttatttcaaaacgtttcacattaaatggtgtgaagcgttgtttggcaaaccaacagctttggcttctggtgtggtcaatatttcagtctgacataggttttgtttgtagtgaacaaagttgaaacatttgctctggactaaagaagcctagtggtttgtgtggccaactccatcggatgaatgcacacgcagacagaccctctgtatatttctgcattattcttgtctccttttcagaccatgatggccaatatggagattaaaatatgtcatcagtcatctctttatggtgacttccctttgcaaaccaggctgtgaccaacacatgtgagacccagtcctgtttggttttcttccgttggaaccacccagacatctgcttccacccagccaagcccacatcacatctcctggccgagagcagccactgccactcagtctgacagcttgcgactgcatctgtattttcaggggtgcagtgagctcacctctcccactgcaccctgggttgggtgcacagccctcattcttttcatgagcccgacctctctcggagcagcttcaggcctctgccagtgtccccagcacttttaggtcatttggacacttggggaaaagtgaggccagtctgcccggctttttacaaaacctcatgttgcattgtatattccaaagatggttcagaaaatttaatattggtccctggtggaaattcaaagttatcactgaagaacagttgacttaaaattggaccaagactatgaggcttaaaagggaccagggttttcttttttttttttttttttttttttttttagatggagtttctttttgcccaggctggagtgcagtggcgccatcttggctcactgcaacctctgcctcccaggttcaagcgattctcctgcctcagcctcctgagtagctgggaccacaggcgactgccaccacacccagctaattttttgtatttttagtagagacagggtttcaccatgttggccaggctggtctcgaactcctgacctcaagcgatccacccacctcggcctcccaaagtgctgggattacaggcgtgagccaccacgcccaactgggaccagggttttctgttttttgatggaggtgaaatctctttgtaatccactaggttttcatcgtaaaaccatcttatgcctgactattaaacctattcttcataaacacaagaacactttaatttttcgttaatttacaaagtaacatcagctgcctatgcctatgataaggtagcagtctgcattcttatggccattagatgttacaaactccttgcctctaaagtcagatcatgaagggataggtgttcatctaaggttacagttatgttaccgaaacacaaaactgccaaaatcttactctgctgttatgaatgtttaccatcagcattattttatcatttaatatgtgctcactgattgttaactgtagcttcagcgcgtgccaagcagttgacttaataggatcatcttgtgaatttgtttacgtgatgccaagcatcaagtcatgttttctttagtgtgtgtgcttacacaggtgttaaacagtttttctctattttaaactgagccttctttttaatatattcccgaagagatatgtaaataagctctcagagtttctgtgatgatttgttgagccttgctggacaagtggtttgtttgtgtgcaaaccaaactttctttacccagtgcaatagatttgtttgactgcttgtgtctttttatgacctgtttgccttttagaaaattggtaaataaagcaagtatatttttattttta

SEQ ID NO: 10179 - DNA, 4929 bp, Homo sapiens
cactccctcgaagctgctgttctcttgtctgtctgtctctgtcttgaagctcagccaagaaactttcccgtgtcacgcctgcgtcccaccgtggggctctcttggagcacccagggacacccagcgtgcaacagccacgggaagcctttctgccgcccaggcccacaggtctcgagacgcacatgcacgcctgggcgtggcagcctcacagggaacacgggacagacgccggcgacgcgcagacacacggacacgcggaagccaagcacactctggcgggtcccgcaagggacgccgtggaagaaaggagcctgtggcaacaggcggccgagctgccgaattcagttgacacgaggcacagaaaacaaatatcaaagatctaataatacaaaacaaacttgattaaaactggtgcttaaagtttattacccacaactccacagtctctgtgtaaaccactcgactcatcttgtagcttatttttttttaaagaggacgttttctacggctgtggcccgcctctgtgaaccatagcggtgtgcggcggggggtctgcacccgggtgggggacagagggacctttaaagaaaacaaaactggacagaaacaggaatgtgagctgggggagctggcttgagtttctcaaaagccatcggaagatgcgagtttgtgcctttttttttattgctctggtggatttttgtggctgggttttctgaagtctgaggaacaatgccttaagaaaaaacaaacagcaggaatcggtgggacagtttcctgtggccagccgagcctggcagtgctggcaccgcgagctggcctgacgcctcaagcacgggcaccagccgtcatctccggggccaggggctgcagcccggcggtccctgttttgctttattgctgtttaagaaaaatggaggtagttccaaaaaagtggcaaatcccgttggaggttttgaagtccaacaaattttaaacgaatccaaagtgttctcacacgtcacatacgattgagcatctccatctggtcgtgaagcatgtggtaggcacacttgcagtgttacgatcggaatgctttttattaaaagcaagtagcatgaagtattgcttaaattttaggtataaataaatatatatatgtataatatatattccaatgtattccaagctaagaaacttacttgattcttatgaaatcttgataaaatatttataatgcatttatagaaaaagtatatatatatatataaaatgaatgcagattgcgaaggtccctgcaaatggatggcttgtgaatttgctctcaaggtgcttatggaaagggatcctgattgattgaaattcatgttttctcaagctccagattggctagatttcagatcgccaacacattcgccactgggcaactaccctacaagtttgtactttcattttaattattttctaacagaaccgctcccgtctccaagccttcatgcacatatgtacctaatgagtttttatagcaaagaatataaatttgctgttgatttttgtatgaattttttcacaaaaagatcctgaataagcattgttttatgaattttacatttttcctcaccatttagcaattttctgaatggtaataatgtctaaatctttttcctttctgaattcttgcttgtacatttttttttacctttcaaaggtttttaattatttttgtttttatttttgtacgatgagttttctgcagcgtacagaattgttgctgtcagattctattttcagaaagtgagaggagggaccgtaggtcttttcggagtgacaccaacgattgtgtctttcctggtctgtcctaggagctgtataaagaagcccaggggctctttttaactttcaacactagtagtattacgaggggtggtgtgtttttcccctccgtggcaagggcagggagggttgcttaggatgcccggccaccctgggaggcttgccagatgccgggggcagtcagcattaatgaaactcatgtttaaacttctctgaccacatcgtcaggatagaattctaacttgagttttccaaagaccttttgagcatgtcagcaatgcatggggcacacgtggggctctttacccacttgggtttttccactgcagccacgtggccagccctggattttggagcctgtggctgcaaggaacccagggacccttgttgcctggtgaacctgcagggagggtatgattgcctgaccaggacagccagtctttactctttttctcttcaacagtaactgacagtcacgttttactggtaacttattttccagcacatgaagccaccagtttcattccaaagtgtatattgggttcagacttgggggcagaagttcagacacaccgtgctcaggagggacccagagccgagtttcggagtttggtaaagtttacagggtagcttctgaaattaactcaaacttttgaccaaatgagtgcagattcttggattcacttggtcactgggctgctgatggtcagctctgagacagtggtttgagagcaggcagaacggtcttgggacttgtttgactttcccctccctggtggccactctttgctctgaagcccagattggcaagaggagctggtccattccccattcatggcacagagcagtggcagggcccagctagcaggctcttctggcctccttggcctcattctctgcatagccctctggggatcctgccacctgccctcttaccccgccgtggcttatggggaggaatgcatcatctcactttttttttttaagcagatgatgggataacatggactgctcagtggccaggttatcagtggggggacttaattctaatctcattcaaatggagacgccctctgcaaaggcctggcagggggaggcacgtttcatctgtcagctcactccagcttcacaaatgtgctgagagcattactgtgtagccttttctttgaagacacactcggctcttctccacagcaagcgtccagggcagatggcagaggatctgcctcggcgtctgcaggcgggaccacgtcagggagggttccttcatgtgttctccctgtgggtccttggacctttagcctttttcttcctttgcaaaggccttgggggcactggctgggagtcagcaagcgagcactttatatccctttgagggaaaccctgatgacgccactgggcctcttggcgtctgccctgccctcgcggcttcccgccgtgccgcagcgtgcccacgtgcccacgccccaccagcaggcggctgtcccggaggccgtggcccgctgggactggccgcccctccccagcgtcccagggctctggttctggagggccactttgtcaaggtgtttcagtttttctttacttcttttgaaaatctgtttgcaaggggaaggaccatttcgtaatggtctgacacaaaagcaagtttgatttttgcagcactagcaatggactttgttgtttttctttttgatcagaacattccttctttactggtcacagccacgtgctcattccattcttctttttgtagactttgggcccacgtgttttatgggcattgatacatatataaatatatagatataaatatatatgaatatatttttttaagtttcctacacctggaggttgcatggactgtacgaccggcatgactttatattgtatacagattttgcacgccaaactcggcagctttggggaagaagaaaaatgcctttctgttcccctctcatgacatttgcagatacaaaagatggaaatttttctgtaaaacaaaaccttgaaggagaggagggcggggaagtttgcgtcttattgaacttattcttaagaaattgtactttttattgtaagaaaaataaaaaggactacttaaacatttgtcatattaagaaaaaaagtttatctagcacttgtgacataccaataatagagtttattgtatttatgtggaaacagtgttttagggaaactactcagaattcacagtgaactgcctgtctctctcgagttgatttggaggaattttgttttgttttgttttgtttgtttccttttatctccttccacgggccaggcgagcgccgcccgccctcactggccttgtgacggtttattctgattgagaactgggcggactcgaaagagtccccttttccgcacagctgtgttgactttttaattacttttaggtgatgtatggctaagatttcactttaagcagtcgtgaactgtgcgagcactgtggtttacaattatactttgcatcgaaaggaaaccatttcttcattgtaacgaagctgagcgtgttcttagctcggcctcactttgtctctggcattgattaaaagtctgctattgaaagaaaaagaaagcgaacagtttttgtttgttttttttgccgtgtgtgctccatagtggaggcgctattttccaattgatgagaatgacaaacatatataatctatctatctatctatctatctatctatctatacagggggcttgaaccttactcacccaagagcttcttacggaatgtggtagaaaaccaagttgtaacgacactgtaacctacctgatgcctgttcgcgcccgccgtgagctgcgcactggccgtggccaccattcacctctgtaatttaatccgtttctcttggattgtctggacgtgcccgatggttctttcttttgctcagtggagttggaggttttgtgtttggttttctcattcttgtcttgttttgtgtgggtggattttcaccgaccaatgatatcctcttctgacggtcaccttctttccacttcactggagtccagtattctgtaccacatcacgcaacgtgttatcttgtggtgtaaataaagactgcgttacttgccctccca

SEQ ID NO: 10180 - DNA, 379 bp, Homo sapiens
acgggccgccttctgctccagctgcatcacagtgatggccaagctgcatcagccgcactctcctggacgccatatagctttaagatcgggggagggtaaataatgcaaaaattgcacagtggaagaaggggtctcacaaaaagcaatccatcctgtagtataggtaatggagttgggggaagcagcttccattctggatgtttggaaccctttagctttgttttggaatggcccaccattctcactggaaaacagtggtctgctgtgaaaggccagctctcggcagcccctgtggtttcagcgctgccgctctgtgtcattcaggttgtgcacattgtttttcttctgacttccagaaataaaagtgtttccatgggaa

SEQ ID NO: 10181 - DNA, 140 bp, Homo sapiens
atggtgtccagcctggtgcccgcccaccccgccaggctgcactcggtcgggcctccacaggcatggagtccccgcaaaaacctggcccctgcaggagtcaggcctggtctcacgctcaataaactccggactgaagatgc

SEQ ID NO: 10182 - DNA, 187 bp, Homo sapiens
agcagcagctgcacgtccgaggcttggggaggacccaggactgtgtgggtttcttacctgcctgagccacctcagggaatcttccagcctaatgcaggcatttctgcacctttggggtcatgctttgtagcagtgtctcccttgcgacctcgcaataaattggccccacggggtgattttgacagtc

SEQ ID NO: 10183 - DNA, 3596 bp, Homo sapiens
acctgagccctcccgtgacagccggcaggcccagcccatcccctccctcatcctcgtctgtcctgtcacctgccgcccagcccctctcctgccagacagcccacgaccgggtcgaccccccaggggacgcccatgccaggcccggggacctgtgccacacgaccagctgtgctcccagcagaggctgtgcgtgtcagttcttcttgcagaatgtgctctggtggaacaagttgggagaggctgggggggccaagggcacaggttacgggggttcttgctgccgttctaatatttttttaagcatagacagacttataattaatatacgttagttagtgacattgaaacagtcaactcggaaattaactataagacttgttctatttataagtatttatttctaatgcctccacatagccctgtaatattcagatggaacccccaaccacctccaccctgtttgttcccacatgtgtctcccaagcctgctagggacaggcagggcagggacagccaccttggaaggccgcagtgaggagctgtctggaccagtggggcaccttggggctagcacacgggtgtatcgcctgggccccaggcttctccatggccacatgggtcctgggtgtatgtgtgggagagtgggggggtgtctttggtgcctgaagtctgcgcggcatggagggtggtgtgagttcctctggtgggagggagaacgcacatctcttctgggcggccacctgaggagtgactccaagaagagttccggcagctttccccaggaaagggtgaggggtgacactcggctctggctctgagatgaggcagacggcacccaggctgtgatctgtcctgggcggggaccaggagggagcggggtcgggatcacctgccagtgtgcagactctgggactgcgtgctgtctccggaccatcagggtagggtggtgggttgagaccaggaagtcagggaagatcggaattcagggcgacggtctaggtgtcgagggctgtggcgcagcctcttcagctgcggcgagaaatggagtgagtcaaggtagcttctgggaagaaatgctgccattagcaggtttcttgcaaagactttcctctctttgttcccagggcagagagtttctgtgagtcccactgagaaaatcccatggggtgggggtatcctggtcggtcggcaatggagggtggctggcttggtggttattgtcttcaaggagctcttcgctgctgcatctgcggtgtccctttgttcttgtcccatttcaccccctctgcagacaccaatgtccgagggccacccaggacaggacgggggtcagccccaagctgagagtctggtcataggagtcatgtccagaggcctagggaggttttagggccctccccacccacacccacaggtcgatttggtctctttttagctcaaggaaagacagtagccaagcaacagagcccctctcccgccgtggcccgtgggagcagttacatcgggtctggtgctccagacctagggcccagcactttcatcagatcctgcctcctggagtgggggaaacgcagcaccccactggttctgaggcccctaccctcccaggctgtcccacgtgatgctgacatgagcctcagagaccccaatcccatgcctgggggagagacagcggctcaggagtgggggagcacgggccttctacaccacatgggaaggctctggcatgaggttttcctttgggaaggttgtttgggcccctgaagttccatctccgagagtggtgtgcagggcaggccagggcccatgctggctgcagtctctgtggctgcctgcctgggccagcctgtttgggagctgggactgtgggctcgccttttcgtacctgggctcaggtgcggtgtggccaccgccaccctcatcccctgcctgggaggctctcccaggggctgatgggggggttctgtgagggagaatcagggctcgggaagccacgcctgggaaggcaggacacaggacacagcagctttctttggaaatctcccaggtgaggattcacatcccaaaataaaattcagaagccaggtggcctgtgctccccatgggtgacctctggaggcagtggaccaagatgcagcaaggagaggatgcagaacagcttcttgcagaagcacctgctccggcatccagcgctgcctggaggcaggaaggagaggcagggcaggacacgctggtctgagatgagggggagccccacgggccccaggcaggctagaggaggcacaggccctgccacggccaactcaggtcagccagcctgaggctgtggcctccaaagggtctgggcgcaccccccaggtcgcaggtgtctgaggccagccaacctgcagagcactcgcggcgtgggtgggctgagtggaggtgcctgggagctgcctaaattcagaagcctccactgccatggagactgcctggctgtgtcctctcagccaggtgccgtgttggccttggctaggacccagagccacactgcagcctccgccgactccctccttccgggcctgctctagtgaggagtgcctaagccaggacccagaaactcagagttgatggtgagaggaggccgcctgagtcaggacacctggcttcttgaaaagttcgctctgccagaaaccacctagggaccacgttagctgccttccttgagctccccaggagtcggtttccacatctgtgaggtggagggctggtgtggaggtgctcatggggtgcggtgcttgggagacagccaggcccagggtggctgctgcttcctgctaagtgggggaggtgagacagatctggaaagccgtctccctcagatggtttcatttaatgctttatactgccgagtctgggggcttgttttggtttgggggcagccatcctccaccagaaagggggagctccttccgctgcggctccagatagatggggatgccgggctccaggccgaccagcacttgggatctgatgggacacggccagtgcctaggggtgccaagtccaaggcctcccactgggagtcatcgctgagaagatgccaatgtttcatccaccggctgcacaggcacaaactcccccacccaggacggctgtgatgaggtggccctccctgtcaaccctggtccctggagtccccagcacctggggccctggtggggctgatgtcacaggtgtttactgtgctgctgcactggtcctatgccagcctcacccatgtggggaccacggaaggcacactcccttacccccggtgccgggccgtgcggtcccccagacggacagcagctgtggcgacctgcgtttctccctgggcctgtgcttcctgtagttagtccgtcccctggttcccctgtggctcagaggccgcgtccctggcttgtacatatgtgattgctgtgggcacaccccagaccccatgtcatagctgccgtcccgacgtcacgacgcctgtcccgatgtcttacacccgagtgttagccctaggctcctgtactgtgcgtgcacttgaggctctgtccaattaagaaataaatgtggctcttactcaacac

SEQ ID NO: 10184 - DNA, 2337 bp, Homo sapiens
tgatcaaaaagaacagaaccctctccagcctgctgacccaaacccaaccacacaatggtttgtctcaatctgacccagcggctggaccctccgtaaattgttgacgctcttcccccttcccgaggtcccgcagggagcctagcgcctggctgtgtgtgcggccgctcctccaggcctggccgtgcccgctcaggacctgctccactgtttaacactaaaccaaggtcatgagcattcgtgctaagataacagactccagctcctggtccacccggcatgtcagtcagcactctggccttcatcacgagagctccgcagccgtggctaggattccacttcctgtgtcatgacctcaggaaataaacgtccttgactttataaaagccaaacgtttgccctcttcctttcccacctccctcctgccagtttcccttggtccagacagtcctgtttgtggagtgcaatcagcctcctccagctgccagagcgcctcagcacaggtgtcagggtgcaaggaagacctggcaatggacagcaggaggcaggttcctggagctggggggtgacctgagaggcagagggtgacgggttctcaggcagtcctgattttacctgccgtggggtctgaaagcaccaagggtccctgcccctacctccactgccagaccctcagcctgaggtctggtgagtggagcctggaggcaaggtggtaggcaccatctgggtcccctgtggccgtcacagtgtctgctgtgattgagatgcgcacaggttgggggaggtagggccttacgcttgtcctcagtgggggcagtttgccttagatgacagctgggctcttcttcacaccacctgcagcccctccctgcccctgccctagctgctgtgtgttcagttgccttctttctacctcagccggcgtggagtggtctctgtgcagttagtgccaccccacacacccgtctcttgattgagatgtttctggtggttatgggtttcccgtggagctgggggtgggcgccgtgtacctaagctggaggctggcgctctccctcagcacaggtgggtcagtggccagcaggcccatctggagtgggagtgggcacttccaccccgcccacaggccatccggctgtgcaggccagcccctaggagcaggtcccgggtgactggcagttttcacggtctagggccgagacgatggcatggggcctagagcatgaggtagagcagaatgcagaccacgccgctggatgccgagagaccctgctctccgagggaggcatctgtgtcatgctgtgagggctgaggacggggccctagtctctggttttctggtcttaacatccttatctgtgtccgccacggaggtgactgagctgctagcgagttgtcctgtcccaggtacttgagttttggaaaagctgactcacgcccatccatctcacagcccttccctggggacagtcgcttccgccttgacacctcactctcagttgaataactcaagcttggtcatcttcagactcgaattcttgagtagacccagacggcttagcccaagtctagttgcagctgcctcggcaagtccccatttgctcaggcagccctgaatgggcctgtttacaggaatggtaaattgggattggaaggaatatagcttccagcttcataggctagggtgaccacggcttaggaaacagggaaagaaagcaaggcccttttcctgcctttcccgggatctgtctactccacctccacgggggaggccagtggggaagggctgtcacctcttccccatctgcatgagttctggaactctgtcctgttggctgcttgcttccagctccccccaatctccatcgcagcgggttcctcctgtcttttctacagtgtcataaaacatcctgcccctaccctctcccaaaggtcaattttaattctcaccaagttttgcacatctctgtatgtcgcttgatgtcttagacgcgagccctttcctaaactgttcagcgctctcttttcctttgggtggttgttgcaagggtgatgacatgactgtccccaggcctgtctccctgaagcgtctgtgctgtcaggacagccctgggcagagatgaggcaggggtgaggcgtgcgtgtgcttttcctccttgttggatgtcttccatatcatctgtttccatagctacaatccatcccttggccttaactttggaatttggagattatatgcaaacatgtgtaaaggctcatgaatatggatgacactggaattttataaattctaaaataaaacccgaaaccagatgtagcatgctgggactcattttgtca

SEQ ID NO: 10185 - DNA, 1022 bp, Homo sapiens
gctgggccacctggtctcagccacctgttcttggctccccaacagactctgcactgcaccatgggaggctcctgggatgtttggaagaagaaacgggcttctccttgagggggtagtggagggattttgtccccagcagtggcctctgagagtctttcagtgcctggtggggcagggcaggcctcttggagcacctcctccctgggtcagggcctggatgcaggtgccaagctctccatgtggtgcatgttgacccagccacgtggtgttgtcaagcaaacagcatcggcaggagacctggagctgaggacttggccctgcctgcactgtatgccattccttggtgacgaaatgctgtatatttggttttgaaaaaatgaatgtgctgggtatacacagcagaaagggtactgtccactttttgtatatcagtgtggaaaatatttcccctagaagtagaaaaggctcatgtgctgatggataattttgagtcttctccattctctgtgaatgacccccttccccaggcatccccacctcctacctcgttcttagagcaaactaaagccaactgagggtgcacacacagccatgagcccacctgcccaggactactcccatctgcttcttcccgtccccgtggaagtggcccctgatatggattgtatctgtatccccacccaaatctcaggtagaattggatctgtgtccccacccaagtctcaggtagacttgtaatccccagtgttggaggaggggcccagtgggaggtgattggatcatgggggtggatttctcccttactgttctcatgatagtgagtgagttctcatgagatctggttttttgagtgtgtggcccctccccctctccttttgctctcttcctctttctccggccatgtaagatatgcctccttctccttcaccttccaccatgattgtcagtttcctgaggcctcccagccatgcttcctgtatagcctgcgggactgtgagtcaattaaacctctttattcatta

SEQ ID NO: 10186 - DNA, 2271 bp, Homo sapiens
gcacgtaacaaaacatagacctgttttgaagtggcttgttacccaagggtgcctcactcatctgcgccaccaggaagatgaactgtgagggctcctataaggggcaggaagagcaaagctgtcctaggccaaccagagattcatctttcatgcagtgacatgttgataaaaaatgatggtcagtatgaaactggtaacaggttgtagatggctttctatggtatatcccagtctcttgcaaacgattgtgaagaatgccagtgttgtttaagattcggcagtttgtgtggggaggtgggggcaggatggggtttggttgccaaaagagtttgggaaatgctggcttaaacaaaggcgagaggaagttcctttcacgtcaggatttatgaatgcctatgagcccagtgtcagtgacgactttctagcggcggtcttcaacactttctaaatattaagcgatcaaggcccctgccccacttttagttccaacagaatgccgttcacaagatctgggaggcactctctcagccctctcctggagcccccggaatttctcagcagcccaggccctcccgctgcccgtggcccctcctcccaggtgccaggtggtcttccagcctctccaagggcccacccccctgcctcttcctcccactgcagctgatctaggggtttcttggccacatttcccttgagagagagtgggatttgccctatccacagagagcctcatttccacctgaaggtgtatttgtcagtggctagaccaggttcatgtctgtttccccttggggacttctgaaccttcctgcccgggagtctgtaacacagcagcacaggaccgcgcttcctttagcagtgctgagtaagcaggcagcggcactctgagatcccggggctgggcagtcgccccccacttcccagcagctctgtggtagtggggcgggagcagcagggacgtaccttaagatttctccagtgtctgactcttactttgtttcctgaaataattagagaaaagtcgtttaatgaaaaagagactgtgtaccttgaattctacagctacctcagtccaggctgcctgctgagatcctgtctttagctcacatacattccacggtgggggacaccattagtccagacaccgctgtggagattagcattttagtttgtgtgcgcccgcctggcttgaggcagtagtttaggaatgacaaggctagaaacctggctggctgtgagtcagagagagagaggatggacgtgggagaaagcaagcaaaagctaccctagggaagagccggtgacgtgcacaggccgagcagcacggctggtgagctgcaggctgcggccttgcccggacacttggtaatgccaaacaagtacgtgtggctactcattggtctatgaggacgatgacaggcttcgactctgtggtttctaaagcatataatattctcacgtacttctttcagcaaacgccaaacagtagtaattcttgtaactaccttgaaccctttgtggaaagaacctgggtgtgagtgaataaaaagtaaagagcgacgcgctatatcggccattaaatactcggggctgtccgtaacaccctgtgcttcccaattgtagcaccatgttctgtgtgaatatgcataaccagagtgaccccccccagcacccagcatgcccggctgtgcccctctgggtatgctcacatgcacatatatggacatacagtttcgtagcagaacgtggctgcccaggggctgcctatctgggcgagtagaccgcctggctcagcccacaggcctgcagcatcccatagcaccccgcccttgccccatcaccctgtgggctacatgcaggacacggcatgggcctgctccccagaggcacctgtttggggtcttcttgaggcttgtgctttcacagctctctttgaagcagatgtcttggtgaactcggtagactcttttatacctgttgtcacaagaaagctttgtaaaaccagacagtgaagcaaaatgttgccaactgcttaacctaggctatgtgaacccacagtaaacctgaaggtgtttgagggaaaaactgctattttctgaatgaaacgtgacctcctattgatgtattaaaatgtctaacataaaggtcatgtgatttgtaataaatttattgtggtacagtaatatgcataaaataaacccattttaatgtgcattctgatgagcactgacaaaggatatggtactaaaaataaaatgtgaaatgtcaaag

SEQ ID NO: 10187 - DNA, 466 bp, Homo sapiens
acaccaatttcttcctgcttttctccacttggtttggaaaatcacacagttttcaggctccatctgtttggagaaaatacattctgaagcatccccaattcaccttctaaaaactcatgtgcaggtttgataaacaccagaacagaagacagtgatgctgtattattttagatttattacatagatttggaattcacttttttcatgacctagaaaaaaacattccagtgttcaactgttttatattattaaagggcttttaatttgtgaacttctgaaggcatgagtgttttctctttctacttttgtatatgtgcatgttttgtttcctctgacttggtatatgctcatctgagtgacggatatgtgaaatttgtagaactggttagtcaaatggccagactatttcattaatttatttcctcaaatgcttttcaaattaaagcacctttgttagtaaacagtt

SEQ ID NO: 10188 - DNA, 644 bp, Homo sapiens
agcgcactgctgttcagataggggacggaaggtcgtttgtttttgttctgagctccataagaactgtgctgacttggaaggtgccctgtgctatgtcgtgcctgcagggacacgtcggatcccgtgggcctcacatgccaggtcaccaggtcaccgtctccttccacccctgcagtgtgctgttgtgcacgtcagggacgctgttctctatgcccactgccctcctccctctcctggcccagcagtattgctcacgggggctccagccgccggcgtggccctcatgagctacgcctgggtcttctgcagactcatgcagccctatggccgctcagaccaaggcgcagagcaactatcagggcagctctgcctcctcctcccatgaggtggggagaggcaacagggcagcccccagaggagtgtcctggccgctgtcctcccggggcccatgatggccatagatttgccttgtggtgttggatcaggtactgtgtctgctcataagtacttgtgtcatccagaatgttttgttttttaagaaaattgaattacttgtttcctgaaatattctgaggttaatatgttagttttcatagaacattgagaggcccctgccactttcaataaagacctgacttggagac

SEQ ID NO: 10189 - DNA, 200 bp, Homo sapiens
acctagagcttctggagccctcgggagggcctggctactgtgcctcaacggttcggctcctcaacagacagtccctgcggcagaagtgggtgtggccgtgagcctctgcaggctcaagagtgttgtccagatgtttctgtactggcatagaaaaaccaaataaaaggcctttatttttatggctgaggattttgaatatt

SEQ ID NO: 10190 - DNA, 237 bp, Homo sapiens
ttaacatttacttctggtatggaacaactagaaatactgctggaaataatatccaaagagctgattctaccaatccaatttcaccaggaaaattccatcagggattggatgaccatggggatggacataattgctactaccaacacaacagccaagagagttgccttacaattagaaatgtgtagacagaaatgtatagaagatacaaggattctcttaattggacttaaattcttt

SEQ ID NO: 10191 - DNA, 58 bp, Homo sapiens
acattccagcctctgtctcctgctctaggatccccgactcattaaagcaaagaggctt

SEQ ID NO: 10192 - DNA, 139 bp, Homo sapiens
atcaaatacaatttcgttttcacttgcttctcaacctagtctaataaactaaggtgatgagatatacatcttcttccttttggtttcttgatccttaaaatgaccttcgagcatattctaataaagtgcattgccagtt

SEQ ID NO: 10193 - DNA, 114 bp, Homo sapiens
tgtggatctttcccttaaaactccaagttcctctctatttttgctatctataaaatgacatagaactgtttcctctgtcatcagtcattcaataaacactgtttgagcacctac

SEQ ID NO: 10194 - DNA, 1787 bp, Homo sapiens
taaccactgctatcgcctccaccaactcagagaaatatcatttccacagttccaattcctcctacattgctgagtactagccaaggctcctctttatggggcagatatctatagccaaccccaaaacttctgtcttctatcattctgtcattcatctagtaactaatttggagtttgtatctatcttacgagaacaatcatcatgcagattcgtccacaggggatctgtcagtttgggtcctccaaatgaaaaatgtcaagacagaattggacatgcaaaagattgactgggagaacacacctctgatggacaaaggtgagacagagcagccacaggcagggagagccttcagactgcaacgctggcctgatacgtgtcaaaggagagagggatagaggaggattgaatagaaggagactaagactgcagctctaagaaagtctcagccaaacagatggggaggcccaaagcaaggcttgcccctcagaggagctcacgcagggcaggaatagccaggttctcatatcccaggggttcagactttggctgagaacagcccctggagaacatggggtgactgctaccataggtctggaagtatgaggctgtccaccaactatccccttgaagcaagttctcttgaaaggaaatctaaacagtgcacccccatggctgccacggagtataaggagggagagaaaggagctgaaagtctaggtttggccagctaggtagactgacttgtgaggtatttatttattcatttgagtaacaaagcagacagaatacatagccaccattggtagtacaccccaaaagcaaggatggcatgatgctggtgactcaaacgtgcctactcatggtgtcaaattggcataatcctcttgggaagctgtgtggaaataagcacagagaagcagaactctaattgcttaatccactaaacattacttctgggaattggctcatcataaattatccaagagaagcacaaagttatgggcacaaaggttttccatataatattatttaaaatgctgagaaaatgaaaaaatctaaatggtgaaatatatactaatgccatctataaatacaaacaaatagaatgtttatagaataatggaacataataacattattcaaaattgcatttatgctatagttgtcaaaattgtctccttatatgatacaaaactcatgaaaattatgacttttttgtttggttggaaagcagaattatgcataaatttcctcttacagttcgatgcccattagttttatataacatttatttgacacgtactgacttctatctgagaagaacaaaccaaaacactcaggcctaaataattaaaaacggtcctaaaaactagcaaaccagataagaaaagatgttaatgcccattccctaacttatgtcttagaccaaaattaattctagatggttttaaaatgacagtgtaaaagtaaagtattaaaagattgtgtggtcaaatattcaatttaagagcaaggaaattcttataaatataacaatagaggcagaactcatgtaagaataaattgattaggtggtattaaatattaagttcttatgtatgtcaaaagatatcattttgaaattcatccatcttattgggtattgcaggagttcattcctttttgtttataaatactcttccgtcatatgaatagtattcatttgtatactggtttgttgatggacatttgggttgttcccagtttatggctattacaaataaagcttctatgaacatttatgtac

SEQ ID NO: 10195 - DNA, 1519 bp, Homo sapiens
acacccgcctgcctgccagggtgaacacacagccagcttatccctcttaagtgccaaaacttttttttaaaccattttttatcgtttttgaaggagatctttttaaaacctacaagagacatctctctatgccttcttaaaccgagtttactccatttcagcctgttctgaattggtgactctgtcaccaataacgactgcggagaactgtagcgtgcagatgtgttgcccctcccttttaaaattttattttcgtttttctattgggtatttgttttgtttcttgtactttttctctctctccttgcccccctcccgccctccccgccccataccttttcttcccctggattttcaccctttgggctgccttgctcatctttatgccccagcactaggtacggggcccaacacgtggtaggcactccatcagtgtttgctgaattgaaaacattgttgactgtggcttctatcagagtgtctaccttttgcagctcttcccctccctcatttaatttgctgcttttaatctacgtggtctgagaatttgtgaaaccagtgttgttagaagtgtatataatctgaatcaataagctctgaatggtggccaagggcctctcttatggcacaaagatgcatggacttcatgacagctcttttggtggctcagaagccattttttatagaatcatggaatctagaatattcctgctggaaagaacctgagagttggtttggaccaattccctggttttccagcagatgaaacaggcccaaagaggttaaatgactgggtgaaaatcacatagctgtctggtgccagagccagcctatagtagagtcccctgaccccaagcccggtgctcattccactacctctcacacttcacaacaatttcctcaacacttgagggcccagaaagtctgatctctccagaatgatcagcccagaggaatgctgagaaatcacctggaggagggagcagaaagagaaggtttttaaggaggggcttctgaatacttgggagatacggaacggaccaaggaccacactccagggtgcattcgttgctccctggggcaccacttctggattacagtgtgccaggtcctttggaggccctaccccttccccattcattgccaccagtgagaaatgggggtgcccctgtgtaaagaaacctaccaaaggtttacatttgcaccttagcctcaatagctacgaaccctagagaagcagctagctggagctcatgtgcaactcctgattctcaggagaaagatggattttaacccaaaattatgagtgagctgttaactctaaaatgtacttgggagataggccaagcgagaggtcatgggccaactaagtgttatccagtagaaaagacagtacactgcttttcttttagtgtttgcttttcctttgctatatgttttgctatttccttgtggcttagaatgtaaaattgattgttaaaagttttgttctgaataaatatttatcttttgtattgct

SEQ ID NO: 10196 - DNA, 3349 bp, Homo sapiens
gcccaccgtcagcggggcgcgcacgcccccaaaccagctgtttacatacaggaatcaggtattggggcccctcggaggccgaggctggcaccccatctcccgcgcagcctgccccctcctggacgtgcccatcccccctcagatccagacatgcccctcccccgcagacacaccccaaggcagcccaacccccaccccttccccgacacccaagcccctccccacgtcgccccctcctgcacagccaccagcagccagccccctccgatacacctcccgtcctctcctacagacctgcacccctccccccttttgcacacgcccctcctcgtggccggaggacccgccccctcctttgctccggaatctctcctccctcgcccggcccgccttctctgggttaggggggcgatgcggccgggtggcaacgcacgcgcctcctgcgcccctcccttccctggggggaggggcgcaccccttttatccccggagcgctagggcccgcccctccgctggggcccacccccttcgtgcgcatgcttaatgcttctggggaggagggggctggtcccagcggagccgcactcttcgcccgctccgggcaaaagcgggggcgagtgtagagcgatcctgggaaatcctttgatccgggagccctaggtttcctctccagccaacggggcgtcgctgccttaatgggaggagcactcggaagggttggtttgggcctgaaactctcccaagtggcatagccccttttccggtatggggtctcctacacccacgcgcaccacctctccggtcgcgtggctgcctctacagcctacctatacgtccctttttccccccaactgggaattgagaggtaaggtctttctctggaaatccagcagtagaggaagggaccacccaagaaaactaaaaaccaaggcaccttaccagtctgtctggggacaggatccctgctgcaccttccccaccccctcctgggaagtgccccctcacctcagggcacccgcaacctgggctcctccctgagcgcaccggcccttcctgtcacccaggtccaccctcagtactcaagctgcagtatacagcgggaaaaactgaggcactttggtgctaggggtttgggactgaggcgtggagagcagatgtgatggcaggaagactctcgcttttaaacatctggtttgggagagaccatcgacttggccagtgagactgagaatggattccgagtagtgatgggccgtttgcacctcggtttttccacgtgagaaatggggagaacgctgctgttaggaggaagttgtgtccagttcagggtgccctcgggagccctgtccctgttgctgtggcccctctcacgccgccatctctctgccccgccccgcccctccggcctccccacaccccccttgccctcactacctgtatctcaccggcgtgtgttcaccctcccgggtggctcacacactctcattcacacacacaaatctcaggaacaaacggtcccagagtcctccggacccctgcccagggtctctgcaggtctctgccccacgcgttcccgtcgctgacaaagccaccagctgcctcctttaagcttggtgctccggctctgggcctttcttgcgctctattttttttttttttttttttaagaaaaacaacaacaacaaaaaaagacaatgaaaaaaaaaacgtcatgtgagtgaagagatgtcactgtctgtggtcttggagaactagtctcgtagctgaggggtggggtccctctgtctggggcactggcacccacagcaggactccgccagtctgatgccaggactgaataaagtgtatttgccccgaccttgccctgtggttctgcatgtctgtgctcttcctcaaccctccctaaacagtttgccagattcaagtccgtgtgatttgggcccgagctgggtgtcccagggcaagccaccttgcctgtctaggcctctatgtcaggactccctggccttcatgaagaatagcaaactcatccctgtagggaccaggcaggtaacatagacgagtgactctgggtggacagtggtgtcatgacccacttcaaggggcctacctcctgccagttgtgaccctgtgggaatgcagtccacagtggccaggtggccagatttttcaagaaaagctggatggatgtttctgagtcatcttaatttcaaaatgagactcatattttaaaatttctgtgggccaaatgaaacaagtatgcaggcaggtctggtccgagggggctggcttggccatgcctttctgtgcctttaatgaggactaagaagcaagattgggccacactgtctggactcaaagcccagctccaccactgagcacccgtgtgactctttccatatgtataacgtggggataataataatagctgcttcacaggatgaaatgaagtttgaggtgagaagcattcaccatggtgcccatcgtgttactccattgtcagaggaggaaacggggtcaggcaggaaagcaacttaaaggagggcctgcaagcagccagggtcagagacagggcttggttctgcttcctggtgaagcatggcttcggggtgctgcctctccctccctgtttgaatctgcagattgtgttaggcccccagctgagggcctggagtggtgggattggtcccagtgcctggcgcacattggcctgcagagtagattaactgaatgaccaaagagcaacagaagtctagtgattcttgtctttgaggttctgactggtgttttacaactgagtccaaggcttttccctcctttgtccctctgacacccctccccctaattctcatctgtcagatccagtgtattcctaagctgggacaaagcctctgttttcccagtaggagccagggctgagtgtggaaattacagtgactgcttcttctcagcttctctggttgaaagcaagctggcgaagtaagaggaggtagagttgagaaggtgtggaagatagggacagctgcccccagaactcccttcaagggaggacttccccagctatgggaagtgccatcagggtggccgcagctgcagagagccacttcacctgagaccacgcccttcctggggcagcctgtatctggtgtctgagtgaggcatggtataaacacctggtcatttcaatccaacatgggacggacactgacagacagtactcccagcaggcccaggccagccagggcttcgtcaggcctgcagcacaatttgacttcctatgcccaggcctgcttcctcttcttcctcttcttttcacaggtgcttattcctaataaacatcttgcaaccc

SEQ ID NO: 10197 - DNA, 1226 bp, Homo sapiens
gctgcccacatggcctaagatgtgggtcctggatccttccccccttctcaccataaccccctctcagtgtttccccaacttctcccttttagcagggtccctttagagcccaactccaggtcaaatctggagctcaaatcccagtgctccctccccaggagtggggccccaactcttccaagataccagcattcctcaagtcctcccaaaacttcctacccacaccctcttcccaaggccctcaggggcagaaaacatctccttcaacccgtccccactccttcctctgcatgaccttgggcaaacccttgccctttcaagccatcagctcctgcctctctgccatgagggctttggatcagattcctcttctcgccaggatgaggacacgcactgccctccatagacacagatgaaggggtgggggtcattcagctcgaatgggtcccagatgctcacttggcctttccctgcaggatgagtgaagacgtttgcctctcacagtgtgtcttctacctgcattttggcatcagagccccccagcccacccaccacaggcaattactagccctagttgataggtgaggtgggtgaagaaggctggaggtgacatgtccgaggtcacacaacaaagcagcatgcaggaactagaaacacatcttcagcctcctcctgggccagctcttgtgctacaggtggggcggagccagcccctcaccttcctggttccctgagggtcctcagggtggaggacaggtttggcccagaaagactagccagaggcctgatggtcccaggtggctctggatatactttggatatggatttaaatggtctctaagagccgggggtagggggcaggaaaagtgggttgtctttgcccctcaaagtccacctacctagaaaccaagcccacggtcttggccgtgaccctgataataaatgggctctctcagaggcgccagcccctccctccccagccggaggcgtcatctctcttctgtaccactagagggagctctgatgcagctggagagcagcgctcaaggctctcgcccctcccctccctaacccttaccttcagtctccaccagcctgaagggcctcctaggggatcctcaggcggcccccaccagggcacaccctactgtccttgtgcctcacgccccctcctcatcctgcaccccttccatcccaccttccctttcaataaacagctgggatgg

SEQ ID NO: 10198 - DNA, 867 bp, Homo sapiens
gaccaccctactacacgctcagctgccaacagtggattgagtttgggggtagctccaagccttctcctgcctctgaactgagccaaaccttcagtgccttccagaagggagaaaggcagaagcctgtgtggagtgtgctgtgtacacatctgctttgttccacacacatgcagttcctgcttgggtgcttatcaggtgccaagccctgttctcggtgctgggagtacagcagtgagcaaaggagacaatattccctgctcacagagatgacaaactggcatccttgagctgacaacacttttccatgaccataggtcactgtctacactgggtacactttgtaccagtgtcggcctccactgatgctggtgctcaggcacctctgtccaaggacaatccctttcacaaacaaaccagctgcctttgtatcttgtaccttttcagagaaagggaggtatccctgtgccaaaggctccaggcctctcccctgcaactcaggacccaagcccagctcactctgggaactgtgttcccagcatctctgtcctcttgattaagagattctccttccaggcctaagcctgggatttgggccagagataagaatccaaactatgaggctagttcttgtctaactcaagactgttctggaatgagggtccaggcctgtcaaccatggggcttctgacctgagcaccaaggttgagggacaggattaggcagggtctgtcctgtggccacctggaaagtcccaggtgggactcttctggggacacttggggtccacaatcccaggtccatactctaggttttggataccatgagtatgtatgtttacctgtgcctaataaaggagaattatgaaat

SEQ ID NO: 10199 - DNA, 536 bp, Homo sapiens
gctaaagatggtggggccacatgctgacccagccccacatccacattctgttagaatgtagctcagggagcttcgtggacggccttgcttgctgtagcgttgtaggggccctgcctgcactgcggttgtccacggtcacatctgccccagtgcctttgtccttcccttggggcttgccggccagacttctctcccctgcggctcccacctctgcctgaccccagccttaaacatagcccctggccagaggccttgctgggtggagcctctgtgtgactccatactcctcccaccacaacactcatctgtcaaacaccaagcactctcagcctccccgccttcagctgtcagctttctggggctaacttctctgcctttgtggttggaggcctgaggcctcttggaactcttgctaacctgttcagagccaggaaggagactgcacagttttgaaagcacagcccgtcaggtccggctctgcgtctccctctctgcagcctgtgtaagctattataattaaaatggttttccgggaa

SEQ ID NO: 10200 - DNA, 587 bp, Homo sapiens
gcgccactgggcctggaattcgccacaggacggatcttacagaggcaagtggtccctggacctctcttgcatccattctctagacggccgtgtcagaggctccaccctgttgtgaacttggtatggaggcaaaggcttagaggctggaccagcattgttgggcaaggactgactctccaagggttttgttcttggctttggacacctgagaaccccctcctcccctcccccaatacaaggtttttgacatgagtgtactcctgcttagttcctcttgtggggctgcatttgcggtgctttgccctccccactgtgagtgaggggccaagggatctcctcaatcctgtctccccagcggctctgtttcctccttccttccttggcctctgtcctttgctgacttcctcttccttacccagcagaactcaccctggggtcggggcagtggggaggggcctatccactgctcttcctagtccttggcagctggcctaggtgggcagactataggagggactggttaggagtctgcattgctttgacttccctctccttggttaataaacacaaatgcttgtttctcaagg

SEQ ID NO: 10201 - DNA, 2702 bp, Homo sapiens
aggcctcaagaatgtaacatcccaggcttccctccattctcctggagctgccaccgctgtccccatcagcaaccatgttcttgcaggctgggggcaagggattctgctcatgtgtttgcagaccggctgggatagcctccccaccccttatcagagccaagacacctgctgcagctctccacctagctgcagatagctcccaaagagaaatcagtgtgtctctttcaccatcagctcctcccctttcaccaccagctcctctccacttcccaagggagactccggcaaccttcagcaacatatatcctcgaccagatgcagtgctataagaacagaacgcattttggatgttattattaagaaccaaatgtcaatacagaattcatgttgccggtttcccacttttctttttacattaatgcatagctgcttccatttatgagactttagagtttgagtttctgtagggctgaatgactctttttcctgcccagggcccattcttgcttctcaggcaccttccgtttattaattgccattgctcctgacatcactaagatgggtccccttctggctgcatgaatggaaatgagtgactggaaatcccataggccacaagaatgactttcacaagggcaggaacattgtggaaagactgcatcattctgatgaggcaaaatcctccagctattcctgtctgggccagttttgtaggtccatctgtgcatgggcagcagtagtcaaaaagccaaggaaaaaacagagcagacctgaaggctaatcttatttttgccactaacttagtgaatgaccctaagcaagttccttctcctcttagggccttgtgccaagcctatgaaattggaggtggctttcctgctctaaagcattttgatgtctcattctgtgtttggtaacccctataaactggggcagaggaaaagaatgatggttcaaggccatacttcccttgaaccttgtgtggttcttgcctaactctgtggtttttggaccccatggggcccagacagagcacaggagcatgggctgcctctgagtgtggtgttgaacttcgggaggagcagggagccctgcaccttgtgtcctggcccacctgacctttggtgttctccggatccttttcagcccgaggcctgacagacgcgggcagtgatgagccctgttctggagtggaaagagcacgatagagcaccaggctaagaggcacgagatcaaggcggtagtcacttccgctctgcagctagcatttcaaccatatgtggatcctttcatttctcagctccctggattccttcccctaaattaggacctattatttacctgtaggtaagcaagctactgtagctcttctgaggtatctgccaggctgttttctgtagcctcagattgcctatctgcttagcctgagaacaggtagatgaaaactaaactgatgcctaggcccagggtcagtctcagatggaagctgggcctgggtggggaggctagcatgcgtggctccctgggtatttctgtcagtccccatggcaagcagtgatttagtaaaacaccccagagtcagggaagccaaccaccttgaaacctttagaacatctctgctttggagaaagacccagagatcaggcagaggtgcagattcaatcattactcataacctttgagagatggcaaatgggaggagtgttagtctttgttttggaattggaccattcttgcaaccaaaaggacttagagcagtttgctcataaagacatcctttattataaaaggaagtatttaaaggatgatagagaccatcagatagaagcagggaaggtagataacttttaggaccttgatgtgaggaaaagataaaatttaaacaataaatttgccacttagattttctagcagcaaagtccgaaaagatagttatatacaaaattctgttttctgaaaacaaaattgtgattcaccttcagaattggccattttttttgtgagtttccttgcatcaaggacactgagaaacacagtcattgtcttaggtgttctatgggaggaagtgaatagagcctttaggaacttcctggtcaagcttatggtgcttattttgatctgggccacttccctccttccagtcatgagtaatcatcaaggagcaagttggagtgtttcaggtgtatattttgtagaacccaaaagattggagccttaacaataaacatcagcactaagtgacctgttcctccttttttaaatagcagctttattgagatataatttacatacccataatttacatacctgtttaaagtatacaattcagtggatttagtatgttcacagtgttgcacatccaccaccatttctaattcctgaacattttcaccacctcaaaaagaaaccacacacccattggcatgactccccattcccttgctcccagccccaggcaaccactaacatctgtctctaaagattttttttttttttctggacagttctcataagtggaatcactcagtattatggccttttgtgtctggcttctttcatttcatgtgatgttttcaagattcattcatgctgtagcatgtatccatggtatggatatatcacattttgcttatccttttatcagttgatggacagttgggttgtttctacaaaaaggctattatgagtaatgcagccaagaa

SEQ ID NO: 10202 - DNA, 3271 bp, Homo sapiens
gggggcccattctggcagcggcgcctgcggcctgaccactgattgtagggatgccgttcccccctcccttctcccatgggcatcatcttatttatttagttttgggtgtggaactgtttctttttttcaagatgttaaaacagtcccgtggaaggagcaggggttggagaaaggcatcccaaagcttcgatggagagcagggaagggggacccaaggcaggaggtacaccagctggacaaattgcagggaggggagggagcgagggccaacccggcccctctgtccccttggctcttcagacagggccagccctgctcaggaagtctctggctgtcttcatgtggggaagccgggcttgagttgcccataggcccctgccctgcaccatcctgtccagtgccctgcgcactccatgccgtctcttccaagccaccttgcccgcagcccaggctcctgggccagtgctctctcctcaaatggaggcagccatggcctgaagtgcagatcactgacccagggctcagagcagaggccagaaccactgggccggccggcattccagcctccccagactgctgcccaccttgggactcaggagctcagtcaaggccacaggctggaggagagacggggctgggcgcaaggtggcggagggcagtgtgggttctgtgtctgtctgttcatcccaggctttcccgtcatccctttcctcttggcacttctgggtgtgtcagtcattattcctgtgaggtagctaagcccggcaagctcagtgctggggtaggagggcctgcctgagtcccagctcccagctggagaatccaccagcacaagaagaggaggcaggggcagaaacccaagggggctcccccagccttccaaggtgaggccatctcatctgcaggctgggaggcagggctggactcaggaacccacagcttactgaaaaagccagaggccatgactgcccccagaaacttgccccgagtttctctggggccctcgggcccaacttctgctttgcactatgttcactttggggttggttctcagccatccaagggtctccagtgaggtggctgcttgctgtctgagatgagggttcctaaaccttaaacctctctgcctctggaggagggtggggtattctggcaggatgaatcgcaggatggcgcgtactgaagccacgatgttcatccaggccaaagcagggtgtcctgggataggtttcctaggcaggggcgtggcagagcaggtaggcgccctgcagcctccctgctcccagcccaaggccagtcggcctgggaagttcactgccccaactcttttcccgggaccatactgagtcccccagccacgctgctgacattaccattattattttaccaagtaaactcactccttttcccccacaggggttacacccatctggttgtcccacccactcttcagaggctaggccccacctctgggggttggagggaccctgtgtcttactcgcccctctggcctaagggccactctggttatctgccaaggttgcttgccctcaccccaatgctccaacagccattgcctaactcatgggctctgcccttctgctcggtgccctccacgtgaggcggggcacctgcatgcactgggagggggcggctggcccagccctcggggcaggagccccctctgccacacgctttgtgcctccaaagctccccccgccttggtcagggcctcagaccagccaacctttgtggaataagccccagcccagccaaaccaaacccagatgcctgaggcctggctggggctgcccccgcaggacactgtggccatgccacggagggggcagtggacaaaaccaatccaaagccaagccgggactggctgcggacccagcctcctgtgccgcgcactcacggagctgcgtagtctcctcagacatagtcaaagctttgccgagaaaagaaatgtatgaactatatttgacaacataaaatctctctatttttcaccactggaatttagtcaagcttcaggcccctctgctcctgtctgtgtcttgcgtctgtggccttcctattgtgtcttgtgttttggtggatgtgacagggctggggccacagtctactctgtctctgctgctagagaagccacctgtggaggactgggctgtggttgggcctgaggcctgtggaggaggtgagtgtagccagcagcggccgtctactcctgttctggcctgagaccaccggtgtgggtcacgagggccctggcccacagtgttgagggtcctctctttcgggggctctcctggggccttcgatgggcttttcttcttgtcagtggagggagcagctccccactcagccctgggacaggccctgggactgtggtggccggtggccctggcccagctctggagtgcatgtgtgtgtgctcagatcccgcatctatgcaaaggtgcaggctgcctgtgaggctccaggcggtggaggtgcggcagctgctgctcaggtgccatgccctgaagaggcagggtacacatggggctgggagggcaaagatggggcggggcctccccctgagagagctcaccctccacagtgacccttttccttcctgcctaatacctcctcccgttgggctgtgacttttcctcctgccctcagcctctgaaacagaaatctttggggcctcccctttccccagcgtctggcaagagctgatgaggtcctgaggaacagtgtccccaggaaccaccttctggagcctagcggccagacgtggcttctcctgagttctagggctcgggccagagtggcactactgcccggccagtccaggctcaggcaggaatcggacgctggggcccgggctctgcacagagagctgggcttgagtggagtttattgtagatttctcccaaggggatcacttagcttctcactgacacacccttcccaattgccacaagcgcaggggtatcttacagcactttggggaggggtgggacaaactgcaaggttctggggccaaggcctacccaggggcctctgcccagagaactcacaaccccctctctgacctgggggacaatgcaaacaggtcacagtgcattcccatattaggccatccccttcacgaagaattcaggggatgtgggaagtggggaggcggggagggatcttgactcttgtctcctttgtccttttgttcagacagagttgtacctgcagcagacaactctgaattaaagcatgaaaacacagc

SEQ ID NO: 10203 - DNA, 2325 bp, Homo sapiens
atgggaccgtggtttgctctagcacccatctctacgcgctttcttgtcccacagggagccgccgtgatgagcacagccaacccagttcccggagggctggggcggtgcaggctctgggacccaggggccagggtggctcttctctccccacccctccttggctctccagcacttcctgggcagccacggccccctccccccacattgccacatacctggaggctgacgttgccaaaccagccagggaaccaacctgggaagtggccagaactgcctggggtccaagaactcttgtgcctccgtccatcaccatgtgggttttgaagaccctcgactgcctccccgatgctccgaagcctgatcttccagggtggggaggagaaaatcccacctcccctgacctccaccacctccaccaccaccaccaccaccaccaccaccactaccaccaccacccaactggggctagagtggggaagatttcccctttagatcaaactgccccttccatggaaaagctggaaaaaaactctggaacccatatccaggcttggtgaggttgctgccaacagtcctggcctcccccatccctaggctaaagagccatgagtcctggaggaggagaggacccctcccaaaggactggagacaaaaccctctgcttccttgggtccctccaagactccctggggcccaactgtgttgctccacccggacccatctctcccttctagacctgagcttgcccctccagctagcactaagcaacatctcgctgtggacgcctgtaaattactgagaaatgtgaaacgtgcaatcttgaaactgaggtgttagaaaacttgatctgtggtgttttgttttgttttttttcttaaaacaacagcaacgtgatcttggctgtctgtcatgtgttgaagtccatggttgggtcttgtgaagtctgaggtttaacagtttgttgtcctggagggattttcttacagcgaagacttgagttcctccaagtcccagaaccccaagaatgggcaagaaggatcaggtcagccactccctggagacacagccttctggctgggactgacttggccatgttctcagctgagccacgcggctggtagtgcagccttctgtgaccccgctgtggtaagtccagcctgcccagggctgctgagggctgcctcttgacagtgcagtcttatcgagacccaatgcctcagtctgctcatccgtaaagtggggatagtgaagatgacacccctccccaccacctctcataagcactttaggaacacacagagggtagggatagtggccctggccgtctatcctacccctttagtgaccgcccccatcccggctttctgagctgatccttgaagaagaaatcttccatttctgctctcaaaccctactgggatcaaactggaataaattgaagacagccagggggatggtgcagctgtgaagctcgggctgattccccctctgtcccagaaggttggccagagggtgtgacccagttaccctttaacccccacccttccagtcgggtgtgagggcctgaccgggcccagggcaagcagatgtcgcaagccctatttattcagtcttcactataactcttagagttgagacgctaatgttcatgactcctggccttgggatgcccaagggatttctggctcaggctgtaaaagtagctgagccatcctgcccattcctggaggtcctacaggtgaaactgcaggagctcagcatagacccagctctctgggggatggtcacctggtgatttcaatgatggcatccaggaattagctgagccaacagaccatgtggacagctttggccagagctcccgtgtggcatctgggagccacagtgacccagccacctggctcaggctagttccaaattccaaaagattggcttgtaaaccttcgtctccctctcttttacccagagacagcacatacgtgtgcacacgcatgcacacacacattcagtattttaaaagaatgttttcttggtgccattttcattttattttattttttaattcttggagggggaaataagggaataaggccaaggaagatgtatagctttagctttagcctggcaacctggagaatccacataccttgtgtattgaaccccaggaaaaggaagaggtcgaaccaaccctgcggaaggagcatggtttcaggagtttattttaagactgctgggaaggaaacaggccccattttgtatatagttgcaacttaaactttttggcttgcaaaatatttttgtaataaagatttctgggtaataatg

SEQ ID NO: 10204 - DNA, 4767 bp, Homo sapiens
gtcgattcctcgggacccacagtctcaccacgtctcctccagaggacggcagagggtacaggtggtggcctggccggttggcgatctcccgacagctggatccggcaatgtgaagcttttgtttgggtttccccgcttctttttagttttgctttatttttttccttttcttttcttttttttttttcctctttcctttttttaaatttaaaccattgagacttcagaagagcaggacacaatgctgtggacaggcaccaatttctttaaagaaattcaatgtgggcaaggcatatgtgtaaatttcacttttactttttataaggggttagggagctatttttggttttgtccttcactttccctctgtcttccttctttatacttttctcagttctacttatgacacctcacttccctagagaaggcctgcctccccatagggaatctgggggtttcttctggaacggggcgtgaggacacaaggaggcctctgggccacgcctccctaccagatgcaggaactcctggactccttggtgggctggccctggctagcccttgggcctcggagatgatcagaggtgaagaaccgcctggaagaggaaggccagggtttggccaggagaactaagaaggtctcaactccaggctttgttgtgtttaagctattgagagccccaggccacaccaggacttgcagtggtgggaatccattcctcttctgccctgtgttgcagggaactaggaggtaagggtggagggcgaccatctcgctcttgctggcggtggagcagccatccctgcctttctgttgggaaaaactgttgtgccaaactcttgtgtggaacacagctgggtcttcagcaggcatctgtcactgccgtgaggtcagcgcttctcacctaactgcctcctggattgtcatcttcccagatgtgtcccatagtgtccaggtgtcacagagacggcctgaggccctaagatctggttgtgactttgccatgataacagggtgtcctgaactggctgccgttgtcgtgttctcacagtgaagggcgtgccctgtgtgccggggtccatggtgtcatatgcagtgacacacactgtcaagcgccatttccctcacccctggagacttactgttaggtgcctgccctcagtatagacgtatccaatgggaaaacagcggacctgcccagagcagggaggtgtcgtggaactgggtagaccccctgcagcgttaggggcccatttgtgggctcgccaccttcaggcttccccagccatgacacttcagccccgccacccatgcctgtctgctgcagccatccttgcactctccagcgacactctcgcacctccctaggggaagcttccctccccctgggctgctgctctgagcccatctgttctccccctgcaagaaggggcaatgctcttgtgttgtccctctgtctggacgcgcctggccactccgaaggcttttcaccccattatggccaaatagtatagggccactggggagggggaagggaatcattttgtgttcatttttgttttctgtttcacctaaaccagcataggattgataggggagacggttggcgggcatttccgtttctatgtgaccaaggcagcaggggcttttacctgctaagcggcaatcctttggccctgagaatttgggagagaacagtgcatcaggccaggctcagcaatatgtttgctcacattctttcagccttctgtcacccccctcaacaccaaactttcttccttgtgagcagaaggttggctgctgttagcaggatcccacagtgataaccaggcccttcccttcctaagccaaaacccattgtgactgcctgtctctcctgtctctgacttctcaggcagcctcctgagtgcactgagttgtatccgagagggtgggaacagcagcatcccctaattgcagtacacggttccttttccgcccgccaccctgcctttccttgggggcagctgtctctctgtacatgagcaaatgggcaaaaacagtccccaaacccagcacccccctctccctggctgcagcccacactgtaacatccctagtgaggctccagcctaatgagccccttattttcttttttttccctccccaggtctagtagctctaactaaaaagttcttggagccatcgtgctccccctttgttatttttcttgctatcagagtagcaagaaacagcacccctgtaggtgacaggtgggcagcctggtaggggtcgccagcctccatgccccctcatcttccagttcttgcttagtggcacgacctctttccatagcataaatgcaggccagcgttttagccccaagtgcctgcccttgcttcttacccctcccctgctttctcaaacacttgcccacctcaggcactcagcgggctccgccgtggtgagagaactggccgtggctcagccccgggtagcacctgtagtttcagtgccactctccactgtccccttgtggaccagcttccactcactgtcacgtcccccctcctgcgtcttcactgggtctcaggctgccagcagctctctggtgcatcgtctcaacaccaccaagtttgtaggacctgcccaagttctagtagtattcaaaacttcaaacggcagtcatttgttctcctcggctctgtggcaaggatagccctttggagggggactcttgacctcggctgttagggatctgaacttggttttcccgtcagaagaatcagcaggacagatcgtagtgccttattccattgtcctcccctggccaggcctcctggctcagctggaagtgcatggcttctttctccctatctgtgtcctctgtcacttgctctttcactctctctctcattcccagagagccacgggggagggatcaccctcacccccaacaccctcttcctgagggctgtagccaggtccgcatctccccaccaccaccagggcactcactcgcagctatagcccaggacagaaaaactgtgctttggacaggtgcacactctctgcctcttacctctagccaggaggatgcctcagtctgttcattcgagactggccccgtctgaaccttctctgggcactggggactaaggttgcaggccttagcctcgtctcgtcccagaggcattggatcaggagaatgggaatttttttcctcccacctggacatagtttgcccctgtggctgcctttctgagggagtatactaaatgtttacttaagaaacaccctgtttacagccagaggagaaacacccaacactgagtggagatttgactctggacagggcctggcctccttagtggcactgccggggggccccagagcgaatgagggcagagatgcccggggcaggggcaaacgccctccgctccctctgctcccaaccctgtggtgctaggaccactccccgccttccctacggcctcctcgccctgcacattccccacctccacattcccctcctccaagatctcagctccttaacatatcagttgtctcctagcctagaaaaccagtgtttggagcaataagatgattatttttgcttgaatctttttctaagagaaggaaaagagctggcattgtgggaattttctttttatgctgttagctgtttaccttcttagaagacatcctaataggatggatgtctgggttttagccttggggtatcttttggaaacttagaaaagcaggagtcaggctgccaccccctaaggagggaccctaacgttctgcccttgcctggttccatatggctccttccagccctgcccaccaagtgcagctcccactttccatcctgcccatacgcccctcttcccccgacatctgggggcgctggtggcacttactctaggttggtctcagactatccctccccttggctggttttccctcctaggcctgtctggcagcccccagacagacgtagctcctgggagtctcggccctggcaaccttggaagagccaagctgacattgtttagctcttcaggccactgggttttggaggcagaagtccagagatactggctctgccaagctgtcgtactgggctgtggcacagccttcgagacaacacgggtgtatctctgatcctgccctacctaggcttcaaggggcttctgtctggagaaatgccctcaaagggtaaccagtaggtgtggcattgaattggccagtgttagcatctacagccatcaccgagatgagtccactgccgttgcctgcccgagggccccctaaggttatagacggtatcagcagggaggccgtcccgctggttttctaggagagcccacaggaggaagggagcctcttcaggggcactggaatcttttgtgccaggggcttcttttcatcagagccggggagtacattgcagtgacttcttaaacatttgtgtgggacagacgagcgtgagggaggttttaagccaggcacaaagttagtttccaatactagttaataaatctatttttcttcatttcctttttttgcacagaagctggtaatctaggacctacgtgtgaacaactttatatgaatattttttgtacttggtttacttgggttggtatgatacattatatttaagttccttgaacactgtggatcccctaatgtgtatgaatgactgaggctttgtaaattaagggacgtttgtgtgaataaagttatttgatggggtcaaagaagccatatgtgatttg

SEQ ID NO: 10205 - DNA, 497 bp, Homo sapiens
agggcgctggtggcctcccgtacaaacttggacaacacggagcagggagagctcaccatggaatgaaccccccgcccatgctgtccggcctgggaaaccctctccatctcccaaggctgccagacatggacctccaggctccagcacatccccctctcctctcccccaggttggggctgggtccaccctgtcctatgacttgatcacttttgcacattccctggccgcttctccccagagctgcctgctctgtgagccccacagccctgctcattcctcacgcccttcaatgctgcaggatggactggcccctgacccagggactctccaaacgggatacaggagagaagctggtctagactgtttgctgatccccaacctgcacggggcattcctgcttctctctcaggccaccacagagggcaggggatggttagtcacctgccccagcactcacaccctaactcaaaataaatgttaaataagtgcgatcacac

SEQ ID NO: 10206 - DNA, 110 bp, Homo sapiens
tggatcatgagggactgagaggggtggatttggcccctgtcctcctcctgcccattctttgtctcttccacatgggagccaggaggcctcagttaatcctgcctcaacct

SEQ ID NO: 10207 - DNA, 433 bp, Homo sapiens
tggctaggactccagggagcctcgaccctagggctgatcctcaagtaccccagtttcacacataccaaaccaaggttctctcccctctttcctctcacatacatgctctgtctcctctcttggaatgcatgaactttgattccttcaggcccttgtcagctaccgaaggaggaagacagtggcttcacctgtcctttagggaagctggagccatctctgcactaactgccctcccaaatatcttggttcagacagctctgaaccccacgctcacagtggtcgaccttgcctcccgattttcggagttggggaagggccatgaccaccctcgtagactttttccatgggatacagtttaggacacgggtttctgccagcttccctaaccaggagggggatggagaagggcctacatttctcaatccagaggaag

SEQ ID NO: 10208 - DNA, 98 bp, Homo sapiens
aatgcaaatggacattctctgggaggtggggcataccatagcccaaggtgacatttcccaccctgtgccgtgttccccaataaaaacaaattcacaag

SEQ ID NO: 10209 - DNA, 54 bp, Homo sapiens
gagcccctccccacaactcagtgtccttcaaatatacaatgaccacccttcttc

SEQ ID NO: 10210 - DNA, 159 bp, Homo sapiens
ggagtccatcctgtacatctcaagcaaggggttcctcccctagcacctgggcttggcagaagggccatagttcatccagctcctcccctagagcaatgctgaggagcgggggcatggtagcagggctgtctggttttaaataaagttggaacacttcac

SEQ ID NO: 10211 - DNA, 536 bp, Homo sapiens
gcggcaacaagggtccgtggaccaggaggattgcctttaatattttgtaatattctgttttgttaatataccccaaattgtgtatatatcttataactgttttagaaattggtacataggcttctattacctattaggtggaaattttatatgtaaatgtgttagcactgatagtcctttttccaatgttttattggggaattaaatagtgtgatgtttggattgatatcgtgaaatcctcagccgagaaattgggctggattgtgctttggttaatacatctttccctaaagaagataaacacaaaatccattccaggtagctcggcaccaactaagaaaaaaagcacaaagttctcagagctctcgaggaaagtggttgtccccgtaccaccatgcactgtaaatatccctcccctctctccctggtcccctcccccatccccaccactgatatcatggggagtaataggaccagagcggtatctctggcaccacactagggactatcaggtaataaaagctttgactccctga

SEQ ID NO: 10212 - DNA, 380 bp, Homo sapiens
gggcccagtaaggacagtgcccgccagggaccatgtatgtatcatggcggaagagttggccctgacctggaataaagcagttggtgttgcttatgaggaaggttcagccttatccagcacagccttcacgttttgccctctgctgtcaccacttggtcagaaacttccaaacgcagtgccctgttctgccggtgtgtacagcctcagcgcaccaggagaccctagagtggtttccatctcacagagaatcagacagggccacagccccctcaggcagccaggtcatctgagtatcattaagagtagtgatgggaagattacagtctgagggccaaacgtgcctgcttcctgtttttgtaaataaagttttgttggaacac

SEQ ID NO: 10213 - DNA, 98 bp, Homo sapiens
aacttgatggctccgaacaccctcgaagcgcgccactcgcttcccccatagccaccccagaaatggtgaaaataaaataaagcaggtttttctcctct

SEQ ID NO: 10214 - DNA, 396 bp, Homo sapiens
cttctgcagctggaggaggcccctcaggccggggatctggggagggctagcccaaaacctcccgcatcgggcaggcaccccctgaagtacttccttcagggtttcccctttgtgagggtgtcgagtagcctcaccggcctgtctggaggagcagctggctctgctctgagaaactctggcaagtggacgccattctcttgcccttaggattcactgctctctcctacagccgccaggcctggggtcctgaaaggaccttgggtggtaaagctgtacttggtgggagtgagggcgtggggaggaaccatgcaaatcgccttccatggtttttaaatgcagtaaataacatttctggatgagacttgtttccaaaataaaccagctatatctgttttg

SEQ ID NO: 10215 - DNA, 4266 bp, Homo sapiens
tgctggggccagggactctcccacgcacgagctagtgagtggcacaccagagccatctgcagggaagggcgtggcggggaaatggctgtgcggtgcgggacggaagactggaaaccctcaaagcatctgactcacctgcatgatcacaagctttctttgacggtttctcccatccgtgttccagcatctaaccttttacttttgcataggaaatacttgatttaattacaggtccagggatgagctgatggttgctggaggaggccagtgtagagccagtgagagaactaggaatgacactcaggttcactgtggaaaactgttcttgggactgtctcaactgtgcaaaaaacaaaagatggagtgtttacaagtagacattcgtcatcagttgttcttgaacatggtcttttaaaaactagtcagatgaattgttttcatctgaagcctgctatcttttttaaaagatgtgctatttattcttgcacgatttaggcaattatctctcttccagggagtacctttttttctagttgagaattaataatggtccatctcttttgatcatatcaagctaggatagaaggggggctattttaaatgtcaaggtcagcagtgttactttgaatgtaaactggtataataggtagttttctatagtaacttgattaatttagtcttaatccatttgaaactctctcttcctttctctctgcctgtccctctccttctccatctcaccctccctctctcacacatacacacacaaacacatacacacaacactaagtgcctagactttaaatagatctagcaattggaaagttagtaagcctaagtttttacataattgcattcctacattcttgtaaaatttaaatagctaccattggcaatctgctttttttctaaaatctgatttgcagccaggaaagaattttctcacccaaggaacatttgatctagcagcagggatgagaggaaagcagaaatgaatgaactgtgaaagctcctgtttttattatcaaaaaggacactgtcaagaaggcgccccctgcccccacccccgtgtcaccctaggcctgataagcgatcagaggaaaggactcattcatgtcacgcttccttgagcagaaaagagcactgagagcacttgggacccctggatcagagagcatctgtgtgtcctgcagcctcctctgaacttgtggttcattctcaggctggggtggactcagatgccaggaaagggacagcctcccattgtcaggcagaagctgcccaaagcctggagaaggacttgtttgccctctttcccccaggaggggctcgacccacccaccctccctctcagaccaaggtggtggctgtgaggagggcagcaaatgctgacaaggatgaaaagcacatggaaaaaaatggatgaggagggaaaactctgccaaatggaaaatgaccaaatttaagagggtgggacagtcccctgctcctctcccagagggcactgcttggaaattgtgttttccccatttatggtgctctgtattctggcattatgcagcagcctcccagaagctctcttctgcttcaaaacctgggatctctggcattaccctattgggatggaccgctggacagcaatgctcgagtttgtgaatttggagagatactcaaaagagctaaaactgcagcattttacctttaaatgcagtgcctagagagagagtattgtctcttccccaacactaaccccactcccatgaagaattgcctggaaagatgttttcaaggaatttgaaccataaaacactatctgatgcacagaacacctctactttgagactcacctctcataaagcttctttttcacattactgttaaagaccagacgttctagaaaagacccctcctctcatgagctcccccatccctgctacagaacacagcacccatggcgcctgcagtggactggccccttaattcccacaggcccccccagcaaggccaaagggaggcccctgggtattgtcctcctacaaggaagatcctctttgtttgttcaaaggaccagttttcctaggccaaagaagtctcttccccatgttagtcctatgccttgaaatatcatgcaccatgacccacagccatctggttatgtcttatttttttcctaaaagataatgtttatttttaaaaaggaaggaaggagcaagtgaagtttcattctgctccagcggtggggaagccgctgaatccacctgcttctcctttgcaaccgacagcaaacagctttctccggcctcagggcagaaaaagggaatggcagggagtaagaggcgctgggctcggagcctgtttccaagaaggaattggttgtcatctggcagtgttgcgcgtcacaagagagcctgtatataaattaaaatagtcaagacaacactgaccttgcacttgtacataactatacagtagtgtccagaatgttcagacattcggagtgtacataaaacagaaaaaatcttcatgtatttttattaaatataacaatgtctgagtttcacctaagatgtttttgtgccatatgctggatatccaggttctcgccaggccccgatacatgaataacaaacccaagaaacgcatccccattgtgtgatgtgttcagatgcatctggcaccaattaggtatttcttaaaacaggactcatctgtcagagtgcacatgaaaaatcaggcagggaatcgaaacgacagtgctggaggagactcaggaagcagaggcgtccctgccgctgcccttggccctgcaagcacatcatgaccctttctggcagcctcttggtgctctgggtagtgagggatgaccagtcttgtcctgagaaatgtttctcttagtctttaagttcaaagactaacctgtagcaatcagactttccaaaagggggttctccattttttgtagttttgtctaaatttttaatgaccatttcctggaatcagtttattatactgaaaactgggggtgggagtagggagctagtttgttgataaatagttcccatttccccatggagaatttgacataccctggactcctgtgtgcctcctgccatccctgcacacagcctggggagaagcctgtgcctccccgtgtggagagaaggcaaccccagatcccctgagctaacccggaggaaaggcagtcctggacagaagactgtcagcagaaggaaagtactggactacccgtgggtaagtcctgccattcaagactggagacacctgggaaataaaaagagcagggcactgctggtgggaagaggcattttaccttccagtgcaaatcctgctcctttgatttaatggggtgtactggggccaggggctgattcacttccttgggagatggtggtgttttcatgaacatctttgatccttccatttcatttattcatccatccattcaacaagtatttgctaaacactaacttaagctaatgctagggtagtgactgagatgtaaaaatagattttagaattaaaacaaaatccaagtcctcacacccctgtcatcccaggagatctttccttgtggtggtttctgtgagaattggccatcctgaggacacagccaggacggcagaggcctcctggcctcagggcatgccctgcctaccttctgaaatgtttaccccattgaccaaacttggctccagccattgcggtggtttctagatagccaggcccaccaagagatattgccccttgatgagagtcaaacaccctgcctacaaggagatgttttgaaatggagaggaaaattggcacctcatcttttaaaggcagtaatggaattgattttcagtaactgaatttgtgcacaaaacattctaaacactagtgaagcctgtttcgttgaactaattctggctctggaaatgtttttgttttatagttatttacgatttcgtttgtttggattcaagcttagtttgttaatatgtataatttagcatctattacactcatgtaaatatggagtaagtattgtaaactatttcatcgcggggattgtgggtgttatacatacatttaggactgcaattttttggtattttttgtattgtaaaataacagctaatttaagcaggaacaagagaactaagggaggtctgtgcattttaaacacaaatgtgaagaacttgtatataaacaaaagtaaatactataatacaaacttccttctgaaataaaagtagatctggt

SEQ ID NO: 10216 - DNA, 199 bp, Homo sapiens
ggacgcatggacacaggaaggggaacatcacacaccagggcctgttgtggggtggggggaaggggaagggatagcattaggggatatacctaatgttaaatgacgagttaatgggtgcagcacaccaacatggcatatgtatacatatgtaacaaacctgcatgttgtgcacatgtaccctaaaacttaaagtataatt

SEQ ID NO: 10217 - DNA, 943 bp, Homo sapiens
gggcgcgccggcgcggtgccagcgccgtctgcccggccccgccctctttcggttcaggggcctgcggagcgggttggggcgggggaaacgatagttctgcagtctgcgcctttccacgccctccagccccgggggagataaggtcatgggagagtgggtggggacacacccagagactggctttgggattgggcactggtccgctgactgccaggctgaagggacccgccaaggactgaacgggtaagagaagaggtttgcaagacagagcgcgcagcccggcaaggggcatgtgaccccgaaggaagaacgcaacagaagagtcctggtctgaacttggccgagtaggggtgggggtgggatggcaggaggagccgcaggaggaaggaggttgtgcagggtctggacctgcagggctgaagttcactcatcgaccgactcagccccaaccgggagccaggcagaaaaaccctgtgccgtaggaaagtgactggaagtggactccagagggacaggtgtggtggcacagtcctggtgtggtgctgaccacccaaatatgactgtgaattgtggaaagggcagtagatctctaatgtggaggtgggaacattattgtggtggaggcaattatgagggtagcatttctttcgagacaaaacacccgtctgggaaggccccaaggtcagcttatgaaggaccccacttgcaccccaccccagccatggaagagcagctggagggtggatggggaggccagagggagcaatgaggggtggtcccagctctgctattgactcggtatgcctttaggacattctcttaccgctcatgggcctcagtttcctaaagtgtgaaatgtcaggcacttccctctaactggcatgcaacagccccacctgcctgagagccctgaggtgacaataaaacatttatgctcaagggg

SEQ ID NO: 10218 - DNA, 1151 bp, Homo sapiens
ggggcctgcgccagtcctgctacctcccttgcctttcgaggcctgaagccagctgccctatgggcctgccgggctgagggcctgctggaggcctcaggtgctgtccatgggaaagatggtgtgggtgtcctgcctgtctgccccagcccagattcccctgtgtcatcccatcattttccatatcctggtgccccccacccctggaagagcccagtctgttgagttagttaagttgggttaataccagcttaaaggcagtattttgtgtcctccaggagcttcttgtttccttgttagggttaacccttcatcttcctgtgtcctgaaacgctcctttgtgtgtgtgtcagctgaggctgggggagagccgtggtccctgaggatgggtcagagctaaactccttcctggcctgagagtcagctctctgccctgtgtacttcccgggccagggctgcccctaatctctgtaggaaccgtggtatgtctgccatgttgcccctttctcttttcccctttcctgtcccaccatacgagcacctccagcctgaacagaagctcttactctttcctatttcagtgttacctgtgtgcttggtctgtttgactttacgcccatctcaggacacttccgtagactgtttaggttcccctgtcaaatatcagttacccactcggtcccagttttgttgccccagaaagggatgttattatccttgggggctcccagggcaagggttaaggcctgaatcatgagcctgctggaagcccagcccctactgctgtgaaccctggggcctgactgctcagaacttgctgctgtcttgttgcggatggatggaaggttggatggatgggtggatggccgtggatggccgtggatgcgcagtgccttgcatacccaaaccaggtgggagcgttttgttgagcatgacagcctgcagcaggaatatatgtgtgcctatttgtgtggacaaaaatatttacacttagggtttggagctattcaagaggaaatgtcacagaagcagctaaaccaaggactgagcaccctctggattctgaatctcaagatgggggcagggctgtgcttgaaggccctgctgagtcatctgttagggccttggttcaataaagcactgagcaagttgag

SEQ ID NO: 10219 - DNA, 1010 bp, Homo sapiens
ttcctcgttgggatggtgcttctgagggcaggcagagggtagacacacagccagatgaagcttggcatctccctcctacccagcagctctgatgtgctgctataccaggacaagtgggtgacacaagcctgcagaaagggggctgggcagagggtggaggaggtcctgcctgtcctcaggttagtggaaccacagaacttcctgagcctagagctgctgtgttacttagaccgctgccgtgcggcagccacgcttgtccttgaacccaccttcctccatccctgccagccgatagtgctagggtgaggagctgcctggagctcaccccgctcttcttccaaacccacagtcaaggccaggcgcggtggctcacgcctgtaatcccagcactttgcggggctgaggtggttggaccacctcaggtcgggagttcaagaccagcctggccaacatagtgaaaccccatctctactaaaaatacaaaaattagctgggtgtatggcgcccacctgtaatcctagctgctcagggggctgagtcatgggaatcacttgaacctgggaggcagagtttgcagtgagccgagagtgcgccacttcactccagcctgggcaacagagtgagactccatctcaaaaaaaaaaaaaaaatcccacagtcatcgaaacacaaaaggggtctcagactcccctgagggtggaggagctgtgcctgcatgctggcaggccacagcccctggctttgtgcccacttaggcagtattatcaacaaggtcctgctcagtgtccagcccccgctgagttcagaaatgcatctgccaatcagcagcaggattctgcagctccttttgtgccaagcccgttcccaccaggcaggctcgagataaagtcatcacagccttccctcatctgcagggagagaagttgctgtcagatgaatgtgagcagtctagcctggatgacatatttttcgttttgaattaaaagcactggctgtgtgattttaccctc

SEQ ID NO: 10220 - DNA, 1178 bp, Homo sapiens
tgaagccctgggctcttcccaccacccatctgttccgttcctgcagtacacctggcccctctccgaagccccttgtccctttcttggggattgtggaggctgggtcagaggggagttaagggactgcaggcctggcagcaggacatgccttggctgaaccaagtcctgagagcagcatctctgtccccacggtgccttgtgtgggtccccgtccttggctttctgggtcctgggctgcccccagtgctccagaccttccccactggcaatccaggttatcatccatgtcctccagaggagcttcctcctccaggcctcagccctgttggcccaggtggagcaggagggaccactggaacatgtggtgcttgggaatgcctctcctgttgcattggtccctgaaggcctcagggcaggtatgtggtgtgtgggcgactccacaagacctgcctcccatcctggcagcccagcctgagaccgttgcattgaggcaggcaggagcggcagggtggctgctctccaggagcccaactgccttgagttcctgccccactgggccccctcccctgctgggcaatcctgggaaggtctggaggttcctgtggacctcagggaagccaggggcagctgtcaggcctgaggaagacctgtggagctcctctccagcctcctctttccctcccctctggtctccattctcttcagctccctacatgggctggggaggagacacctggtgggcagagctcaggcagaggtttggatttcagctccctcacttccggggctgtgtggctttggcagatgtcagacttctggtcttgcttctccacgtggacagtgagtatctggctcattcttcactgggttcttctgagattgaacctacaggtgtttgccaagtgcctggcccagagcaagtggccactgcttctcccatctctctcctgcccaacctggtagagctgagggcatgagaggcagagtgcacagtggtcaagggtgcagctctgcagcacaggcagcctaggcctgcgtcccaacctgcctctcaccagctctgtgaccttgggcaagggatttatctgtctgtcccttagttttctcacctgtaaaaggaggataagtatatatatatatttcccagtgttgtgaagattaaaggagtttatcgatgt

SEQ ID NO: 10221 - DNA, 560 bp, Homo sapiens
tcattacctggggaggggttcctgaaaccttccacaatgggatctgtggactttcatttttttaagagacttactcaatttcatgactgtactacctgaaacaaagtgagaaaggacaggtgtatttttctaagtcatcaagataaatccttaagaattcagtctaaattagcaaccaggaaggaaaaatatattaaaaacaacaaaaaagtggcacatgtccaggcagtgtgaggatttgctgtatataagttgcctgctttgtatttttgaaatctctgcatcactcattggaagtgcttctgaagagagctgctctgtgttcagttgactggttttgtgtcctgtttgaacttgctgaatgtaaggcaggctactatgcgttataatctaatcacaatttgtcaatatggtcttggcaatcatctgtgcattactctggtttgcattaagcctgtgtgtgaacttactgtaaaacatgttttatttcaaggttctgcaaaattaattgggcaggttaattgtgtacctgaaacttaacaagcagtttttggaagggc

SEQ ID NO: 10222 - DNA, 315 bp, Homo sapiens
gggctgtcctcgctgctgagaagagccactaactcgtgacctccagcctgccccttgctgccgtgtgctcctgccttcctgatcctctgtagaaaggatttttatcttctgtagagctagccgccctgactgccttcagacctggccctgtagcttttctttttctccaggctgggccgtgagcaggtgggccgttgagttacctctgtgctggatcccgtgcccccacttgcctaccctctgtcctgccttgttattgtaagtgccttcaatactttgcattttgggataataaaaaaggctccctcccctgcc

SEQ ID NO: 10223 - DNA, 1606 bp, Homo sapiens
ggaaggtcttcctgttttcaccatctttctaatctttttccagcttgagggaggcggtatccacctgcagcccttttagtggtggtgtctcactctttcttctctctttgtcccggataggctaatcaatacccttggcactgatgggcactggaaaacatagagtagacctgagatgctggtcaagccccctttgattgagttcatcatgagccgttgctaatgccaggccagtaaaagtataacagcaaataaccattggttaatctggacttatttttggacttagtgcaacaggttgaggctaaaacaaatctcagaacagtctgaaatacctttgcctggatacctctggctccttcagcagctagagctcagtatactaatgccctatcttagtagagatttcatagctatttagagatattttccattttaagaaaacccgacaacatttctgccaggtttgttaggaggccacatgatacttattcaaaaaaatcctagagattcttagctcttgggatgcaggctcagcccgctggagcatgagctctgtgtgtaccgagaactggggtgatgttttacttttcacagtatgggctacacagcagctgttcaacaagagtaaatattgtcacaacactgaacctctggctagaggacatattcacagtgaacataactgtaacatatatgaaaggcttctgggacttgaaatcaaatgtttgggaatggtgcccttggaggcaacctcccattttagatgtttaaaggaccctatatgtggcattcctttctttaaactataggtaattaaggcagctgaaaagtaaattgccttctagacactgaaggcaaatctcctttgtccatttacctggaaaccagaatgattttgacatacaggagagctgcagttgtgaaagcaccatcatcatagaggatgatgtaattaaaaaatggtcagtgtgcaaagaaaagaactgcttgcatttctttatttctgtctcataattgtcaaaaaccagaattaggtcaagttcatagtttctgtaattggcttttgaatcaaagaatagggagacaatctaaaaaatatcttaggttggagatgacagaaatatgattgatttgaagtggaaaaagaaattctgttaatgttaattaaagtaaaattattccctgaattgtttgatattgtcacctagcagatatgtattacttttctgcaatgttattattggcttgcactttgtgagtattctatgtaaaaatatatatgtatataaaatatatattgcataggacagacttaggagttttgtttagagcagttaacatctgaagtgtctaatgcattaacttttgtaaggtactgaatacttaatatgtgggaaacccttttgcgtggtccttaggcttacaatgtgcactgaatcgtttcatgtaagaatccaaagtggacaccattaacaggtctttgaaatatgcatgtactttatattttctatatttgtaactttgcatgttcttgttttgttatataaaaaaattgtaaatgtttaatatctgactgaaattaaacgagcgaagatgagcacca

SEQ ID NO: 10224 - DNA, 3377 bp, Homo sapiens
gcttgccaggaggctggcagtacagagtgcagcagcgagcaaatcctggcaagtgacccagctcttctcccccaaacccacgcgtgttctgaaggtgcccaggagcggcgatgcactcgcactgcaaatgccgctctcacgtatgcgccctggtatgtgcctgcgttctgatagatgggggactgtggcttctccgtcactccattctcagcccctagcagagcgtctggcacactagattagtagtaaatgcttgatgagaagaacacatcaggcactgcgccacctgcttcacagtacttcccaacaactcttagaggtaggtgtattcccgttttacagataaggaaactgaggcccagagagctgaagtactgcacccagcatcaccagctagaaagtggcagagccaggattcaaccctggcttgtctaaccccaggttttctgctctgtccaattccagagctgtctggtgatcactttatgtctcacagggacccacatccaaacatgtatctctaatgaaattgtgaaagctccatgtttagaaataaatgaaaacacctgagctggtggctgtgtactttgactggtacatggaggctattttaatccttctaactaaactaaaatagattaaaggaattaaactaaaatacaagtaaagctagacaaaggcccagaaatcatactgtaaggaaatgttattggaagctgattcccagagcagaccacatatacagcaggatgtgcctgtggcatgaagattttctttctcttttttttttttttttagatggagttttactcttgttgcccaggctggagtgcaacggcatgattttggctcactgcagcctctgcctcccaggctcaagcacttttcctgtctcagccttccgagtagctgggattacaggtgtgtgccatcatgcctgactaattttgtatttttagtagagacagggtttcaccatgttggccaggctggtcttgaactcctgacctcaggtgatccacccacctgggcctcccatagtgctgggattcaattttttttttttttttttcaaaagaagggtaagtgcttgctgttcccatccctgaaacattgcatgtatttaagaaaaacaaaatgttagtggcatatttgcttctaatgttcccctaaccctacatgcatgttttatgtgcactcatatgagtatctttaaatataatccctttacatctgtgttctatgcaaagtctctcatttctttcaagacagcctaatgaaggccatcatctctgtaaaccacttgtcactacaaaaatacaattactcaccaaaaagctttaaaaaataaagctgtgtctttagggagacccaataaagaatgcaatccatgccataagcaggagttgatacaccaccttattagctaaaaatatatataacacaatatgagtaatgtttaagatctgttttaaatttaaaacaatgaattgaatgctctaagaggctcctacaggcgctccaggccactctcagagactcccaggagttgttgaactatatttggagaaaacagccactgaatattatcatttctcctttaaagagagtttgtaaggggggaacatgcattttatcagacaatttatccaaagcattgcagaacatgagtgctgatgagggcacctcttgtgctgagtcccctcagctatcagtgttcttctcaaggacacatttggaaggttttaacattgaaagtgagcggaggacttgggggcagagcagcacaaagaaacagccttacactgggcacatggaggagacgtccaccctgcagccaggactggggttcacgtcactgccagagctacactcgccttctgcttccacggtcctgttaattctagatcagagagcaagaaaaaagtacagaacatatcctctacggttatttcctgctttctaattaaaaaaataataaccatggcaagagagaaagaaagagaaagtactcagaggctgacactgacatttcacttcctcgctctcctaagtttaattacaacagcacgtgcagccacgtcagccaaatgacttcatttctgatgtgaaaacgcttaggccatgatgtcgttcattttctgtaattgctgccttttctcattctgttaatagtcccggcaaccagatttcagtggggcatgacgtgaatgtgtatatggtgattcaaatgcaaaatttgtttatggggcttttaatcgaacgcgtgtgtgcctgaacattcttgctcaagttgatgaatcatggggtggaataaaggctgagtttagtttttcactttagcaaaggggcaatggggtgcctactatgtgcgagacattgggaggggcttctgaattattctggatatcgtcattttgcagtgtgcataattttgccaaccgttgctttcgtagcccctgctaagtgttgactttttaaaatataagtttattgtaaaagtgacatgaaaattacaacagatattccagaccaaaataatacaacaatcccagcatctgattgagtcagtgtttgctgtttcccctgcactttcctagttcttaagcatttgcgtatgtaaacattcatatttgcaataaaaaagtgagcttttatattctaaatttttacttaacttaattcaatgctttctactcatttttctatacttttttttttgaggcagagtctcattctgttgcccaggctggagtgcagtggcgtgatcttggctcactacaacctccaccttccaggcttaagcgattctcatgcctcatcctcccaagtaggtgggattacaggtgcccaccaccaagccctgcaaatttttttgtatttttagtagagacagtgttttgccatgttggccaggctggtctcgaactcctgacatcaggtgatccacctgcctcggcctcccaaagtgctgggattacaggtgtgagccaccacgccctgcctactctttgttttctttcctccccacccattttcccccgtcctgtcccctccttccagcctgagatgtaggctccaccttaactgtgctcagatacacaagtgagggctttttaacttgattatgccttttaaaaatactatgtatgtaaaatatttattcatctgcaatttggcttccctaacttaacattgcatcatgaaactctttggaacaacagctatctagatagctgactcattcttttggattgctacgtaatctcacttaatacagatgtatcatgattgattgaatcattgccttgttgatgggccttcagattatttccagttttttgccactgcaaacaataaacatccttgtacatact

SEQ ID NO: 10225 - DNA, 1107 bp, Homo sapiens
gggccacccagggccaggagaacaggaacagaactgagcaggggcaggtctccaaggcaagcccagctggtgtgacttagacaatgacgaggcttcaactcactgtcttttttttttttttttggagggtattttttatttgtgggttcaaaaaatctgtatatacagtctatgtgtttagaatttgtgttgtaagtaaactacagctttgagttggaaagaagtcacgggttgtaaaaccatttggatttttttaaaacaaaagtattaataatctggaagacagtgttgcccaggtcaggagtgttttcttggtggttccagcccccatcaattgaactgtttctgggctcagtcagacacagacattcatctgtgtctgaccaaatcaggggacttccccacctgtggtgggaggcacagcttagatgttttgtacacctggtcttttctagaaatccctgcttggagctgcagaagggttgccttctgtaggtcggaggaatggaggcttactaaccaggtaagccttctatgcatccacaccaaaatcctgcagaatgtaagtaagctctgctttataagatgggttcaccttcatcgcagactgaaagtttcagtttttatttttttcagaaagcacgaaaaattatttataatagtctggagaaaaaacacactgtaatatttcaagtgtatgcagtagaatgtactgtaactgagccctttcccacatgtctaggctccaatgtctcctgtaggtccacctaactgtgtgttttcagggacaatgccatccatgtttgtgctgtagacttgctgctgctgaatcctttctggggactttctcatcgggcagggagcagagggcttctcgttcatgcaccctttgcctgaacacccatgtagctgctgtgttgtgtatatattactcttaagaggagtgtgtgtgtctgtgtttgttttaaaagtcacttatttcttacagtgatttcaattgcaccatgacttcttcactaaaaccacaaagtcctgcttaaaactatggaaaacctaacctgattagagccttgactattttgaagattaaatgcacactttttatat

SEQ ID NO: 10226 - DNA, 447 bp, Homo sapiens
ctggtgccgggcagtgtgcagggtagtaatggaggtgctgtgccatgaccagcagtgttggtggccacccagatcccctagggtctctggccagctctgtgtgcccaatcccaattaagtgctttgaggttaaaggctggcacctgtgacctggtattggagccagtcagcccatatggagagccagcagggtctgggagttctccgtcctcttggccaaggccgctgactgactgggctacgagtcaaaagcccagctcccttgcctcaaggaaggacattctctgaggagtaatttatgctctagcactccctttcctctagatcggcctgaggctgggacattacatgaaatcacacccttgctgggcttaatccctttccctaccctcccatttatttactggtgtctctgggagcctttccttaataaacctcttatatctg

SEQ ID NO: 10227 - DNA, 308 bp, Homo sapiens
ctgtcattggagcggtgggcactgttaagaagcagccatcacatgatctgtttttcaccacttcactgaaagacaccatttatctacccaagggcagaaagtagaacttactattcattaaatgtttgacacaattggaattgtctttaatttctgtcagaatgctattgaaaatgtgaattgcatgacttgtagcatattcttttctgcaaaatagacatattaacatgcttatgacaatgactgtgctactgtctttggaaaaatgtttgtctcagttggaaataataaaagattcacctgagacc

SEQ ID NO: 10228 - DNA, 792 bp, Homo sapiens
aaggacttcaccaagttagggcctcctgggtttattgcagattaaagccatctcagtgaagatatgcgtgcacgcacagacagacagacacacacacacacacacacacacacacacacacacacacacacagtcaaatactgttctctgaaaaatgatgtcccaaaagtattataataggaaaaaagcattaaatataataaactaatttaagaagtgataaagtctccagatgcagtagctcacactgtaatcacagtgactcaggaggctgaggtgagaggattccttgaggccagggttcgagaccaaccttgggcaacatagcaagaccccatttcttaaaaaaaaaaaaaaaaaatttaaacttagctgggtatggtggcacatgcctatagtctcagctacttgtgaggctgaggcaggaggattctttgagcccaggagtttgaggttacagtgagccacaatcacaccaatcactgcactccagcctgggcaataaagtaactcttgactcaaaaaaataaaaaaaattgtagtggtagccatgtgttaattgttaaataaattctccaaagggctaaaagtaaattacttataaattttttatagttgtatttttgacctgccttttatatgtatgaatatttcatagttttgcatatcagatgtaggcatacagacaaatacataaaccaatgaatatattacatattctgtgttccaataaaactttatttatggacactaaaatttgaatttcataaaattttcccatgtcaagaatac

SEQ ID NO: 10229 - DNA, 233 bp, Homo sapiens
tgaaagtcatccctcactgttagtaaggaagcagtatacatcaatgggaacagggcccatggaaatgtacaggagtttccctattttggtgttcagcttgaaaaaggacttgtcagaatcaactgtgtcatcaaaatttaagtaatgtgcattgaaaataaggttgatcatgggaatatgcagaatttccaatgtatttttaaatacaaataaaattgtaatttagaattttt

SEQ ID NO: 10230 - DNA, 1174 bp, Homo sapiens
tacagcaaaattaaatacataaatatatatatatatatatattttagaaaaaagaaaaaaacaaacaaacaaaaaaaccccaccccagttgacactttaatatttcccaatgaagactttatttatggaatggaatggaaaaaaaaacagctattttgaaaatatatttatatctacgaaaagaagttgggaaaacaaatattttaatcagagaattattccttaaagatttaaaatgtatttagttgtacattttatatgggttcaaccccagcacatgaagtataatggtcagatttattttgtatttatttactattataaccactttttaggaaaaaaatagctaatttgtatttatatgtaatcaaaagaagtatcgggtttgtacataattttccaaaaattgtagttgttttcagttgtgtgtatttaagatgaaaagtctacatggaaggttactctggcaaagtgcttagcacgtttgcttttttgcagtgctactgttgagttcacaagttcaagtccagaaaaaaaaagtggataatccactctgctgactttcaagattattatattattcaattctcaggaatgttgcagagtgattgtccaatccatgagaatttacatccttattaggtggaatatttggataagaaccagacattgctgatctattatagaaactctcctcctgccccttaatttacagaaagaataaagcaggatccatagaaataattaggaaaacgatgaacctgcaggaaagtgaatgatggtttgttgttcttctttcctaaattagtgatcccttcaaaggggctgatctggccaaagtattcaataaaacgtaagatttcttcattattgatattgtggtcatatatatttaaaattgatatctcgtggccctcatcaagggttggaaatttatttgtgttttacctttacctcatctgagagctctttattctccaaagaacccagttttctaactttttgcccaacacgcagcaaaattatgcacatcgtgttttctgcccaccctctgttctctgacctatcagcttgcttttctttccaaggttgtgtgtttgaacacatttctccaaatgttaaacctatttcagataataaatatcaaatctctggcatttcattctataaagtc

SEQ ID NO: 10231 - DNA, 3277 bp, Homo sapiens
ctgcaggtggagctggagcaagaataccaagacaaattcaaaagactgcccctcgagattttggaattcgtgcaggaagccatgaaaggaaagatcagtgaagacagcaatcacggttctgcccctctctccctgtcctcagaccctggaaaagtgaaccacaagactccctccagtgaggagctgggaggagacatcccaggaaaagaatttgatactcctctgtgaatgctcctgccaggccttcagaaattgcatggccactccagcgtcatcggactctctcttattacaaagatcactgcccaggaccatcttcccgagaagcatcccttagcctaaaatccacaccaaagggagagttccagaggaatccatgaagaattcccatgcccaggctccatgtgtcatgtggaaacctccacaggtctgctagtgaagaatgcatgtatgtgagatttttgttttctttccaatagcaaattcaaagcaagcaacttgcaggctccatggaacttttaatgaaggacagtgtcttctttgaagaaaatcaagctcgtgtttttattcgaagctctggtgtaaaatatttcaaagtcatagaaatagtttgagaaatgcatagcattatttaacactattgaacagccgactttgagcattgtttcttctaactgcccctcaactaccattatcttcaagtcaacatgcatattacattttcatcctttgctttgcaagcactggtggcttgcagtttgctaatttatttatcatagagtcatcaatgtatttgttgctgacatggttttattagatactgtagtgattcaaataagttttctatttgaaaaaaaaaatcacttgattgtatccttgcccagtgaagccatcctaagacttagcaatatggattgtacatttggctgcatgagcaagtcggccgcacacttccagacagtgtgctgtttgaattgactatttgcactcaaagtctgggtattcattggttattggcctgaaatgatcaaataactacaaatgatctgttgaataaaaatagttgagctgatatatgttaagcagatattcaatcagaatgaacaggttccggtggttattttgccgtttgacattttttatggttcatttatttttaatatagagaggaagattgaatatttatctagagaatacaaagacccacatgtaaatgataggtattatctccatgtatatatgtacccacttagtcatgtaagtgcatatacacatacacacacatgagtgtagacatgtgtttattaattgacaatgacccaaatctcttccacaagacttaaaaccaaattcagggacaaatggatagagaagaaaagggtcaaacatcgagattacatggatgttaaattatatggagacgctaagaaataattgatggagccattgatgcaaaccgaagtagatttagaacttatatgaatttgatttatattttgcaagatcaaaaattagatgttaagtatcagattttaagcttgttttaatggtcaaaaaattaggacagaaataatatggacatttattagtatcttccataatttttaagtctgacacatttctattttattctaacataaaaaaacttccattatatatttactaagtatatttaattcacttaactctgtctttataagttcctattttagatggaataagagaaacaaattatatcaaggtaaaactgatcaaaagcataattgaaagttctgaaaaaagaaaaataataatatgtagaaaaatgtaacttagagagtaacacatgaacattgaagttaaaacccagaagccagatgctcacagttttattttactttaaaataaacctgtctgactgtagctttgtgaaatatcttaaaacgcaaaaaccaattgtgtcctgaaaattgtttcaagaatttaatatttttatgaaaattattttatttaactttaagcaataactagagattacaattaaattttaatcaaaatgaaggcttagttcaaacataaggaaacagtgtttgattaaaaaaaacacatctagtaagacgtaaggggaaaatcacatcctctttggagatgattatattttgatctgaagggtttggggtgttcattagacacttaataaaacttaacttccaatgaaaaagaaatcttttgtaaatcattctacttttgcactttgaaagaaaggcgttaatcataaagaagcaagaatggtcaaaatcgaatgctgcatttttataaacaaaattacagactgtctgaaattgaagaagaatgaactaataatagcattcataaccaaacacaatgatgattattgcagaacattgtatcacattttagtccagagatagaataaagttgaataaccttgacttacacaaaactgttttggtagttggatttcattatcttagtgaatttagtcattttacaatatgtttgtatttggccatttactgtaatcacatttttatatctgtacaatgacactttttgcagttgtggggtagtgtgtaacactgtccatcttgcatcattgaaactactacaatgatactatcatttaataatattaatattacttgaaatagactaagataaagaaaaggggtctgtatgatgtgcagttttgtgcctttatgtatttgccttgttctttgtcgaatgtgtgaaattccgtactgtggtttttcctataatagaaagtagagctgtgtattaaattagactgtgtctctctgatacctttacactactgagaatagcatggttttggccatgtaaaccaattttcaaagttctaatgacatagccatgtgtttttggttttttatatttcattttaaaatttgagtatcaccatacattaattaatactcctgtagtagataagctgtcattaagtaattcccaaaaaaagggccatttgcttgcattactttgaatttaatgttgcgcttgtgcactgtgttaatattgtttgtgatggattggacgttgtgactcttgccttttaagaagaaaaaaaagataggacaaagtatttgaagctcttaaaatgtacatattttggttcttctatctcaaattatttaaaatgcataattcacatttttgtaataattctatgcaattttgtggcatgatgtttcttccacttgtaattttatgtgctttcatcacaaatccaaaggaaagaataaaaatttcttaacac

SEQ ID NO: 10232 - DNA, 1824 bp, Homo sapiens
aactccaaaatgcaaactgaagcagcaaacccacaaagcatcaaaagactcactcacaaacttctgaacacaaactccatggatgaaagctgtttattttgtttcctttatgtgtaaacaagatgatatctgaaaccagagagacttggaatgtctgactgacttctatttaacagcttgagtattgcatttccttggccaaacaaaaatagctacaaatccacaaaaatttactattccagtaaggcagagtccaaccattgataatacaacttaaacatgtttgctataaaataccatcacaagtaaatgagcttggtgtgaacaactctcctttgtgatgccttaggacatgtttgaactgcagcaaaaaacaaaaacaaaaaacagtgcattagcaatttcatagcaagtgcatgcactaggaaaagaaaactctgtctacaagtttattagcagaagtggtggtctgctagacaaataattttgcaaaatttttctacatctaagttacctcatcagtaagtgccatgtctctaccatgccatcagaggctaatttcctgtaaaagttgtggaaattgttagaacaatagaaaaatagagcagtgtatgtgtgccaaaactcatcattactcaaaggagaactgtgttaggcacatttaagaaagtttacatctgacattgctttataggaattgtttctgcagattccggatattataattcacaccataaagattgtgaagtggttattggcaaacgtttgtaaatgtgaccatgtataaagtatttatactctttaattcacactgttagagagcaaaatcatctaagtattgccacatgacaagattagtaaacaggaatactagaactatgtttgcatgatacacaagcaccaataaagactaatccatacacagttaacctaatgccaaataaatactggttaaataaatgtatggcacagaatataatttgactatcaagacttttagcataatgaaaaaccctctctctatatatatatgtgtatatgaattatgtgggcattcttgatacttcaagttctagtttgaaaaaaatacataactaatttaattttacacaaaaatatttatgcagattttcagaatttcatatcaggaaatgacctttttatgtctgttaaatatcaaaacaatttgctacagtgttaatctgcatggtctttaagcctgctgtagttgagttgcagacagtgcatgaaaaagtattccgctgggaattgagccatgccaccaaagccaagaggagcgcatggaaacccggtagtctagaactaatcagattactgattttagggcacagcaccagatgaattgttgtatatgcttgtaaaaattgattctgtgtgttcctctgaacaaagcggagaaaatgatgataccatcaatattgaaattaaacttccaacttctctaataaaaaattaaaacacgcataacactcgtcaagagtatttgctcccaagacacattctagcaaatgttttgcctttttcatatacatgatatcatcgttattttcaaagggggcttattaataccctcagcatgtttttcacccaaatgatgcaaaacatgcagattctagttgacttcagttgtaatagacttgtttttctcctatttatgatttgaagtggattctgtaaaatatctcttgttcttagtttccttatctgtaaaacagtggagttagactacatatcttttggcactaacatctcatgaaaaattatggttaataaaatatcaccacatttggattgccaattttc

SEQ ID NO: 10233 - DNA, 704 bp, Homo sapiens
aggccgttaggcaggcaccccctattcctgctcccccaactggatcaggtagaacaacaaaagcacttttccatcttgtacacgagatacaccaacatagctacaatcaaacaggcctgggtatctgaggcttgcttggcttgtgtccatgcttaaacccacggaagggggagactctttcggatttgtagggtgaaatggcaattattctctccatgctggggaggaggggaggagggtctcagacagctttcgtgctcatggtggcttggctttgactctccaaagagcaataaatgccacttggagctgtatctggccccaaagtttagggattgaaaacatgcttctttgaggaggaaacccctttaggttcagaagaatatggggtgctttgctcccttggacacagctggcttatcctatacagttgtcaatgcacacagaatacaacctcatgctccctgcagcaagacccctgaaagtgattcatgcttctggctggcattctgcatgtttagtgattgtcttgggaatgtttcactgctacccgcatccagcgactgcagcaccagaaaacgactaatgtaactatgcagagttgtttggacttcttcctgtgccaggtccaagtcgggggacctgaagaatcaatctgtgtgagtctgtttttcaaaatgaaataaaacacactattctctggc

SEQ ID NO: 10234 - DNA, 1097 bp, Homo sapiens
gtcatagcagttatttcttggggtaaatgctttgaggcccagggaccaatctttggagaaagtagatatttccatcaaagccaaagcaatccatacaccaagaacttgttaccaagaatttctttttgctttaacaactataaatattcttagctgtctagagaaaagatgtatgttattttgaaatgaatggtatgtcattctggataaatccccaagcccctttatgaatgtagtgaaatacatggcatgtgggttataaacgttgctgtcaaaagatttaccaggtctacaccattatgcttattatttttttaattatcctttttatttattaaatagagacagagtctcactatattgccccagctggtctcgaactcttgagctcaggcagtcctcccaacttggccgtcgaaagtgctgggattataggcatgagctactgtgcccagcctgcttattgaagatacatttctagtggaaattgatgaaacaatttaggttttggaaaaagaagtaatatttaatcttttaaggaaggagtttatttctcacatgccattataaactatgtgtattagataccttgggttgaatacacttttaacagccctagatcgatagccctagccctagatagatagccctagccctagatagatagctattaggttggtgcaaaagtaattgtggtttttgccataacctttaattgcagcaaaaaccgcaattacttttgctccaacctgacagctaggtatctagctagctagaaaggcagatagacagatatatagatgatagatagatagatgatagatagatagatagatgatagatagatagatagatagatagatagatagatagatagagatttattgcaaataattggtttacataattttgggccccagatggttaagtgctaaatttgtagggtaggctatcaggaagtgcaggctggaaacatgcaggagctgtccctgaagtccacaagtggaatttcttcttcatcatggaaacctcagttttgttcatacacctaaatacttcagtatgtctttcctaaaataaaaggcatccatttacct

SEQ ID NO: 10235 - DNA, 1220 bp, Homo sapiens
gtgtgcccacccgtgttctcctccaaatgctgtcgggcaagatagctccttcatgcttttctcatggtattatctagtaggtctgcacacataacacacatcagtccacccccattgtgaatgttgtcctgtgtcatctgtcagcttcccaacaatactttgtgtcttttgttctctcttggtctctttctttccaaaggttgtacatagtggtcatttggtggctctaactccttgaggtcttgagtttcatttttcattttctctcctcggtggcatttgctgaataacaacaatttaggaatgctcaatgtgctgttgattctttcaatccacagtattgttcttgtaaaactgtgacattccacagagttactgccacggtcctttgagtgtcaggctctgaatctctcaaaatgtgccgtctttggttcctcatggctgttatctgtctttatgatttcatgattagacaatgtggaattacataacaggcattgcactaaaagtgatgtgatttatgcatttatgcatgagaactaaatagatttttagattcctacttaaacaaaaactttccatgacagtagcatactgatgagacaacacacacacacacaaaacaacagcaacaacaacagaacaacaacaaagcatgctcagtattgagacactgtcaagattaagttataccagcaaaagtgcagtagtgtcacttttttcctgtcaatatatagagacttctaaatcataatcatccttttttaaaaaaaagaattttaaaaaagatggatttgacacactcaccatttaatcatttccagcaaaatatatgtttggctgaaattatgtcaaatggatgtaatatagggtttgtttgctgcttttgatggctatgttttggagagagcaatcttgctgtgaaacagtgtggatgtaaattttataaggctgactcttactaaccaccatttcccctgtggtttgttatcagtacaattctttgttgcttaatctagagctatgcacaccaaattgctgagatgtttagtagctgataaagaaaccttttaaaaaaataatataaatgaatgaaatataaactgtgagataaatatcattatagcatgtaatattaaattcctcctgtctcctctgtcagtttgtgaagtgattgacattttgtagctagtttaaaattattaaaaattatagactcc

SEQ ID NO: 10236 - DNA, 2928 bp, Homo sapiens
aaactcacttcctgaagcagcttgagctccaaagtgcacatctggttccaacttgcctgatgcttagctcatctgcaaatatgtgatcagtgccggtaatttgtaatgaatgaagcggtaggcaggttctaatttcttttaaccttttaattatgtacaggcaaaaatgcagcattccgcttttaactatctgcttaaaagagctaacgttcttattaaggctttgtggtttttagagttgcatctatgaacctggggagattatgtgctttcccaagcgttccaccaccctctcagttttgtccctctgaagataattttggatcaccttgaatttccttttggacgttatttgatgaacagaaataaagtgataacaagagttatttttaaacagaactcctcttaccccccaaaacagataaacctcagtgtacaattttgaaagaagttttgccttgtaatgagtaataatttagaaagtagacagtggttgtgtttggctctcgttttattccttttacatttgttgcttctgggatttaaaaaattactaaattcataagatagttaggtattaaacacttcagaatatcaatgtaaaattggaaaataaggaactgggggcatttgtttaggccatgacttctacaagcagatttcttttcttttagtttagaagacaaaaaatttcaatacagatacttcttttagaagtaaatttttagattttattgtcagtagaaaaaagttaaactcctactaatttaaactaagacagtttaaaaaggaagcctgaaaaagactcatactacaaataatttaattgatggcatataagaatatgcagtttgaaaaagccaaactcttctctccacttagcttttgatccccactgtttgcttatttgtataagtcatactgtgtagaatttctattttctttttccccattaaaagaggaccaaacaattctttatacaaatggagtagcaactagttttgtagcactacatttaatgtaatgagatacctttgttcatttttttaaatttgaaatatactttacctgatccactttgattgtatactatattctttgttaattttaattttgtcctgttcctagactgctagaatctggcccctggccatcttaaagtgccaacatatgcctgcagggtttataaaaaatggcctggagtgacacattttattatacctaatattcactgcatcagtatcacatctagctcccttacttgtccacagataatgtaaacaaaggagggaaaaacttattaaattctccttcgctgctggcttgtgctggtttagtgcctgtgtccctggcagtgtccagtgtgttcacttccagttgaagtatccatgtgtttctgggcagcttttctgctcagtgtgatcctgagatggcttccccgccgccacccagagtgtggtccttggccgcctcctgctcctgctctgcaagcctgaaactggcttgtctggagccaggagttagtcctggggtgtgtgtgtgcctgcgcacccatgcgcatgcaagtgtgtttgccagctcaggagctgtctcctctctacctggctagtaagaggtgggacagtaatggtcctcctgctggccccagcaaggcccatgagtgactgccctgacgtattcactgtgcctctgggccacttcttcccctgtagatgtgggcttgttgccttcagccggcttccctgagggaggagaacactggattattggaaatgttttaatcactcttgccattacctacatctattagcatagatgatgaaaagctgttactggtgattatagatgagtatttccaggacaacgttctaaaagtacaattatttcttattggggagattacaggtagtttggcaaagcattgaagtacaaaggtacattttcaattaaaaagcacacttctacaaaagatttggtttttaaattatggttacacatttcagtaactcatagctgctgtgcaaattggtagaccttataagaaggcacttgtttgtaagccagagaagaaactttaattgcatcctatcagattgttgaggtgggtgtgatagtcttcaggtgcagtgcgttcattcactaacgctcactgtcagtgcccatgtttgctagctgcctccatgtgactagtgagctgctggtgaaagtcgtgtgaaatcctgtacactgtgtatagaataatgtaattttatgttaattgttattactttaaaacatatctaccatctgattggctggtaccgagagctgtgggtaaaatttgaaaattgtatttagaataagaaattttacattttaaaccctattgtcctttatgcattttcaatgaaatggaatgaaggctaatatgcttgctttatttacttttgtaatcttggattttgtagcttttaaaactagaaaccattgttctaacaaagcaggcaactttattctataaacacaactttattaagcagaatacactgtagatgcttttccccaacgtatctggctggcagtctttgtcgttgttcattctggggataaaggggaactaggctagcagttctaatgtgacattctttaagcatatcttaaaatagtatttaagtaaatggtctaatttctacataattattgcactgaacttttttgtttattaaggtgtttaaataagctcagctaattcaagacactgtagccacttgtgcatcagtgtgcttgaatttagtagcttacagcattatttatgaaggaaaaaatacataaatatgaagtacctcatgttgaatgttattgtactgtatttttaatgtaacagtgcagatcttgttagacacatgaatgtgtataatcatgttaaatgcaaataaaactagttcatag

SEQ ID NO: 10237 - DNA, 1897 bp, Homo sapiens
gtttcctggtcctgaatgacacataaagactttgcgagaaagacctccctccttgcctcacaaggaatataaatggatttctcccccttcctcaggacaattttggttcccagaccagcttgattgaactgagggagacgttgttgtttttaatgtctccagcttggactgcagagacaaaaacatgattccagatttaagtctctcttcttccaagtattctactagaaatacacacacacacacacacacacttctgagaatatttttaatggcaataagcctgtgttttagctgctactgtgcagaccctttcagggattccaaccaaatgcaaatgagagaatttaaaatttttattcagtaagttcactatgtgtttacttattccatctgcagatgtaagtgagtgtggtggacagtagccaccttccttgttccactcataaaagcatcagctagatctcatctgtatcatgggaagttccaggcaggagggtaaagaaatgttgtttctaccatttgtcacatttggacgtttttcacagacaagtgtcaaaagacatagttaatgtttcgagggggaaagcagaactgatcaactgcgactagagacgtctttgaaggaaattttccttttcctcttgctggtctcctacagttttacagctgagcttttgaggtttggaaaattcaagatgtttgtttcataagaaaaggggcagaaagcaagcacaagacacttttaggtctagactaaaatggtagttacaacaatttgaaccttgttggtgcagtgcacggtgaatgcttaccctgcacagcctctattaccttaaggaattagttgtcattttcctattgaattttgagtaaatggtgaaattcagtgtcctttagaatcgactcccaagactatatttgaagaatgcattgattcaagaaggacatttaaaagcaaattctgactttttcaagaccaacacacttgtttaggcctattaaattgtactatcacttgttacatgccctctgaattgggagaaagtgggcttgcacactttgaggtaactaactgtaatttacttgtgttctctctttcttgctctccttctcaacatgaacacaaacctctatggaaaagtagcctcttgttaatctgatctagtttgtatggaaaaagcccatggagaaccttatctttaacaagctcccagagggtgcccagatttggaaattctagagagcagtggtgaccttttagcaaagcttctgtaacagttcgaatgagttgcagaacattccactccatcaaatgacactgtaaacaaatcacttcaagagaggcttggttttgtgtggcacagatggacccaagctttcatgctgtgcactgagatagaaactccacccgcagcgcctgcgatggatggagcagtgtgccctgatgctcaaagcgtattaaaggaaaaaaagtgatcagcatggaaagtttttatggggaaattataactccaagtgggtgcattggtttaaaaatggatcacaatgatagagttcttcatgaatgtttacaagttgtaaggaataccgttagtgaaagaggaaaagaagtgggttctgaaaatgcagtttcccatccaatgattttgataacaaaattccaacttttctcaatgaaactgatgcagtattatttgtgcaaataaaatgtgtcataaatatgcaaagaaagggagacatactgttcttatcttgaatatgtgcatttaaatgaattgtccaaaatgcataaatgccttgcgttctataaaggaaacaggaggtcaaaaagacagcgagatatctagtccttccacaaggtatggaaagcaataaacatcttcctttctttctg

SEQ ID NO: 10238 - DNA, 16 bp, Homo sapiens
atatttattcagtgtt

SEQ ID NO: 10239 - DNA, 3318 bp, Homo sapiens
caatcctcagcatcgcaaggcctctcctggctctgggggagctcgggaagatagcagcacacgctgtggaggagggtgggggtggggggaaggcaagtcccatggaaggacggggaatcctttactctaatttctccagctgcattttgttccgtttatctgcagaaaaagaaagaaaaaaaagaaaaaaaaagtttcctttaatttggtggagggacccatgttgacgcatctttcaggcattatccttgtaatttctgtcttttctcttacaactttgccccagggtcacagtggcttgattgaacactcacatgtgtatcctggcccctgtctgctttcttggttatttcacaaagctggtcacacagtggtttattcaaaggaaggggaggaagacagtggtttgataagctgcaggataaattttaggaatcaatgagcccagcagcagtataatccccagacagaggaggcaggatagaaaatgggcaaaagcctcggaaaccacttggaaaaggtctggacaatgaggtgaaaatattttcttcagggttcccaaggcacaatttgttccaagtggctaatgagaaatatggaagctgaattttttccagagcagagtgcagaggcataacagaagggtgggccctggcagccatctgggtctcttccttcctaaccatggtggcaggtgcatccttctttgacactgactttcagcagagcttacttggttcatgaggtcttcacatggagactaccagcaagaggtgactctctgctgcataactgtaaaggatggccctttgctaggtgttacagttaaaagctaagaaaaggggcagtgcatttaggacccaaacatatgcctatgaatatcaaaagctcctcctgaaattgctgtgagttttccataaaagaatatcctgtcttcacccaaggcttgacagcccacagagtggtctcatttgaaattacaggaaattagagcttttgcttgcagttctgccttcctggcctgtgtttaaatgctgtcacttgtttatgccaagttcaaggctgattcaatggttggtcccctcacccagaaaaccctgaaggggaggatacagctctgaaggggggcagcagtactaaaaacccaagatgccagtggtatagtgggcacaagggatggcgaccatgaggatgccaggcatcatcaccaatatctatcctagagccagtataaggccagatgcctacttcccacagcctccccgggttccaaagtcatgtcattgttttcagtggaaacatatcgtttgttgcatatcttcttaaatccatcttccttgtaagggctttagaactaaaacttacttatattgtttttccttaacagagggagaaaaatagtggattattatttctaaaataaaaggatgttctgctttctaaatatcccatcaaaatcttcagttttgcacttttttgatggaaaattcatcttatcttcctatgactttggttttagcctttctgaatttgttaccccttctggatggcttatttgatatactggaatagttaacaagctatacttcagcatatgcactatattctaacaaattttttttaataaaatcaagacatcagcaagaatgacatttacgtgacctcataatgtgggattatggccttctgttgctattccagtttgatatggaagcatctatatcctctattgccgttagatgttgttgcttttcagaaaagtaacgaaaaggctcattttaaagaatccaagaaacgatgtcatccaaatattgacagtttctacatttcatgccatctttataactcaattgaaagttgccgtcattcttgtgaagtatttgacaagtgcaatctgctagaagctcgtttttcttgtgactcccaaatgttagtgctacttagcctcagtaatgagttacagttgaaaaaaacatgagggaaacagagggacagagattttctaatgaacaatgatggaagagacctaatgtccttgctagaaacagccaggatggaaattatccagccctggcattctccttatcatcaatgacagtcattttattcatttatttcaaatgtgggtgggctagaagtggaaggagggaattctctctgcctaaaaattctagaagaatgaaagtaatctttgtatccaggaaactaagagaatgaggaataaatatcttcagcccgactcctgaatttgtttattcttccatctataattagattgtgttttcatttttgctttgtcatgctttttggttgttatttggctatacagttttatgctttaaaacaaatgataaagttaatttccaattcaatagtgaaatattaacaatctaactatagccagatcaaagacacctgaacacagaaaacctttatttgctggtgctgccattgcacaggctgtacaatgaaatagatttgaaaagctgattgattttcccgcacataaattctggatgtcaatttccaaccaaactccaatacagctatgtggcatgaagagttacaggagggagggaggaaaatagccctatgttagtcatgtttgcatacagaggatcaaagtaggccttcaccataatagttctaattaaaatggtcctcgctgtaggagagacaaaggggcttttcctctagctggtaactattcagatgatggacaagtcttctttcataaaagattacaaagaaggcatccgaatcactgtctgtgatactgggtcacatattaatcactgcagctaattgtaaatctttctatgaaacactgaaaagcctctttgtgaattaatacagttctgcttgatgcacttgatttgaaaagacatttctctgtatgtggcgcatgtcggctttgctttgaaaaataacaaagttagcagaatatgttcaatatattttcttggggaatagggtttttattacatgattcattaaggatttgccttaccctgacatttgtgatataaaggaaaatcagaaaaaaagtaattttcttgatcaagatatgtttttacttaatgcaaataaatgtagtctgttgcttgcaaggaaaaaaaaatggcttctgatatctggtataaactgctaaataggataatacgtgcctcttttgttaaaccggcatttaaatgctggactgcttctaaatctgtttgtttcttttcatctgtgccatacactaaaaaacaactgttgccttcatactatatttgttagagcagaatacaaataaaatttgtttgagaggataatgtg

SEQ ID NO: 10240 - DNA, 387 bp, Homo sapiens
catttgggatagtcgtctttaaaagacttggtgttatttacagtgtttgttttgataacatttggctgggtcattttaatagttagagatgaggaggagtaaaagtgaaatttttgtgaaggacttaaattatccagtgtttctttagccttggtgaactatgaaatacgaaggccttaattttgtacaataaacttttatttgtattctgtgtatataatgctttcttgattgacccatctccctatcatcaaatgacttctagtctagaacacacttaaggtttataaacttgtgtaataggatgcttttctagtgttactttggaggagctaattatacaacatcattgaaccattcaataaaagttaagtaaaattagatcac

SEQ ID NO: 10241 - DNA, 1045 bp, Homo sapiens
taaattagttaaaactgcaaatagaaagaaaacaccaaaaataaagaaaagagcaaaagtggccaaaaaatgcatgtctgtaattttggactgacgttttaagaatttgttaccttacagaagagcaagggcttaggggttggaggtggcagataaaagaggattttcaactcaaatcttgtttcctgctggcctggtctgcccacgagctagagcggggaaatgttgagctcaaatgggtaaattgagaccagaaaattattttttcaacctagagaatctcctcttacagggggatgcatataacagatcatgtatgtgtagttatttctaagtagtaattcttcccagctctttgatttgccatatataaaataggtgggtcgtatgtcttccctttagacatgatgttttctactcatttgtctctctggccaattgaattattaataaaaggtctgtattatcaaagagtattctagtatttttgttacttttaatatttgatgccttttggaggtaaagctgttgggggaagaagagtttttggacccatagatgtttggatgatgtctctaatttgtcatttagaaaaatctcaaaaatgatttcagttgaataacttgccttctaaatgatcaatttacttctcccccaattttaaagaagtatgtgtatatttaataggggaaggtagtttatggaaatatttttaatggaatagttttcccttaatatgtatccttgctggatattattcaagctgcaagtcatcaaaagacccagaaaaaaaaaagtctgtaggttattttctctacttctatttcaactttgaatttcctcttcctgtgcaaattcctctagtcaagtgtgatatatcaagaaatctgaggaggatgcaggttttgtggtcctgatgggcccacaagtttttctatatttaactggaaatatgctttgattttgtgttattaatataattcttttgatgtagtcatgagtttttctttgtttgcatataattaaaatgcctctacttaatgtc

SEQ ID NO: 10242 - DNA, 2505 bp, Homo sapiens
cgctgcacatccgcctttcccaccgccctccctccccagctccgcctctgtcctcgctccacgtttcaggcaggcacctagcaattccatcacccgtacaggcaattccgtcttcttaatctgaagcttcactcactgtcaatgattattttcattacaatggaaacaatcttttttactctatgccccaaatatagcgttcccaacaacatccatgtcctatgtgtgactctaaattctttatttctgtcattcaaatgggtgatatcctgaaaaaaaaaaaaaaaaaaaaactgggacagctttcccctcatttttttttttgtttctgagaaaagaacgtattttaaaagccacatagagtgactccaagaacaattgtccatggtctcaaacaaggggctgttacataacaagaaaatcaaagctgaggacagggtgtgagcgccacatctctgaaagcacaggagacactgtgctataaatcctttggggagcgatgttttgaatttagtgagatttaccagggatgtagattaaggtgatgtgattcaaaagatgccattcatagagagccctagttactgcatggggaaagagatccaggaagcatgagtgctggatattttactaccaatgccaagataattcactctactcagccggcgtggcaaatataaaacttacagagcgtggctgtgctctcaccagctgctgctctgagttatgttaaaatccgctagagcagcccaaatttttctcagtttgtatagagttcatcccagccccaattttctggggctcctcacatagctacccaaaagagaaaaaaaattaagacaagcctggcaacacacctggtgaagagtagtttactagcttttcaaacaagaatgtcccttttcctaagtcactttgaggtgtctcaatctgatctgagtgagaggcgacaggagtatttttttttttttacagctttacacacacagatgtgggctttgatttccaagtaatataatggaagagaaatctcatactcccccacagtttgatgtcattaatgtgttgggaaaaaggcctctgtcccggaagagtcatgggaggtgaaaggggcacgtttgaagatgcgagcgctatcttcacatagttctccagttgtatggagcctcttctgccaagagagggccatgcaattcatcccagaggaacctgaggcctgaaggaggtgagagaagacctctgtgaggaaagcacacagtcaccttctcggcaactaagcagtccctgagaccatttaacatgcaacccgaaggttatggtcaatcccaaaagtcaccactccattcccaactagacattaccaaagtgacctacccagagattgcttctcatccccagtcccaatgcacatccattcccaagaaatgctttgtcttcagcctctccaggcaccatctcccttcctgtgggagcagagagcttagcctggagcacctttccttcaagccagcaacacagagcactaggttcaattccctgaaggtggccactttaagagagaaatctgaaaaccccatttgctttcttttctcccatattggcatggatttctgtcttctctaacaccttgtgaccttctctatatcatgctttaaagtgtaataatatgattttttaaaagaaatttattacttgttgcaaaggtctttttaaaccagtttagatttcaagaaaaaataaatggaaatcatcgaaaattcatttcacattaatggtctaaaaataaaccaaaggacattatgtgtgcatgtgtgtataagtgcacacagaaatatatatacatatgtagactatatacatgtgtgtatatatgtgtatatatacatacacttgtataaatgtatatacacatatacctataatgtgtgtatgtgtatttattgaagaaacagataccatactcatttctaaaagaatattcagagaatatcaagatgattctggctgaaaaaggccagtggaaattcaggtgaaaatgttcatcaattcccattgcatcacctctgtaatttttcagctctctgtataaacattaaatgtcttatatagcagcaaaaatataaaatagttgtccatattttcacaggtgtggtgtaatttataaaattagaaagcaacttatcagctacttaagagaaatggcaagttttgatatgagtatacaatatataaaaatatatatagtgctatatatataaatatttggtctctatttcattttttgcatcagtattaatactaaaatatgtctcgctagtgatgtttttatgatatccctgatcctaactgaagagacagttatttatagtcatttattttaaaaaatgaaaataagtgaataataattaggttaacattgttgctccctgtgacaaaattttataagcaaatttcaaaagacatgttgtaaattaggaggctcaacaataaaacattatgctccag

SEQ ID NO: 10243 - DNA, 860 bp, Homo sapiens
attattcagtgccacaaattgaaagcttccatgtttaatgttatcctcttgctatataaataaagcaaatatatttaggccagggtctcactgagggggagctgtcttgtcatcttttagagtaaactattctataaacatatgcaaacagccctaaataaatctaaagtctaaagttttattgatgtgaaattaaattcttattggccaaatgcctgttttgatgagttgatttataaagatttttgttaagctcaggattttaaattacacagttcacaaacagtaaaggccatgtgaagagaattattacatctttattaacctcagcatttactttgtttcttttgcttaggaaattgctcataatctggttataattttggtccaaattctttattcttccttgagctaagcagaataatggaatataatatgtcttcataatataacaacactaatacactaatagtaagattaagttaggcagtcttctaccaaatgtgtaatggagattgcctcaaaattgtgtccacataatccacgctcatcttgcaaagcgctatttcaggcacatcattggaatacaggaagtagccctgcacctgccagtgagctcgccattcactgattggaagagtgacctggcatcttggaaatcattgtgtgtcttcaggagaatgtgcagtgtcttgtaacaactaattataatgcaaattagggctacattgtaatctgctttgttaatgaaaatgataaaacagaatattgacaagctaggacacctgtggtatctttaattgtatctccttcagaagtttgcttcttatggtataataaagtatggaagaatattgagt

SEQ ID NO: 10244 - DNA, 59 bp, Homo sapiens
acacaaacctcattgctgccccccaccaccctctggggaaaatgacgccttctccacct

SEQ ID NO: 10245 - DNA, 1007 bp, Homo sapiens
ggagcaagttgctatttgggaacattcagcaccttctcacagtttgggaacatatattgctgtttactccagtgtaaaaatgaggtgccactggatctgagtgctacacgaacacaagtagaagtattaatttgttgaaatgtgttgttaccaaaaagactgaaaagccccaaagtctagatataaagacctagacttcggcacgcgaaatcccagctatgctacctcttatttacctgaaaggaggacacgcaggatgggcagtcatgctggtgactcttgtactcccttgagggacattgggggggggggggcgtggtcccaggcaggatgcccagtctttgagctgagattggaaggcagtgaggctgagggtgccaagatttccccagggttcacccagaggggaaggggctacatgcccccagctgtgtgcagggaggacacatcagcccactaccgctgccaacaccaatgcctaaaacttgtttcatacattggggttttctatatatttcagctgggaaaagcttacatttaaccttttgaaaaaataaatacgtgattagcctcaactaaacattgctgactataaagacagtatattcaccatgtcgctggcaatatgtcattgcgtaacaccaaataaccccccagaagtagccagaggccagtttgaacatcacaattctaagtgttttagtaactatttctggcgtgagtcaacagatcatgtagatagagtcaattattgtttgtggagtttttcagctataggggaggggaactattaaaatccatttgtttctattcaataggtaataaaaattagttgtccctgggtttgggaaacttaaatgcccattacagccctggggaagggttttctgtcttatggagtgagtcttagcatttaagttatacagttgctgccttaaaatagtagcctgctacaatgacttctttgggtagccattttcataagaaataaaatacaagatatgagt

SEQ ID NO: 10246 - DNA, 912 bp, Homo sapiens
tgcgaatacagctcacagagaaacgcatgtgctattggagaacaggtctttgtggagatctaaaggcagtgattgatttcacagggagctctaatctctgtgattacatggtccttcaaactcccaaccaaagtgagaaaagcggcatgcagtgaaatgagcagtgagcagccctttagcaaaatcgccctccagtccttcctggagatgccttcagccagcatcccagactccacagttatttatgaatgatgtcgtgattctccctccacctgacagtttgtaagagtgaaagagcatctaacctgatgctcttggagagagataacctgtctgtcataacttaaaggatgagaaaatgtggtgtagctattaaagattcatgcagtcccaaaaggcactgtcctgggatgatgagagattataaggtgatttcataaaaggaatccaaccctgtgcccggccattgatgtgttgtcattgaatccaggaggatttctagggcactgaagttttgttgtttcttttgctgactttggttacagtcagaaaaaataaactagatgtttgtgtctacatgttctacctgttgtacctattagcatcttcctgcagggacttgggcccatggcctgggaggttggtttgggattggggttgttgggcagcctgccattcacctggcctatcctggcccttctcatgcccaagacagttgtttcacaggagtggaagtgtgggtgatgcaagtagaaccctctagatgtaccctgtgtggtctgcaggactggactgtttgctgtgtttgtggatgttggcgatagactgtcaattaggttgtttgtgatccaacaagaacatttccaaaagtatctaggtgttctcaaataaaaagctttctttgcacaaccc

SEQ ID NO: 10247 - DNA, 180 bp, Homo sapiens
aggcaaagatggggacaaggactaagagtcagaatgttgacactttgatgaaatggagtagagaaatgcattctgtaagtggtcaaaggacatttgactgtttactttctccacactaagtcttctccatgttttgtggccttcggttgtaataaacttggcttctttatacatctgtaa

SEQ ID NO: 10248 - DNA, 1082 bp, Homo sapiens
tagagagctatgaactttattgacattttgcaaatgaagttacttagggagcagataatttaattcatgatggaacacgaaatctccttgaaagcaaacttcacaataatggacgtagacttgctgctatgaaaacatattttttttatttatgaagactaaatttatattggtaaaatagccagtagaatatgaaagaaataaggttagtagtgaaattcattcttcaataaataaaacactttgaaactccggaggaccacatctttcaagacttctgatgggtcaaggaaaaagatgccaacatacccgtatttaccaagtactatgataatggctagagtataaaaatgttctttttaaagttatttattaagttcttcattggaagtttttttttatatctggttcactaccaccattttctgtttcctactttctcagtggtttcattgaaaagaaattagaaggggttaaaggcaggaatagcaaagagtgcaaacttggggtatgactgggggagagtggaacatgccttttccgcacaatattaattcctttttgtatcagaaatgttcttttaggagattatgctaccatacttacttcaaacccaatgactactgtcaaggacatattttcagtacataaatactatcattttcattctaaagaatattttcactgttccttctttcttaaagtcttatgtttcactctttaactcaaatgtattctttgttagaatttaccctagattcttatttaatgtctgcagtagactgaatgtttgtgtgcccccagaattctaatgttgaaatctcatttccaatgtgatggtatttggaggtggggcttttggtaagtgataggtcaggagagtaacagcgctcatgaatgggattagtgcccttatataaagagacccagagagctccatcaccccttctgccatgtgaaagggagaagacaaacatccacgaaccaggaagtgggtcctcaccagaaaacaaatctgtaagcaccttgatcttggacttctcagcctccagaattgtgagaaataaatttctgttgttgat

SEQ ID NO: 10249 - DNA, 666 bp, Homo sapiens
gctgaggatacaaccaggaaatgcaacggtgtcagattgtgttcaaaatgtctagaaaggcttgataacattcctgttacttttctagcagattttaacaaataatcaaggacattttatatgtaactctttagattataatttatttgtattcctgtctttgtcctttttcttgcactataaaattataaggtcataaatgttttggtacttgtagatgtttatgtgctttttgtatcctaacttttagaatctaaataaaatcagaggtaatgtattttggcagcttgtttaggtgagaatcttaatgatcataaaggaaataaatctagatgcagaaagtactggctaaaatattgctaatacaaatgtgatttcctgaggtctctgtgtgagtgtgtatgtgttttaagtgacttccttaagaggtgtttcctgaacctaattctcataattaaagtaatgtatatgcaggatcaaaatgaaacaaatataccttatcctaaagagctcataacaaataagttacctccactctataaactcagacctactttttgaagataactgcttttaacctctccttacaagatttttgttgttgatgtatttaattttagcccatgtctcaattctcattttcaaagaatcaatatattaatatac

SEQ ID NO: 10250 - DNA, 557 bp, Homo sapiens
tgtgttatcattgggcagaactggatcctgaaaaattcaagatgctaagcacctacactactttaagaatttggaactgaaacatgaagaggaagacagaaataagaatttgggaacctgaatagctctgcaaaaaacaccaaaggaccgttttatcgttttctgttgttgctgtggtggagtgatgcagtgggcactgccggtgggccagggggcgggtgcgcatgtggtagaaggtgtgcgctcgtgcctcccccacagaaaggctttgttggtttctaccacatcttggcttgcttttggaacaggctggcccagcatcatttgtcatcaagtccactgtggtgtattctgcgtgtccatggcgggggttctccaatacactcacactgtccatgttctttttattgccagggcccgtgttgaagtgtcaagagagcaatcatcaatgataatgtattgtgtgagacctttgcatcttgtaaattttctcttttttctaaaaataaataataataaaatcctaaatctcaacaaaccactttattatcaaacaa

SEQ ID NO: 10251 - DNA, 103 bp, Homo sapiens
gcatgcaaaaataccaaggaagaacttctcttcgatgataatgtcgagtggaaatcatgcttaatctgaagattaaagtaaaaagtatccaatatttttactc

SEQ ID NO: 10252 - DNA, 1756 bp, Homo sapiens
gccgccgggtgcccacagaggctcagctccttcttttctgtgcaatacgagacccggccgcaccccgagtcacacaggcccccggggccacggcgttcgtctctcctgtgctgtcctcaggcctccgctcctgttttggtggcccaggctctcccctgacccatcctcgctcccccacctccttgggtcatgcccacccaccctttcctgcctcctccgtgtgaagacatccaacatccacgtgacttttccagctccatttttgaacagtgactgagattctagaaaaactggctgctaactggcctgagccaggcaacactgattccaatccctcctccttttttaagttatttgatggaagactcacctaatttgtgacctgagactgttgaagaaatagagaggagggggcccgttgattacagagagcatttgggattttgtttggtttggagatgatgcctaggttactgggtttggggggattgttttcttttgggggccttccccttttactccttttcttccagagatcaagagcttctcttgcatcttcttccactgggctctggattaatcaattacccaaaggctgcacctgccgtgttgtctgggcttgcatcccagatgtgttggagtatgcatggatgtagtgctttttagaggagccactgggcaaggccaccaagaacaaatgcatgacattttatagccaaggacgcctcgctaaagtcttatgggcgtcccctggggttgggggggcacaaggttttggaggaagaagacaacttccctcattccatcatcaccatctctttctcactaggttctttctagttttcaagcaatagttctagcctgccttggacaagggggccccagttaaacaaactacccatccatgagctgccaggcagtcaaaaacagaagcttccccgacttgtgagtccctgagatgtgctcttgttgtttggcatttggggtgacagggagtgacccagaggccaccactgcttttcatgcaggagttacagacactggtttcttggaaaatggagagaagcgcactttgcacagacgtcgtcaattaagtcccaatttgccacttggtattgagtacactggaccctgaccactggctcttgggcaaacgtccttcctcacggggcgcctccgccaagccggcccagctgcacccctcccttcctggagggatggccagggaaggagaaaacagagaactgacacctttgaaaccacagaatgtgttacatgcagactcgctcaagggcataagttattgtgaacgtttttgccaatcactgctcaacagccctgctagattttgtatgatgctgaattattatgcagactaattccacccagttgagacacaccatgcttgttcacttgtatttattgaaactgtggattcttgcccgtgctgtcccttgtatttactttaagcactgatcacttatcattcattcggtatggttttccctgtcccttgtacacattctggtatgaatttgtaaaaataacctgctacaaattggttgaatgtttctgtctgtggtgcgaaccagcattaacggatggggcacgtgcccaactgaggaacaggagaagaaatcaccaatttgggctctcagagctaagacacacttattgattctgttgcacattttgcactggtttatggcgattgttttcttggacggatagtgtaaaataaacttctctgttctct

SEQ ID NO: 10253 - DNA, 1520 bp, Homo sapiens
aagacaggcgggacttcccagtggtgcatccaaaggggagctggaagccttgccttcccgcttctacatgcttgagcttgaaaagcagtcacctcctcggggacccctcagtgtagtgactaagccatccacaggccaactcggccaagggcaactttagccacgcaaggtagctgaggtttgtgaaacagtaggattctcttttggcaatggagaattgcatctgatggttcaagtgtcctgagattgtttgctacctacccccagtcaggttctaggttggcttacaggtatgtatatgtgcagaagaaacacttaagatacaagttcttttgaattcaacagcagatgcttgcgatgcagtgcgtcaggtgattctcactcctgtggatggcttcatccctgccttccttcctttctttttccttttttttttttttttttttttttttacaaagagccttcatgtttttatatatttcatagaaatttttatagcagttgcaggtaaactgtcaggattggttttaaaatatttttgtaactttaaaatattctataattatgcatgtgattttaacatttaatattcaaaaataaatctcttgctggatttgagagtattgcatttttaaagtctctcttctgtaactggatgttttggcaactttgtggggagagactgctggatttcttaaagcaacgtattcctgacactggccacagaatgcctttggaaatcggatgtactgttctcttgttcacgtttagtggtgttttgctgttttgttttttaaacaaatgatgctgagaataaggagagaaatgaatgtagagagaggtagagagagaaatatgaactctaacaaaggactgaggagtgcagtctgctggttcaggctcttcaaaagatgtagaaaaagagatagaaggaaccacctatgcttaaaatactgtaaatatgcagtgaggtttggcaaaatctattccatgtgtgatttgcttgtagaaacaattttgaaagccccttgaggaaaataaaaatcaagaagaacacttttctcccttttccatacaaattaaaacttaacagcatcaaattattgggaccagaaaccaagtaatgtataatgtggcttttgttgagttaaataagatgctatataatggagaagaatttgaaaatgcacaaaaaaatcaatctacattatcagaacctgcagtgaaattaaacttatgttaaataaaaccagtttgcaggtgcacaaactatgagggtcttgtatccacgtaacacaggtagttacaaaaacatgttattgtactgtgtaaagatgcatagtcatctcatttggttggctttgtaccttgtaccttttttagccttggcttttgttgaactagaaccctcagcacatactgtgttgtacttttgtaaatgattttttaaatggaattttgcacataatacattgtaatactgtatgataatcatgtgtgaaaataatttttgaaatatc

SEQ ID NO: 10254 - DNA, 492 bp, Homo sapiens
gaagaaatccatcataccattacctcatcctgtgaggcctgaagacattgaataaccctgggcagtggttcttaggcagatactctagatgctttatggacaatattattttcattggatgattctggagctctattaggagaaaagtaatcattttaggtcttaaagacttcaagaaaatacaggttatcaatttattttaaatctcattgtttccagttagcaatatcatacctattaaagctgttcattgtaacaaaattcaatcaaaaaggcagctaggtcagaaggaaacataccactctcatggttcatagtattcactgtatgtatgctagggaaaagacttgctccagtctcctcctcagttctgtgcctgagaaccactgctgcatatatttgtttttaaattttgtattgaactgttaattgaagctttaaaagcatatatgaaatgtataaatctaagatgtataatacattattgactct

SEQ ID NO: 10255 - DNA, 295 bp, Homo sapiens
ttgtaggcagggtctcccctttatggttttcatttatttagttcctggaaacgcgctctgtagaaatagaaaagttctctgcagcctggtttgacagcgaagccagcccctggtggttttgttcattcctttccttccctgacttatgcctgtagttttctatcatcccagtaggtggcacacggccgtgtgcctctcttctggggcaggctcgctttacaaatcccaggcatgttcctgtgcagaataatccatttcagcaataaaatgagatcatagtgtgtaaaacttgttt

SEQ ID NO: 10256 - DNA, 1146 bp, Homo sapiens
agcgcgccctccaccccggcccccgaactgtgccttcgcttggagacccacaaagagagtgcgccctgcactccccgaacccgagtccgcgctgggggagcctcgcccccgcccccaccgggtgaaagtgtcgtctccgcttctctcggtgtggcgtgacggtaaccccatactctccttttgactccttttggaacccccacttttacgttgtgtccctccgcctcccccatggcgcaacaggagtcagtctctttctgtacaagggagaaaagctgtacgcgtttgtctcgtggttggaagcctccccttggcggggagaagctttttttcttgctagtattcgctgtgttcatggtctagaaatgcggtctggtctcgcctcgcctaccaatctctgctctctatgtatgtagcgtacgggttgttttgggtgaatcttgaggaataaatgcctttatatttcacaggctgtaaattgaacttcccacacgattagctttattatggcttgtgaactgctggagtctggctttacctttttgtatgtgaacaaatcaaattgcttaaaaaagagttttctttagtatagccacaaatgccttgaactgttgtctgggattgttttgtggggggagggaagggagtgttccgaagatgctgtagtaactgcctcagtgtttcacgtaagactttttggtttgatcatctttgttgaggtaggactatcagttccctctaaatgtatatgttgatttatgagtaattgttatttattctttatttatttatattaattatgaagattatgatattatttgattgcagatttttttggcgcgctgccccctccccaccctgccactcttgacattccactgtgcgttttagaagagagcctttttctaaagggatctgcttaaagttttaacttttatacctatctgagtgaattacagacaacctatcatttattctgcttcgagggtccccagggcccttgtacaaccgacagctcttacttttaaatgcaatctcttttctacatacattattttcttaattgttagctatttatagaaagcttcaatagaactgtttcaactgtataactatttactattcaaataaaatattttcaaagtc

SEQ ID NO: 10257 - DNA, 42 bp, Homo sapiens
cgtgctgtgacattggtttcaaataaagtctttaaacaaact

SEQ ID NO: 10258 - DNA, 487 bp, Homo sapiens
gcttttgtaaagctttcccaaatcctttcatcattctacagttttatgctatttgtggaaagatttctttctcaagtagtagtttttaataaaactacagtactttgtgtatttcttttaactgtgtatatttctactgatctgatctcactgtttatgttgctttccaaagatgtatgttgcataatacagtggatctgaatttattattgcttataaaacacatttgatggaataggagtactggtttttcataatggttaaaaatgaaaccagctgtggatttcaaaacacagtgtattctagatcatctaagatccatgctgatttttattgcacaagaattaggtttgaactcgagctggaacctcagcaaactagagtatatattgttcagtatttctttggaaacatttcattaatgtacttgtcttacagaaatttctgaactttagtaaaaaaaaataaagttaaacttttaaaactc

SEQ ID NO: 10259 - DNA, 1179 bp, Homo sapiens
actgccgtaccctcctcacaatccttgctctgacgtggcctccttcgctctgccagcttcaaatttcttttttgtcactcccttgtccgtctccgtctcgcctctctccctgtttccttcccccctctttctttctcactctccctcccttccctttctctttcccttcctccctaccttccaccccggctttccccgaccttccagggctccctctgcccttccactctcttttccttgctccgacctctgctccagtcccgcttcttcccccgtctcctctttctagtcctctatatgctatcagccctttttcctggtccatccctgtcgttccttctctctctgtctctggttctactgtcaagggccctagttccctttgttttactgcttccccaaccctccctcagtccctgagagccctagagccatctcggtgacagtcccttctctggcacctgggactttgtagccttcactcctctgagcccaccagccctaatggaggggggctcaaacctaggaagtggacagaaaagccacagcctttattttgtattttttttgtaataacaaaccctaaaaaaccctccatgaactgtcctctcccgtcgatccccgcagcatattgtctggaaatctgttttctttctcagagcccagtggccgccgggcttctcttcccttctgagatgatgtcaccccaaagaagactggggtaggagtagggagcacaggggttgttggtgttttcagtgcttagaaaactgggttgtcctgcaggtgtctcctcccacccctccactcgcaacacttgctagggaatccgaccagtggtaaacacatcagcactttttggtgttcaggggtcagcacatttgttaatttaaaccacagactgcttccaggtacaaaggttcatttggacttctggtttgcaagggatgagggttaaaaaaaacaaaacaaaacaaacaacaacaacaacaaaaacaacccagaaagtatcttctagagccagccgcaagagctgtgagctgcttccaagttaggcgagctggtggtggtaccctggacataatgcaattctgtagtcagagcaatatccctggcgagagcctgacatcgcctgttaaaggtggctgcctctgaataaaggaaagcgtctgaaaggtg

SEQ ID NO: 10260 - DNA, 27 bp, Homo sapiens
ggagcccttcccctacccaccctgcgt

SEQ ID NO: 10261 - DNA, 307 bp, Homo sapiens
tgggggtggcagaggtctctttgcttcattcagccctagctctgtagagaaatgcaaacctcgactctcaaggatgtgaggaacacaagttcatttctgttgttgcggagacactgcagactccactgtgccgaggttgaactcttttttgttgctcaagttctaggagtccctttcctgaatatatacttgtttgtcatagtttccttttcaaagtagtaaacttttctatttttctacttgcccagtagagactctgattctggaaattctgacaaataatttaataatacacatgttgcttctt

SEQ ID NO: 10262 - DNA, 2604 bp, Homo sapiens
gagcttcaagcagttcccatcctgttagtctgcgtgtgtggtagctgaactcaagatgatgtggggctaagaaaaataattgtccatgtgcaaagatgtgggcaagaatggcctctgcagattttcctgaacttctgctaacttgcacggctttatcacagcatttttaaagctttccctcaaaaatcctgatctgcatgatctcagctactttattgacaaaaaggcagtgaacataacctcacttaattctggtgtagggtgtatgtgctaatcgttctaattcttgattacctagtttatagataactgctggtcttaattgcagagtacagagaactgaaccagctcctgatattgtagttagcagtcttcctggcttctcactctgccttatatttccatgtgggtttacttctctcataactactttcaaggtatttttcttccaagctgaaataaaactggggccacatattttcagtcatttcttccctgttgaattgaagcaaatcagattttctgtggggaccctcaaatgcaactgaagaaatagattgttgcattcattcctccccaccccccatttgtaggcagtaaacaaagtatgactgacagattgaacacctgcaaaactgctagcgtaatctcagcacatacgcagctaggaagtttgtcataaaatcaacttagaaatgagatgaggctgttcagtttgtcttaaaaaaatcagattaggtaaaagctgtcctaccaaagagtctagcaaaacaatatagtatttttttgcagaggcatgaaaaattaagacgctttagagtacttgaaagttgtgtagtcattttatttgcaaaatgaggtgactgtggcaaattatagaacacagagtattattacttttgccaggtttttctgacttgatttctgtaatttccagaaacccagacttctcatttccacacctagagatggaaacaggcaagtaactgacatgtctatttccttgggagcatgtgagaacatagcagtagggaccaaaagtctcagcacacttacctccgattatgccttaaagagttgattgtgaagaaccagtaactttgtcccaaatgcttctttggctgtttcatgcaggacttaattattgcttttaaaaattcacaatgaaaagacgattctgctgtatttgttaaacgttgacatttggttctagggccttgagtatgtgccacgtgcttgtgaaatgctatgattcacatgtaacatttaaacattaatttaaaaagggaaccttggagaattcttttgttcactagttccttttttctctacatttttaatttattaaacttgctgtgaaaacactttgattttctaagaggaaggtactttaagttccagaatgaacatgtagctgcactatgccagaaattaatgagggaagactttcttcctaagtgcttatgttttaacttatgttagtgaaaccactacaaggtgtttcaggcgctgataacatgcttcacacctgcccttggaggtcacagtactaatttacttcaaatttagttatgacagtgtcactgtatcctagttatgtttacagcacaaataaataatgactgtcatacatccagaggagaccgaacctgcccagctgatgtactgttttatggaataaagtcacttgatcagaaggaattgaaacaatagatcattttgttacctactggagggatttttgtcttgaatttgtttccttagaaattctacaaaaaaatgttgttaataaatgtctgctttgtaaaagcagttttgcaattttttaaagatctatttctgttataatttaggttctgcagaaatatgattcttaattgaaacatataatttgcttaattacgtgaataatgaaatgtaaaatccgggtccataagcctttatttcatacagtcctaggattaagctgtttaactgcttggatcccagttggtctctggcagtgggatcctggagaggagaaatcctggcctctgctcatgcgcaggccacaaccgggctggaagtgcggttgagctctctgccactttcttcaatgtaaaaagtaggcatcaaagatacgacttctactatatacatttctctgtccctgagaacagagaaacgtaaccctgtaggggactggttacagaggacctcctggagcatctgccccattcctccaagtccaagcacagccatgctgagtggaagcgaggccaccatctgagtggattggtcccaagtgtgtaatgaggaaagtggccaggtgccggcacagtgcctctcccagagcctcaagaagggccatttaggagcttgcttcaaccattttccaaccattttctgtgaaatgctgtcagcccaaactccaaagggatgtgcagcctttcgttttaccaaattctttgctgtcgtttggaaaaaatgggccatgtggtggagacctttatttaaggtgatttttacagaaatgtgattttgctgtaggtgattatccaaacaagtaaatttgagtgtataatttaatttttaacctgttaaataaaccttgtccctccaagg

SEQ ID NO: 10263 - DNA, 51 bp, Homo sapiens
gggctcatatgattgagttgtgcactggctgttattaaactgtaaaggatc

SEQ ID NO: 10264 - DNA, 104 bp, Homo sapiens
tggtgttttgaggcatccctccaacctctgtgactactttatccatgaaaatgaagcaatggcaggtgggaggctcttcccaatgtgctttcttcatgcatgcc

SEQ ID NO: 10265 - DNA, 1027 bp, Homo sapiens
gcttcctgcgaatggagggggagcacccggggccaggtctgtgtggacgtggaggaagcaggcataccgcatgatgctgtacagtacaaatgattgccaaatgatgccacgaagccctgggatttcctacccatggatttattttgtttttatcctttaatttcatgttcacagcactgtgtagagcaccagacagacgggcactgctaatccttccaaaggaaagctccaaagatcccagcccgcaaggctgtctctggatggattctggtggatgaatggcaacgcggctctctgcagcctgccagtgcccagagtgccaccgcattagcaatatacaaacagtccaaaaaagtgtttattttttatggaatacggtgcaataggcagaggacaagggacacatcactcttctgtctgtggccctgctggagtcctttgtgccccccggagtccacacgccttccctgcaagacgagaatggggctgggaagaaagaggcaacaccacggctggcaggagccccgctgcactgctctgcagacccattggcctgaccctgagaagcagagccagcaaagcccgggacctgcccctctttctttcccttcacaccaccccagcctcaggatgtcaagccacctccggaacgtgtctacactccacagctaccccgcagcaatacgcactcttgggacctcgctgatctaggatggggaggcaggccaccgcccctcccaagactcctcaagaaagagccccgcggttgctccggaaactcgaggcactgcagctatgggcactgcctcagcctaaagacacaggggcgcctcccaatcaccgcgctggcggatgctcaccccgtcataagcagaaactagtgatcctggaaatgagatgggccttactctgtcgactaaatgaatagctattttcttgtcattttttaaagtgcaactcttgcttcatgctgcttaagttaccagatgaatgctgagaaataagtaatcacagacattttaatacc

SEQ ID NO: 10266 - DNA, 214 bp, Homo sapiens
cccccgcctcttcagcaagaccacagccatgacaaacaccaggatgcatgctccttgtcccctcccacccgcctcatgacccagcctcacagaccctctcaggcctctgacgagtgagcgggtgaagtgccactgggtcaccgcagggcagctggaatggcagcatggtagcacctcctaacagattaaatagatcacatttgcttctaaaatt

SEQ ID NO: 10267 - DNA, 1127 bp, Homo sapiens
tggccgagccatccctgtccccgtcagcagtgtctgtgtgtctgcataaaccctcctgtcctggacgtgacttcatcctgaggagccacagcacaggccgtgctggcactttctgcacactggctctgggacttgcagaaggcctggtgctgccctggcatcagcctcttccagtcacatctggccagagggctgtctggacctgggccctgctcaatgccacctgtctgcctgggctccaagtgggcaggaccaggacagaaccacaggcacacactgagggggcagtgtggctccctgcctgtcccatccccatgccccgtccgcggggctgtggctgctgctgtgcatgtccctgcgatgggagtcttgtctcccagcctgtcagtttcctccccagggcagagctccccttcctgcaagagtctgggaggcggtgcaggctgtcctggctgctctggggaagccgagggacagccataacacccccgggacagtaggtctgggcggcaccactgggaactctggacttgagtgtgtttgcctcttccttgggtatgaatgtgtgagttcacccagaggcctgctctcctcacacattgtgtggtttggggttaatgatggagggagacacctcctcatagacggcaggtgcccacctttcagggagtctcccagcatgggcggatgccgggcatgagctgctgtaaactatttgtggctgtgctgcttgagtgacgtctctgtcgtgtgggtgccaagtgcttgtgtagaaactgtgttctgagcccccttttctggacaccaactgtgtcctgtgaatgtatcgctactgtgagctgttcccgcctagccagggccatgtcttaggtgcagctgtgccacgggtcagctgagccacagtcccagaaccaagctctcggtgtctcgggccaccatccgcccacctcgggctgaccccacctcctccatggacagtgtgagccccgggccgtgcatcctgctcagtgtggcgtcagtgtcggggctgagccccttgagctgcttcagtgaatgtacagtgcccggcacgagctgaacctcatgtgttccactcccaataaaaggttgacaggggcttctccttc

SEQ ID NO: 10268 - DNA, 1489 bp, Homo sapiens
gcacaccctgccttggcgggaccagcgggcatttgttttcttgctgactttgcacctccttttttccccaaacactttgccagccactggtggtccctgcttttctgagtaccatgtttccaggaggggccatgggggtcagggtggttttgagagagcagggtaaggaaggaatgtgctagaagtgctcctagtttcttgtaaaggaagccagagttgacagtacaaagggtcgtggccagccctgcagcttcagcacctgccccacccagagtgggagtcaggtggagccacctgctgggctcccccagaactttgcacacatcttgctatgtattagccgatgtctttagtgttgagcctctggattctggggtctgggccagtggccatagtgaagcctgggaatgagtgttactgcagcatctgggctgccagccacagggaagggccaagccccatgtagccccagtcatcctgcccagccctgcctcctggccatgccgggaggggtcggatcctctaggcatcgccttcacagccccctgccccctgccctctgtcctggctctgcacctggtatatgggtcatggacccagatggggctttccctttgtagccatccaatgggcattgtgtgggtgcttggaacccgggatgactgagggggacactggagtgggtgcttgtgtctgctgtctcagaggccttggtcaggatgaagttggctgacacagcttagcttggttttgcttattcaaaagagaaaataactacacatggaaatgaaactagctgaagccttttcttgttttagcaactgaaaattgtacttggtcacttttgtgcttgaggaggcccattttctgcctggcagggggcaggtctgtgccctcccgctgactcctgctgtgtcctgaggtgcatttcctgttgtacacacaagggccaggctccattctccctccctttccaccagtgccacagcctcgtctggaaaaaggaccaggggtcccggaggaacccatttgtgctctgcttggacagcaggcctggcactgggaggtgggggtgagcccctcacagccttgcccctccccaaggctggcaacctgcctcccattgcccaagagagagggcagggaacaggctactgtccttccctgtggaattgccgagaaatctagcaccttgcatgctggatctgggctgcggggaggctctttttctccctggcctccagtgcccaccaggaggatctgcgcacggtgcacagcccaccagagcactacagccttttattgagtggggcaagtgctgggctgtggtcgtgccctgacagcatcttccccaggcagcggctctgtggaggaggccatactcccctagttggccactggggccaccaccctgaccaccactgtgcccctcattgttactgccttgtgagataaaaactgattaaacctttgtggctgtggttggctg

SEQ ID NO: 10269 - DNA, 2564 bp, Homo sapiens
ccatgcgccgaggcacttccaggcttcactcaactcatggactcctctgtactcactctctccaccactcccttcacctccctctttgattttagaagctatagacattgtttaagataactaagaatacttggctaagaagtataatttgctaactattaaggactttctttttttaatgttgtacactattcttcctactcttttttggttttggttttgttttgtagagactgtctcactatgttgcccaagctggtctcaaactcctggcctcaagcagtcctcccaccttagcttctcaaagtgttgagatcacaggcgtgagccactgcacccggcccctactcctttttctaataagctgtatctgtaatcacagcattcctacagttgttacagtgtgttttttaaatgaaagtaaacatggttacatttgaatctcttaaataagcagtcacttggctggacaggaagaaggtagatcctgtgtgtcttgttttctggtcatgtgtattgtacaagctagagagctgaatttctgagatacacattttcaaatcacatgcaagtgaagatgatggtctgtagaaattttcagtatatataatgtttaatgacatactaatttatcatctggctatttgggaaggaaggacacacatggattttgcacatttccaccatggtggctggtgtggcttgtggctatggggtgatcaccagtatcaccactttggaaggggacagtgaaattggggctagagaaggaactttgtacagttttccctgagattcagattgactgaaaagtcacatgaagagttgattgtcttttaatggtatgttttaaacagctgacattttaaattttgatgaaatccagtttattcgtttgttcttttatgctttgggtgttgcatccgagaaatcttttcccatcccaagatcacaattttttttcctttttacttctagaagtgttataattttaagctttatactttggtctatgacccgtttttttttttgttttgttttgttttttcgtttgtttctttgttttgagatggagtcttgttctgtcacccaggctggggtgcagtggcgtgatcttggctcactgcaatctctatcccctgggttcaagtgattctcttgtctcagcctcccaagtagctgggattacaggcacaggccgccacgcctggctaatttttgtatttttagtagagacagagttttaccatgttggccaggctggtttcaaactcctgacctcaagtgacccaccttggcctcccaaagttttgggattacaagtgtgggccaccgcggccagcctatgatccattttgaatgaattttttatatggtgcaaggtgtcaatccaccttcactttttcttgggaatatagatatccagctgtttcactaccattttttgaaaggactgccctttgctctatcacctttgcatttttgttaaaaagtagttgtcaatgtatatgtgggtttatttcaggactctgttttgttccattgacctgtttttctctcctgaatgccaataccatatttgtatgtagtgtatgtaattttctaataattcttgaaacagatagtattaatgtgtcatatttttgctgttgtttgtattttttgtagagatggggtttcaccgtgttggccaggctgtgttgaactcctgagctaaagcaatacacttgcctcgtcctccccatgtgctgggattacaggcgtgagccttggtgctggcccagtgtaccacatttctttttgagatttgttttggctatgttaagtcctttgcttttgatgtgaaatttgggaacaggcagggtgtggtggcttatgcctgtaatcctagaactttgggaggcctagatgggtggatcacttgagctcaggagttccagaccagcccgggcctatggcaaaactccgtctctacaaaaaatagaaaaaattagccaggtgtggtggtgcatgcctgtagtcacagttacacggcaggctgaggtgggaggatcacttgaaccccagaggtcaagactgcagtgagctgagatcacaccactgtactccagcctgggtgacaaagtgagactctatctcaaaaagaaattaggatcaatttgtcaatttctacaacaacaacaacaaaaacccctgttgggcaccttgattgagattgcattgaatttatataaaactgttgggagaattgacatcttaataatattgagtcttctggcctataaacaaggtctgtcttcctaggtattaatgttttgtcttctatttctcttaataatcttttgtagttttcagtgtacaggtctaccatgtcagcatttcatagttttgatgctaaatggtattttaaaatttcaaattctaaccacttgttgctagtaaatagaaatacaattgatgttgaacttgtatccttcagccttgctaaactgtgagttctcatggtgtttttgtaaattacatcaacagtcatgtgttctatgaataaagagttttactccttc

SEQ ID NO: 10270 - DNA, 190 bp, Homo sapiens
cttcctctcggctatcactcacccctgtcctcagagtgataaactaagtcacatacagataaagcactgaaaacaccacagtgaccctcccaccccccaccaatatgtaattctattaatagaaacagctgtgtaaagaagtctaaaattttcactatttccaatgataaactcttcagtgctcttcttg

SEQ ID NO: 10271 - DNA, 82 bp, Homo sapiens
ctgctttgaagcctgaagccatgaaaatgcagatgaagctcccagtggattcccacactctatcaataaacacctctggctg

SEQ ID NO: 10272 - DNA, 474 bp, Homo sapiens
agccccccgcccttctgagagttggcgggtcactgaggtgcattctgggctccagggacgccactgcggggcaaaggcgccgttacctggagtctgcatcatgggtcttgcttgcctgctgccctgatggcctgagcatcccccagatccaagcctgggggatcccgggaaagcgatggacagacagacgatggggccgaagccccaagctgggcacaaagtagttttttacgtggtgggtgtctttttgtaaaaaaatcttccttgtccctgggctctggccaaccctcagaaaccctcacaataaaccagaccagaaggatgtcccatctgaatgcccagacctctccatctcggctcttccaggcgtctccacctactgccctcccatctacacttgactgtagactggtctggcctgctggcctgggcgtcagggcgcatcaataaagtacttggaccagttttgtgctc

SEQ ID NO: 10273 - DNA, 1465 bp, Homo sapiens
gaacatgacttttggcatcattcagagccaggtttgaatcctggctataaaactcaagggactctttcccctgcacactgtagatgactaggacaagaacaatgacctctctgggccacagtttccttatagacatgatgaggatctggtgggtgtttccaccaccacagctgttgggaaagtgatttgtgagcagtaatgtcatgttagttgtgacagtactcaggtgagtaacaccagtaccacctgccgggtgttgtggcctagctgtgtgctaagtgccatgttgggctcctcacacatgatcgtgtttcgtaaggagccagaggcagcatagtgaaaagttaggagcgtgggctctggcatttgactaccttactttgagtccagactctgccacttaatagctctgtgatcttgggcaagttacttaatctctctggcctcaatttcctggtgaatgtggagaaaaataatagtgcccttcccatggggtcatgtggaaagcttttagcacagtatctggtgatttaaagtgttcagtaactattagctgttactgtcattatctgtgttaacctgccagacaaccttatatgggttgcttttgctttcacacctgtatgatagtcatggaaactgaagcccagagaggttaagaaatttgctaggatcacaccactaataagcaacagagccaggattcaaacccaggtgtggctccagagcccatcctcttcccactgctaccctaactcaaactgccacatgctcgtgtcctttcagtggggagagtggttcattagagggggttgctacttttattttggacaggccagttctccattctgcaggactatcccatgtattacaaacagttggcaaccttgccctgctcaccaaatgggagttgcataccagtattccccagcttgtgactacagagatgtcccagtatgtttctttctgccccgttgaagaggtgcagcctcaggctgagaaacactgatagaccaagaggtggccagggttcccagaaggaaggaactcaccttgaacttagctttctttgaagggtaggaaacctggaagacgtacaaaggagggagaggtcaggtgctagaaagtttgtgcacattgagggcatgggcagaatctgctcccaaaagcattgaaagccaatatgaggccaggtggtggctcatgcctgtaatcccagcactttgggaggccaaggcaggcggatcacaaggtcaggagattgagaccatcctggccaacatggtgaaaccccgtctctactaaaaatacaaaaaaattagctgggcatggtggtgcatgcctgtagtcccagctactcaggaggctgaggtaggagaatcattgaacctgggaggcggaggttgcagtgagccgagattgcaccactgcattccagcctggcgacagagtgagactccatctc

SEQ ID NO: 10274 - DNA, 446 bp, Homo sapiens
ttatgaggagtcaaatcctaaggatccagcggcagtgacagaatccaaagagggaacagaggcatcagcatcgaaggggctggagaagaaagagaaatgatgcagctggtgcccgagcctctcagggccagaccagacagatgggggctgggcccacacaggcgtgcaccggtagagggcacaggaggccaagggcagctccaggacagggcagggggcagcaggatacctccagccaggcctctgtggcctctgtttccttctccctttcttggccctcctctgctcctccccacaccctgcaggcaaaagaaacccccagcttcccccctccccgggagccaggtgggaaaagtgggtgtgatttttagattttgtattgtggactgattttgcctcacattaaaaactcatcccatggccagggcgggccactgtgctcctgg

SEQ ID NO: 10275 - DNA, 673 bp, Homo sapiens
atcatccttataccgacggggaaacggaggccagagagggcgtgggcgcttgcaccacttccgtcccatccttgcgggtacctggctatgcgggggtgcctaaggagcctggaaaaagcgctcccccgtcgtgcttcctggggaagggggcgttcgctgcgctcggagcggcgtcccttccaacccgccggtctcatttcttctcgttttcacaggcggcatgcgttcctgcggacgatcgcatcttgtgtcgctgaagcgcctcccccagggaccggcggaccccagccatccagggggcaagaggaattacgtgctctgtgggtctcccccaacgcgcctcgccggatctgagggagaacaagaccgatcggcggccactgcgcccttaactgcatccagcctggggctgaggctgaggcactggcgaggagagggcgctcctctctgcacacctactagtcaccagagactttagggggtgggattccactcgtgtgtttctattttttgaaaagcagacattttaaaaaatggtcacgtttggtgcttctcagatttctgaggaaattgctttgtattgtatattacaatgatcaccgactgaaaatattgttttacaatagttctgtggggctgtttttttgttattaaacaaataatttagatggtg

SEQ ID NO: 10276 - DNA, 93 bp, Homo sapiens
cttgcatccccagctgtctccctgaggctccgccctggctgggagcctctggcggcccctcccctcccctgcccttaaccccagtaaagctcc

SEQ ID NO: 10277 - DNA, 720 bp, Homo sapiens
actcagctgtgagctgcggataccgcccggcaatgggacctgctcttaacctcaaacctaggaccgtcttgctttgtcattgggcatggagagaacccatttctccagacttttacctacccgtgcctgagaaagcatacttgacaactgtggactccagttttgttgagaattgttttcttacattactaaggctaataatgagatgtaactcatgaatgtctcgattagactccatgtagttacttcctttaaaccatcagccggccttttatatgggtcttcactctgactagaatttagtctctgtgtcagcacagtgtaatctctattgctattgccccttacgactctcaccctctccccactttttttaaaaattttaaccagaaaataaagatagttaaatcctaagatagagattaagtcatggtttaaatgaggaacaatcagtaaatcagattctgtcctcttctctgcataccgtgaatttatagttaaggatccctttgctgtgagggtagaaaacctcaccaactgcaccagtgaggaagaagactgcgtggattcatggggagcctcacagcagccacgcagcaggctctgggtggggctgccgttaaggcacgttctttccttactggtgctgataacaacagggaaccgtgcagtgtgcattttaagacctggcctggaataaatacgttttgtctttccctc

SEQ ID NO: 10278 - DNA, 892 bp, Homo sapiens
gccctgggcgcagctgaagcctggacgcagccacacagtggccggggctgaagccacacagcccagaaggccagaaaaggcagccagatccccagggcagcctcgttaggacaaggctgtgccaggctgggaggctcggggctccccacgcccccatgcagtgaccgcttccccgatgtgagccgcctcggagtgtggcctggatccatcctgctagcacctccccagacagggctccagcctgtcggccacaccccagactccaggcccccgttgaagccgctcccggttccctccccagctcctcgtctttgaactgccgccgccgtggtgacccctgctttgccccactgggagagtccttagcctgggcctcctcctagctggagtgccatggctggggggtctcagcatgtagggcttctgtggttgtggatgggaggctcctggtggggcagaaaggctgcaacgctgattcctaaggcccagctgccagggaagacagagcaggctttgtgagagaggacctccatgcccccgccacctccccactccagcagataaggccgagcccacaccatctggcccaggctggcccccacccaccttccttgcgaccaccaacacacaggaactctgtgtgagagagagggcgcccagcccaggcctggtggagggggaggggagaagccaagggacacaggagaccacccccgagcttgcctcagggccaagccggcccaacccaaccactcggggcccccatcttgggggtcacccatggcctcagatgatggggtcagcaggcccaggagaattaggaaggccatggggcagcctccagtctgctctcagcttgtgccttgtaaataaatgtacaggttggatgtgg

SEQ ID NO: 10279 - DNA, 34 bp, Homo sapiens
tccccagctgccaggaggaaatcagccttagcag

SEQ ID NO: 10280 - DNA, 995 bp, Homo sapiens
gctacagtgtcccagcacaaaagggacaggcttggctgatcccacatccgccgcagtgttgtgccccgaatttcagggccaccaggctaagggggagtggatctgttggtccaagggtagagtggccccactcttgggttctttcaggggagggggcagccttgcggaggccccagccctgggccccgttttcagccttgtggcccattccctaaattcccctgacccagggcctggggaatcatctggtgctacacttttcgagctgccctgctttcatggggcctccacacctctcccctgcctggcgttgcccatgtgttgcccctgctggacttgccagagaaagggcactgtctggggtccatgacctagaccctgtgctcctcaggggttgtggagagtgggctgcctctatggtgggaaaagatctctgagaaggatggaggtggccgtggaagggatggggtgaggttggagcattgtgtggacagggatggcgtggctcctgtagcatctgaggcctggagccagggcaagagggagctgaagaagggagttggggtggggcagggtgttggggtggggggctggcagtgctggagatggataggagaaagaactggggggggggtctaggctggcagaagcatggaggggtggaagacttgggggaggggaacctgcaatccagagcatagcgaacaagaatgaactccttaggagacgtctcttgttgtgttgtgggctctgtgaaggatgaagttccacacacctcaggtgaaatgtttgaaggagccattttttgttctagatgtgcacctggaacgtggcttctagatacaggtcttcaacacagcagataagatgtctggaaagatctctgggctcaagtgcaggtgaggttttagcacagttatcagaggaactgatccagaagcaggcttagttctagattgagttctagagtgctaggctgataaaatgtcccaggg

SEQ ID NO: 10281 - DNA, 1177 bp, Homo sapiens
ggatgcggcccttcatcccggaccaggacatcggctacttcgagggcttcctggagggcgtgggcatccgcgagggcggcatcctcactgacagcttcggccgcatcaagcgcagcatgagctccacgtcggcctccgcagtgcgcagctacgatggcgcggcgcagcggcccgaggcacaggccttccaccggctgctggctgacatcacgcacgacatcgaggcgctggcccccgatgacgacgacgacgacgaggatgagccccggggctccaggggcgggagcgacgccgcagaagacaactacctgtagccaccgcccctgcggacggcgtggctcagcagcccacctctgagtctcagctttgcttcggggaccctatccccagggcccccccatcacacctggcggggccggggggtcttcactccagggtctcgctccctgcccttggggcccggggccatgcagtacctggagtgtcctgcagggggaaagcgaagccgggccctgaagtccggggcagtcacccggggctcctgggccgctctgccgggctggggctgagcagcgatcctgctttgtcccagaagtccagagggatcagccccagaacacaccctcctccccgggacgccgcagctttctggaggctgaggaaggcatgaagagtgggctccacctgctggccgactgagaaaagaatttccagaactcggtcctattttacagattgagaaactatggttcaagaagagaggacggggcttgagggaatctcctgattctccttatatgacctcaaactgaccatactaaacagtgtagaaggtctttttaaggctctaaatgtcagggtctcccatcccctgatgcctgacttgtacagtcagtgtggagtagacggtttcctccacccagggttgactcagggggatgatctgggtcccattctggtcttaagaccccaaacaagggttttttcagctccaggatctggagcctctatctggttagtgtcgtaacctctgtgtgcctcccgttaccccatctgtccagtgagctcagcccccatccacctaacagggtggccacagggattactgagggttaagaccttagaactgggtctagcacccgataagagctcaataaatgttgttcctttccacatc

SEQ ID NO: 10282 - DNA, 333 bp, Homo sapiens
tagggaggaccagggcagggccagggggtgcccaggtggtggctgcaaggtggctccagcaccatccgccagggcccacacccccttcctactcccagacacccaccctcgcttcagccacagtttcctcatctgtccagtgggtaggttggactggaaaatctctttttgactcttgcaatccacaatctgacattctcaggaagcccccaagttgatatttctatttcctggaatggttggattttagttacagctgtgatttggaagggaaactttcaaaatagtgaaatgaatatttaaataaaagatataaatgccaaagtctttacc

SEQ ID NO: 10283 - DNA, 1812 bp, Homo sapiens
ttggagtggaccacggccaagcttgctccgtcctcggacaggaagccaccctgcgtgggggactgcaggcacgcaaaataaaataactcctgctcgtttggaatgtaactcctggcacagtgttcctggatcctggggctgcgtggggggcgggagggcctgtagataatcttgcgtttttcgtcatcttattccagttctgtgggggatgagtttttttgtgggttgctttttcttcagtgctaagaaagttccctccaacaggaactctctgacctgtttattcaggtgtatttctggtttggatttttttttccttctttgttttaacaaatggatccaggatggataaatccaccgagataagggttttggtcactgtctccacctcagttcctcagggctgttggccaccctatgactaactggaagaggacacgccagagcttcagtgaggtttccgagcctctccctgcccatcctcaccactgaggccacgacaaagcacagctccagctcggacagcaccctcagtgccagccagcctctgccagacctctctttccctcttctccccagcctcctccagggctgcccaaggcagggtttccagccaggcctcggggtcatcttttcaccaggagcaaacccaagtcttagttgctacaagaaaatcccctggaagtactgggggccaggttccccagacagcaggaattgcccctgttcagagcagccggagtttgctggaccacaaggaagaagagaagagacttgcagtgaactgtttttgtgccaagaaaccctggacctggggccaagtatttcccaagccaagcatccacttgtctgtgtctgggaagggatggccaaggccgctagggtccttacccctcaggatcactccccagccctttcctcaggaggtaccgctctccaaggtgtgctagcagtgggccctgcccaacttcaggcagaacagggaggcccagagattacagatcccctcctgtaagtggccaggcattctctccctgccctctctggcctctggggtcatactcacttctttagccagccccatcccctccaccccacacctgagttcttgcctcctccttttggggacacccaaaacactgcttgtgagaaggaagatggaaggtaagttctgtcgttctttccccaatccccaggaatggacaagaagccaacttagaaagaagggtctcacgtggctggcctggctcctccgtagacccctgttcttttcaacctctgcccacccgtgcatgtcatcacaaacatttgctcttaagttacaagagaccacatccacccagggattagggttcaagtagcagctgctaacccttgcaccagcccttgtgggactcccaacacaagacaaagctcaggatgctggtgatgctaggaagatgtccctcccctcactgccccacattctcccagtggctctaccagcctcacccatcaaaccagtgaatttctcaatcttgcctcacagtgactgcagcgccaagcggcatccaccaagcatcaagttggagaaaagggaacccaagcagtagagagcgatattggagtcttttgttcattcaaatcttggatttttttttttccctaagagattctctttttagggggaatgggaaacggacacctcataaagggttcaaagatcatcaatttttctgactttttaaatcattatcattattatttttaattaaaaaaatgcctgtatgcctttttttggtcggattgtaaataaatataccattgtcctac

SEQ ID NO: 10284 - DNA, 4002 bp, Homo sapiens
ttctggccggagcaccagaccctctgatcctggagggaccagagtctgagctggtccttccagccaggcctggcagccagaggtgctccgggattgcaaactcctcttctcacctgccaaagatggagaagagtgccagggacccctcaaggagggagacgctccatatcccagggcataggacttgcaggttcctaggagcaggagcatctcccatcgcacgtgctttctgctcttctgggaatttctcacactggcaaagcagtccagcctccgtcttctggtccactctgctctgagcagcctgggatgctgaactcttcagagagatttttttatagagagatttctataattttgatacaaggtcatgactatcctagaactctctgtggtttttgaaaatcattgaattctattaatgtaggtacctaaagtgaccttaactgaatgtggatgaggctggggctggtgtgggtcttttggctgcttttcaaggtgtcccccaatgtggccctcaagagccatccccactgcctggccagagccattgttgtcccctacttcctaggccatttctggggcttgggggatgaatgctgtcctgtgctgtaaacactatgcaaatggaagttatcggttgtggtgctgtgcagcgctctgtgggcgactaagtgccactcacgcagcatgttcctggcaaggagcacataccatcaagccacactatcatggtattgttctcacagtcttttggtggttgatggccactgcaaacctggcaccatcagatctcttctgatctcttgccccagtggggcctggttggtagaatgttggcattcggttgatatccaaagcctgttctcccagccgtcctcctgcagctggagccttcaggccgtattctcacgagggaacgtttgccaaggctctgacctcacagaagatgcccagggcccagaagccatcagaattatcagtggagaagcaccttttgactcttcccttccaatgtaatctctgccaacaccatgaggcttaaggtgctctaagtcatgagtgttttggtctcaaatgctgcagttttaataatctgtgactcctgagagcccatggttttttgaccttgtggttctaaaattccttgtctgacccctgtagatcttttccttgccatgtcacctcccttggcctttgatcctggaaaggtggcagagcctccactgagccaggcccagagctccttgcagtgccttcttccttgtttacctgtgggaggaaacactttttttgtcaggggcagcctggttcagagctcagaggtcacactgtatcaaagatctcaaacagcaaagtcagcatttgctgtatagagctgccacccaactctaagcaggagaaactgtacagaaagggctttgctatttttcccttttgggaaaacaatgaagtgttttaagtcctgggtggactgagagatggtttgcctgtccagacttgctctcaagcctcatccagagaaggagctgcagatgagggagcccgtacactccctgccaccactaggttgtaagcctgtagctggctggctgatttcattttggaattcatttgccatccacagccttacactaggcacacactttagagtctggggctccagtggggcccgcctaattttttttccccccaagacagggccttgctctgtctcccaggctggagtgcagtggcatgatcatggcttactgcagccttgatctcccaggctcaagcgatccttctgcctcagcctctctggtagctgagactgcatgcccagctccaaatcaccttgattcatatcagcagtaataatcacttgtgttctgaaagaaagggcaccagaagttctagcaaaattcagttgtgttctgtgagctagcactttttcctctgacccaattttcttacctataaaatggtgataaaaaccgacaggttgttcaaaggcccagatcagctaaagcatgtatataagagcacgttgtaaacttgaaagagacaaaggcacaaatgtggctgttgattaatttgactgcttctcgttgctcgtcacctccatgccaggcactgtgcttgctaattgctttatgggggcattctcttatttattccccagccctgggaaataggagctgtcattatccttctctttctgcacaaggaaaaattaatgccctgagaattgtcataattttcccaaggctgcccagctggtggtgttaagccagaatttgacctcccagagccagtttccattagctgccatgctctgctgcctctaattcacagaatgcactttctaccctgtgtgccatggagacctcctatggaaaaatgatcagccaccttaccttctactgggtacctgctgtgagtctgcctatgccagaaggattaaggaggggaggttacccaagaaacaaagcctacatgccgcttacagcccccgttggatggttgctcagtacaacagtcttgcattcagcaggtgtttgttcatcacctactatgtgtcaggctctatgctaggtactggggatacaggagagaatcaagcgtaaagtctttgttctcaaggaatttgcattctagaaagtagaagatgtaataaatgtactgtgggacatgttaataagtgctataaagaaatataaagggtttgggagcaaaaagagggagtggatctattttagatgagcccaggtaagacctctctgaagagctgtcatgaaggagggagggagcacattcctggcagagaaaacagcacgtgcaaaggccccgagactggagtgtgttcctgaagagcagccaggaggccagcatggctggagaggcaggcataggcagggaaccgagcagcaggtcagagcaggcgagctgacattctgcagcctggacggccatggcaggaagcttttagttggagagatacaggaagcctcctagggttctgagcagaagaggggcatgagctgattcacattctgaaggacctctctagctggccagtgctgaggaggttggagagagaaagggtgaaagcagagagaccagtgcagggctgttaacagggttgcaggcgagagactggggtgctgggctcccctagactaggactccagtgccctcctctcccaagagacaaaggccattgcattgaaggaggtgggaaatgattagattctgaacatatgtaattatttttcagtctttttcaaagatacaaatatttacatagttttaatcatgtaatatatacaatttaatgtcctagtgttttacttaatagtgtatcatgttttccctgttggtatgtagcctggataaatgctcttaattataaaaaattctgtcgaggagtgttccatagtttattgttttcctattatgagaatttaggccaagtgtggtggctcatgcctgtaatcccagcactttgcgaggccgaggtgggcagatcacttgaggtgaggagttcaagaccagcctggccaacatggtgaattatctctactaaaaatacaaaaaaataataataatagccaggcgtggtggcacatgcctgtattcccagctgcttgggaggctgaggcaggagaatggcttgaacctgggaggtggaggttgcagtgagccgagatggtgccactgcattccagcctgggcaacagagcgagactccatctcaaaaaaaaggagacttcatgtgcccccaatttttcactattgttatttgaaaaaatatttttatttgtaagagtttttctttatttaaaatgttcattaataaagttgttggacgggaagcaaaaaaaaaaagttgtttaagataaattcccagaagtgaatttgttagatcaaacacttaaaactttttgttatggaagaattcaaatataaataaaaaattgtgagtaataaaatgaactcacagtttcaacaatgacccac

SEQ ID NO: 10285 - DNA, 872 bp, Homo sapiens
aactggaagcagcttctagagaacagcttcaggtgcagaccgagaaatgacgtcatcctgataattattggacgtgtttattaattgcaccccattagcccctgtttttaaaaaatataggttagcaggacgtgggcacaggccgtgaaacatttatagggcgcctgtcacgtgtgagacatagtaatcagaggccaatggtgatgtgtgaaaatgaggatgaccagctctggttttctaggagctatggtctcataatgacaataatcagcatagtgtacttgtccttaatgttatagcatggcaggaaagaccatgggcttagaaggcagacattggttaggaggtgcagggaacatactaattcatgtgcggtcaaagcacttggcatttaatagggcaaaggtaaacagatgtagagaaatgagtctcatgcctgtaatcccagcactttgggaggccaaggtgggtggatcacttgagcctaagagatcaaggctgcagtgagccatgatggtacccctgcactccagcccaggttacagagcaagggcctgtctcagcaaaacaaaacaagcacaggccaaggagtgagatagccagcgctgatggtatctgcctcgtagtgcatgaagtgcatgtcatacactaagcagccagccagtgttggctgtcagtgttattactcacatgctttattttatttaagactttgagatagttcatgaagtgggtattattatcaatttccattttataggtgaggaaactgagcccagtgaagttaaataacttcccaaggtcattgagctgttgagtggacagctcaggtctgtttgtaaatctttaataaataacaacagctaagattc

SEQ ID NO: 10286 - DNA, 3687 bp, Homo sapiens
agccagcttctcctctcccagggcggaaacagcatttgccttctgagagaagagactagcaaaaagctgcagagaggattcggcccaaactcagaactgttcccctgaggagaagcggtggcctctttgcagatcaaccaacttaatctggttgaacgtgctgttcctaatctggcactcagcccctctgggaaacatcttttaattagcatctcagaaatgcatgggtaaggtaaagtgcgatagttcaagtggaaagcaagagaatgaccagtgaccttgcttccttcccccttgccttcttctcccccttcccctgtgctccctttctctcctctctccttttctagcctgttctttacatggggctcccttcttgttgaacaatagggcagaatcaggagtcaccttagcaggaccacatctttggagcctcgggataaaatgacagtgaggttgaaaagtgaaaaccctagaacttgaataggtgcctgttcttgtagggagaaatgagaaatcgcatttggatccaggccccaggtgggcaccatcagcagtcttgcttccatgcacctcagtaagaagtggatctgcctttgggacctgctcagtgaggaaatctcttccaatttctgcttctgaatgattcaatgttgggagcaatagaaataacattccctttgccttctctgagtgtttagggaaatagcttctttaaaacctcaaaaccatgaccatcctgtcaaagacctaagtctgtaagctggtgccatgtccatacaccatgtcactttactcttcatttgtcaccatcttttcccatgcacgcatactctgaacatccttgtgtgggcccatcctctgcatccagagcatgctctgcagtgggcctgttttgtggaagaaaggaggctgtctctgccttctctgatgggactggagttgagggaaggagctgtattgtggcacttctgaattccccgttttgttccatattggtatagagagcagaagagtagctaggcagatgcagagatggagacatgagactcagtgcagtgggcagggaagacataacagatggaagcaaaggaatcctgcctgccttcagcagagaattcaccgaatcctagaactgtggctccctccaggcagagcctaagatgctggtgaagaatagctgtgtgattgaataggctcaaaggagagttcagaattcccatttacatattactagtttggtttgtaagttttagttccttgtattattgagattcagagcttcattttatgttggtcattaggtgaatattactcattttccctcaagagaagctcataagtgtgtgtgggtgtgagagcacgatggtgcctgtgttctgtgaatgtgtccatatgtgtctgtaagagagacagagaccaagaacttgcccaattttagaaatacactaatgtgcagttgttgccttttgtctgtattgaaggcccattgaatgactaatccaggctggaagcattcccatgtgggtgtctgagtccatgagccaagcctgaggggacagtgagtctccaggtctgccacactggtgcaccttgctggcacggtgcctcaggaaggtggcgactcaggtgggccttgagttatattttaactcagctgctcagttcccagggcacatttctggatcagaacccatgggaaacaggaggtactaagtgcaatgtcttagcattctgcaaaatggagatctgttgtccagcggcttatctcctttttagtaacccttctttctgaacccagggcccttttcagccttccctcatattttcttgagatcaaactttacttctttcttatttactaagaatttgcctgtttgaataagaacaaaacgctaaggtgggtagcctaagctgattttctgctggttacacgtgtctctcacaccacatttcctcaaagctaatctgaattctgtaggctaaaaatattcatgtagcaaatctgagaattgaaaactgcagataaccggccgggtatggtgactcatgcctgtaatcctagcactttgggaggccgaggtgggtggaccacctgaggttaggacttcaagaccagcctggccaacatggtgaaaccccatctgtactaaaaatacaaaaatttgcctggtgtggtggtgcatgcctctagtcctagctactcgggaggctgaggcacgagaatcacttgaacctgggaggcggaggttgcagtgagtcgagataacactactgcattccagcctgggtgacagagtgagactccccctcaaaaaaaaaaaaaaaaaaaaaaaaaacagaaagaaagaaaaagaaaactgcagataaccctatacattaatactggtatctcgaggtgactcttctgaccaagggtggttaagtgacacatagaacttttctaagagaagacagacaagttgacaggcatgccttgtactcagctgtgttcatgtggtggtctgtggaaagaaaagaagactcatttggaaatgaagctgtccctttccaagcagtctctggtgcttttcttctctcaaaatggatccgataaatatttgaatagagcagattgtagaatgtcgtgctgtcaccagaaagctgctgttttgggttctgcattgagccaaatatgtagaggacctaccaagcccactgagggactaggttttcatgtctctagtcatacctagaatgttctgagccgtctgagggccttcatgccggcagcagctagcaaagccagaaagcaagtctaacaggatctaagatgaccatcaggagaaggagtttgagactgtgtatgcaacccccaatagacccccttttactctgatctggagaatgtatctggcttcatattttcaagtcacatgtctctcagacccctggattcagaacccaaggccacaaatcataggcatgaagcactttcttaagactgacctaacgctggattatttcccgtccaatgcctgcatgctgcttgaattgctccacccacacctccatgaccaagggcgccagagtgctgcaactggggcgtgggccgctctctgcttttcctgtctgactctgacaagtcctccctcactgaatgtagaatcgttgccaagtttctgagaagtgtcgattccctgttaacatggatatcagttctgcctcacatttcccacttgaggttgaggcgtactggagacaacacctcagaccatctgaaccccatcagtggacgaaaatggggctgttaatatactctaaaagccatactaaaaatgctctgagggaactggctaagaatagtgggcctggtgattgtctatcacgcaaggctttgttttgtactgttcagaaatctgtcacctttctgcctgcccttgtttcctgaatgaaatgcttctggggttatttatgaaaggagtgatcctggggcaggcaggaggcagtgggcttcatggctccttgaagttattactgatcttgaccttctctttggctacctttagacaaagaatacgccaatcaatacttggggctctaagttttacaattgatatttatttgtatcatctctttgtctaggaatgtaaaagtgattctaaactaagatgtgtaataaaaatcaatcagatttattgtacctac

SEQ ID NO: 10287 - DNA, 1980 bp, Homo sapiens
taaattatggccatgggaaacattgtatatttagtgtgtgtattttgataatgattgatcttaaatctgtatacagaatatcattgatataatactctttaggcaggagcactcttgccttcccccaaaatttacactgctaaagccctctgtcacttggcgacccttctggtcttgctggaggggtttcctgggtataacccattgggctgcccaaggccagccagcctgagctctcctgcaagacagagcctgatgtggcacggagtggggttgcggggggtggggggactgcctgactcccagagggacttgaaactgaagcaagaaggttgcattctccaccaagggagttaacctacctgaactaagtagaaatgccagtcttccactaccccctccctgccatcttttcttctgctactttggggagttgatggccaggaaagaagccagcacagggttaaagtaactcctggcattgcccaccagggggctggtgcacctgctgacctcagggtcacagttgagtcatttgccagttgacggagcaagtttgaccttggttctgttgctgaagcaaatttggaacttttctgtctcagtgtgatccactaacccacaggatcatttggaaccttgaatagctctgcttggacaatggggttggggaatagggttgtctttcctatgaaaatgccatctgtagaccttgtgagtcagccgtccagatgtttgcaggtgaattcctctgcttgacatcctccctgtcactttggaccctatgggagtgggcatctccacgcacctgtgtatgtgaaagtcattttacatttcaaagcagtgtgtgtttcttatttttatatttttaactctttattcttggatgtataaagtgaactttttggcttctgtaagtatgctctatgcacctctaatgttttatcatgtatttatatgttgtacacagtactggctgattctgtaaatggatgtattgtacagagaacatgaacgtctcttcctaattttacatcttcagcatcattgcattaaagtggtgtaatctccttctctacatctgttgtcagagccactgagtgctgtgctgctcgacgtgagggtgaaatgattgacttgtgacctgccaggttgcccgatgccctgttgggtcaccggctggacctgctgcagcctgcagagccacagtcagcctgcccacatgccaccgagcaaacgcatcttgcttttcacatctctcctcctacagccttaatggctgcttgctgccatatgtgacaaatcaccaccaccagtgttaagtgcttctggattcatgggtgagttccctgggcagcccccaggaaggccttccagatctggctccagggtcaccacctgtcacagcaatacctgggaccatgctctcctgggactgtgaggctccttttgacgtacttttgacatcaggcaggtttgggaagaaacaaagccatgcctgctcctgcctctctcccaacatgtttccagcaagtagatgcccctgtgtgtgttttcccttgccttgtttcctgccttatatcttgtatttcgacttattacagagttgagggttcttgcttaatttagatcaagtataaaatttgtatgacttcaagtctcattttatctgaaaggtttttttctcatttaatctgatgtggcattttcgtcatctgaagcatgagtgacaagttgggaatgatgtggtgatttagaatgcagtattggccaagtccaagttgtcaacttaagcgtctgtttaccaaagaccgggaacaggggcccaaacatgtccagtcctcttcttccctctgctggaacctttggggacactcaagggtacagtttgacactgatctggtccatgaggctgcccagagaaagcactgcttctgtatgtctcttgtggtattggaacaataaacccgtacaacctgc

SEQ ID NO: 10288 - DNA, 188 bp, Homo sapiens
tcccctcagttcctcacccctctccctgctttctttgtctgtctcatccatgaggatgtgccctctgggaagggcaggcaggagctggctattctgttccttgccctgtccccagcaccgaggacagtgccaggcatggaggaaataattgctgaataaagaaataaaatcgacattctatgagacat

SEQ ID NO: 10289 - DNA, 1452 bp, Homo sapiens
ttccagccaggccccaagcccactggggtgtgtggcagagccaggacccaggaggtgtgattcctgaaggcatccccaggccctgctcttcctcagctgtgtgggtcataccgtgtacctcagttccctcttgctcagtgggggcagagccacctgactcttgcaggggtagcctgaggtgccgcctccttgtgcacaaatcagacctggctgcttggagcagcctaacacggtgctcattttttcttctcctaaaactttaaaacttgaagtaggtagcaacgtggctttttttttttcccttcctgggtctaccactcagagaaacaatggctaagataccaaaaccacagtgccgacagctctccaatactcaggttaatgctgaaaaatcatccaagacagttattgcaagagtttaatttttgaaaactggctactgctctgtgtttacagacgtgtgcagttgtaggcatgtagctacaggacatttttaagggcccaggatcgttttttcccagggcaagcagaagagaaaatgttgtatatgtcttttacccggcacattccccttgcctaaatacaagggctggagtctgcacgggacctattagagtattttccacaatgatgatgatttcagcagggatgacgtcatcatcacattcagggctattttttcccccacaaacccaagggcaggggccactcttagctaaatccctccccgtgactgcaatagaaccctctggggagctcaggaaggggtgtgctgagttctataatataagctgccatatattttgtagacaagtatggctcctccatatctccctcttccctaggagaggagtgtgaagcaaggagcttagataagacaccccctcaaacccattccctctccaggagacctaccctccacaggcacaggtccccagatgagaagtctgctaccctcatttctcatctttttactaaactcagaggcagtgacagcagtcagggacagacatacatttctcataccttccccacatctgagagatgacagggaaaactgcaaagctcggtgctccctttggagattttttaatccttttttattccataagaagtcgtttttagggagaacgggaattcagacaagctgcatttcagaaatgctgtcataatggtttttaacaccttttactcttcttactggtgctattttgtagaataaggaacaacgttgacaagttttgtggggctttttatacactttttaaaatctcaaacttctatttttatgtttaacgttttcattaaaattttttttgtaactggagccacgacgtaacaaatatggggaaaaaactgtgccttgtttcaacagtttttgctaatttttaggctgaaagatgacggatgcctagagtttaccttatgtttaattaaaatcagtatttgtct

SEQ ID NO: 10290 - DNA, 1670 bp, Homo sapiens
cagcctggaccagcagagcaacatcggaattcttcactccaaatcatgtgcttaactgtaaaatactcccttttgttatccttagaggactcactggtttcttttcataagcaaaaagtacctcttcttaaagtgcactttgcagacgtttcactccttttccaataagtttgagttaggagcttttaccttgtagcagagcagtattaacacctagttggttcacctggaaaacagagaggctgaccgtggggctcaccatgcggatgcgggtcacactgaatgctggagagatgttatgtaatatgctgaggtggcgacctcagtggagaaatgtaaagactgaattgaattttaagctaatgtgaaatcagagaatgttgtaataagtaaatgccttaagagtatttaaaatatgcttccacatttcaaaatataaaatgtaacatgacaagagattttgcgtttgacattgtgtctgggaaggaagggccagaccttggaacctttggaacctgctgtcaacaggtcttacagggctgcttgaaccctcataggcctaggctttggtctaaaaggaacatttaaaaagttgccctgtaaagttatttggtgtcattgaccaattgcatcccagctaaaaagcaagaggcatcgttgcctggataatagaggatgtgtttcagccctgagatgttacagttgaagagcttggttttcattgagcatttctctatttttccagttatccccgaaatttctatgtattatattttttggggaagtgaggtgtgcccagttttttaatctaacaactacttttggggacttgcccacatctctgggatttgaatggggattgtatcccattttactgtcttttaggtttacatttaccacgtttctcttctctgctccccttgcccactggggactcctctttggctccttgaagtttgctgcttagagttggaagtgcagcaggcaggtgatcatgctgcaagttctttctggacctctggcaaagggagtggtcagtgaaggccatcgttaccttgggatctgccaggctggggtgttttcggtatctgctgttcacagctctccactgtaatccgaatactttgccagtgcactaatctctttggagataaaattcattagtgtgttactaaatgttaattttcttttgcggaaaatacagtaccgtgtctgaattaattattaatatttaaaatacttcattccttaactctccctcatttgctttgcccacagcctattcagttcctttgtttggcaggattctgcaaaatgtgtctcacccactactgagattgttcagcccctgatgtatttgtattgatttgtttctggtggtagcttgtcctgaaatgtgtgtagaaagcaagtattttatgataaaaatgttgtgtagtgcatgctctgtgtggaattcagaggaaaacccagattcagtgattaacaatgccaaaaaatgcaagtaactagccattgttcaaatgacagtggtgctatttctcttttgtggccttttagacttttgttgccctaaaattccattttattgggaacccattttccacctggtctttcttgacagggtttttttctactttaaacagtttctaaataaaattctgtatttc

SEQ ID NO: 10291 - DNA, 325 bp, Homo sapiens
ggcaagaccactgggaggcctgagagtgggccagctcgctgctcaggcgaatttctcatttcaagccactggggaaactgaggcaaaaccatacttagtcatcaccaacaagctggactgcttagctgggctgttttatcttccctgagtgcctgggtctccctccctcacttctgccctttcccttcctcctcctcttctcctccctcttccctcatctcccccctccttcctctgccccaccccagcggggagcagactgctcctccaggctgtatagacctgccctcttgcattaaacaacttctcttgagctgcaactttc

SEQ ID NO: 10292 - DNA, 23 bp, Homo sapiens
ggctgagacatggccaccagcct

SEQ ID NO: 10293 - DNA, 313 bp, Homo sapiens
gtgacagaggcagagatgctgctgcaactggaagaagctggaaccagtcccagagaggctcggcctggaaacagtcccctgcccagagtcccctcagcctccatgacaggtccctccctggccccccaaccctcttcctcccttgccccaaccctgagaaagggtccagccactaccctgttggcaaacattcccttccatggtcagcctgccaggaggaggggagtcaccttggggctggaggcctctcagaccccatcctgacagcaggttgagtattcccactttcaataaaagactccactttcccggc

SEQ ID NO: 10294 - DNA, 194 bp, Homo sapiens
attggttcccagtggcttgccccacccccttatagcatctccctccaggaagctgctgccaccacctaaccagcgtgaaagcctgagtcccaccagaaggaccttcccagataccccttctcctcacagtcagaacagcagcctctacacatgttgtcctgcccctggcaataaaggcccatttctgcaccctt

SEQ ID NO: 10295 - DNA, 134 bp, Homo sapiens
cttctgctgatcagaaggaaagtccacatcttgcaaccttaagtctcccttagagtggggcttctgctaccctaaaaactttaccccaggctctgtggacataccatcctctcctacaataaactctagctctg

SEQ ID NO: 10296 - DNA, 199 bp, Homo sapiens
ggtcttcccccaacagaactatttcttgctgctcaatccatttcctctggcccagcttcccagtgctcacagatggctggcccatgtgctggaagatgacacagttgccttctctccgaggaacctgccccctctcctttcccaccaggcgtgtgtaacatcccatgtgcctcacctaataaaatggctcttcttctgc

SEQ ID NO: 10297 - DNA, 111 bp, Homo sapiens
agacttggatggcagccatcagggaaggctgggtcccagctgggagtatgggtgtgagctctatagaccatccctctctgcaatcaataaacacttgcctgtgatgcctgc

SEQ ID NO: 10298 - DNA, 5385 bp, Homo sapiens
gccccggactctgcttaccctgatggctgctcagcaccacagagtgcttgggctgagggactgactgttggaacccgtgcatgtagctgccgggtcatcagcaagaaatgaattggaggcaggaagagtccaagcctgaataataacaccccacagcctctctgtgcacttgctgtctgcggagccagtgtgccattctctgcacatgggcagccagcctgagctgcctcctccatggctttcctggtttgttcctctctccactgaagctgacttagccggccccttttcagtgtagaccaccagctcccctccccatctccttgagtcagcagactgtccaatgtgctcagccaggctggaggcggcaggcggcaggcagcaggctgtggaggaggcccctcggtcagggagcggcctgcctcacccctgaatagctccttcggccccatctccatcctcagcagatgacactgattggcctcacggggacttgggtaagcaacaggcggcattcaggactcttctcaaccctgctgttcagacttgataagatctcagagtccacaggaaagaagtcactgttgcaataaaagcacccgtagtagcaaaaacataaaacaaataaaacttcccccacatcacagatgattttggacaagattttccaaccttgctggctactttagtttgggacctgttttttttctcatttgattttgcttgtgcagaaaatagtttccagcacatggattgatctgagagagaatgaggctcagttgtggatagtctgttttctctgagcatgttggccaactagtatcgtcaaattattgagtggatcatctcttggaaatgcagaacttctgccaccacttggctatttgcacagtcatcttgttctgtgtccttttatctctcagaccacacacatctggaacgctgtgggcatcttctgcccatgggctccatttggcacctgctgagccacagttgtcctgctggatgtgctgtgcaggttggtaggacttgcccccactgtcaaggcctggtctcatctgaaaagccctcctggacctcaaagaattcttcagacctcatagttacaggtcattatatctactatgttgatttatcatcaggcacacaacttctgtttccttctcttgtgttatctgatagcgtccctccttgagctcatcagaaaggttttatgaaatgtgaaccattttgggaaaagctgatcaatttttcttcctagcttcccattttcaaatgggacatcactcatatccctttcagaatgttaggaactgcctcccacattcttccctgtctttttgggttttgttttttgttgttgtggtggttttttaacacaaagtctcactctgttgcccaggctggagtgcagtggcatgatcttggctcactgcaacctctgccttccaggttcaagcaattctcctgcctcagcctcccgagtagctgagattacaggcgcccaccaccacgcccagctaatttttgtatttttagtagagacagggtttcaccatgttggccaggctgatctcgaactcctgacctcaggtgacctgccttggcctcccaaagtgcagggattacaagcgtgagccaccatgcccggcctgtctttttggttttgatgggagtctgaggaccccgacccctcctgctctccatctttgagcctctggcatcctctcacacccagaaatcagttggagtaagtttaattggccctgctccagctggcctttgaagcacaagtttaaatctccaccttctgtgcactgaccagagtctaaaataaaagttgtcagtaccataaaggaaaagggatccacacaggtagccttctccttggatacaggtacatcttactgtaagaatttcaagtcctggctgggcgcagtggctcactcctgtaatcccagcactttgagagaccgaggcaggcagatcacttgaggtcaggaattcaagaccaacctggccaacatggtgaaaccctgtctctaataaaaaaaaaatagaaaaatcagccgggtgtggtggcacacacctgtaatcctagctactcaggaggctgaggcaagagaatctcttgaacctgtgagccagaggttgcagtgagccgagattccaccactgcactccagcctgggcaacagagcaaaactctgtctcaaaaaaaaaaaaaaaaaggcaaaattaaagaatttcaagtccctaatttactctaaccaagcattttcagtcttacaaagaaatctagtgcacgacacctttaaaatgcctagatttccattgcctaaagtaaggtgtgaccagtgaaacaacagcagagaatcatgttcctttgctgtggaacacataagccccacagttttccagtcagcctaatacatgggtatcccccgaccccatctgcctccttaagccacagtccttggtggggaactctaagggggacggagtcagtaccccggacagggccacatttgcatgagacatggctgtctcacaggtcacagagccattacaacagcttactagtttttcatggatttgttggattaacaccttaagcaggttttttattgttattttgtttgtttgtttgttttgagacgggagtttctctcttgtctcccaggctggagtgcaatcgcgcaatctcggctcacggtaacctctgcctcccaggttcaagcgagtctcctgcctcagccttctgagtagctgggattacaggcatgcgccaccacgcccaactaattttgtatttttagtagagacggggtttctccttgttggtcaggctggtctcaaaccccggacctcaggtgatccccccaccttggcctcccaaagtgccaggattacaggcatgagccactgtgtccggtcttgagcaggtttttaaaatctccagtggccataaaactagccagggtagctcatgcttttactggttggaataaggagccaaaaccaacaaaataatatttattagggctcgatgcccatttctgtggctaaggcttaggtttggtgtgcagagcctggcctgctcttgtgggctgtggttgctgtgacagtttcgttttctgaatctttgtaatgctcttccaccctgctcgtgctgcccagaggctgatctgcaaacctgggcagtattccacactgaagctcagtttgcaaaccttctgctgtgttaattctggtcagtttcacacagaagtcacgagggcctctgcccaggaccttctattcacatttcaagaatccctttctgaaattctccaactctctggtcaggaggaggagcaccattggggcggggtaggcagctagaggcgcaggagcgaatccaggttccttgcgtggttcccagcctctgctgacagcacctcagctaccaggtggggagtggaaattcagcctgcttagaggactgacctctacagttcatatttgcagtgacataaaaggcaaagaggagctggcatggtggtacagaaggtatcagtcaagcgcaggctcttcagaaacctagaaactaaaaagagatgcaacatgtgactggccatcagccagacatgtctagggtgagaccagtgctcagcaccacccgccaaggaacactgatgagttgtgggacattatggtcggccaagtgaggaatgattgcagggaccagagaagaccaaagatgccagatgtccccagagtttcttgagggctgggtttcacgtctttgcttgtcctttttgtccccacttgcctgcaccgtgcctgactcatccagtggggaaggtgactcaagaagttgtttaagcctaggcctaggcagtccacttcgggaggtgggggcactccacactggggggccctgcagctccagggctggtgctctagcagatccgctcaggcacggttgggtgaccgtggggtcaccgattgcgtagattatttctagggcagtgctgggttagaaatgtctgtctggaaacaggacacatcttgccaccacaagtccacacctggccttggctgctgcccgctctctgcagcgtggatttcctttgcccatttgggccagaaggtcaccaggagttcatcactgcttagtgtcaacttgacatcttcagcttccagacagaaaacccatgctttactttgtacagccctgtcccagagttagtaagcctcggcttgtcacctgcttgcaaagggtatagacatcattctgggtagttctagaggatatcgcaacaagtgcgtttgaaggttcagcacagctggaattgtacggtagtgagctcttcaaaatgaaaacagaatgaccggatggccatctgtcctggaaactgtagaattgaataaatcactgaaaatagaacacttcttggaggctttcttcagaactgaactagaaacaaggtttccaggctcccaggtcagtagaccaaaccaacttccttagatttttttttttaagctgtttgcagaaaactgggtggtagcgtgtctgaaccaaacggaagaatagccagcggagcatggactgttccagcacgggccagatggccagctgtcgagagcagccctgcccagattgcggtgggggctgtgccagcggctccgcagggcccttccaactctggagtgtctgtagttcttgtgaaaccaaaacgttgactacctgcctctttcctcgggcatcgacgtgctcatttccaaagatgatggtgcaggtgaccttttccatcgtgagctaagagaaggttaggaggcctgaggggcgggccttgtgtcccctcctccccctccacagcccctgaggtggagcttccctcacagaccccatctggtcgagcctacggctgcccagtgtacactcagtgatgcttataccaaatagggcatgtgcgctggtgtctgttggggacagccccatccctaccttggagtcggcagagaagcagcaataagcattaggcgaatgattgaaagggctgctgcgccaagaggccttcagtccccttaacgtggctttccaacttcctgacgaggctacaaaggctccgctcacaaaagaaagccaataatgtaaataaatagaaaacgaagcctccacgcgtggtttttaaagggggatgatgaatgtgacaccacccacagaatgcattagaatctggtttttctgtgctttgtcattttactctgataggaatttttgttacctaactctgtgcataacttatttaatgtactgtataaatgaaccaaaactgttaaatatgtatttagtttgttctacttaaagtagtcaataaaaaggctatattcctt

SEQ ID NO: 10299 - DNA, 47 bp, Homo sapiens
acgcttggcccggaccccgcccaataaagagtgcgtggcaaccctgg

SEQ ID NO: 10300 - DNA, 289 bp, Homo sapiens
gtcaggctggactggggggggtggcactgcgttgggggacagctctctatctaaagagtcaagtgtttggagctggcagggtcctcctggaggttggagctgactggatgggtcacccccataccctttctgggccaggagaaggtatttgggacccatgggaccctcattttgaactgcagtttgaatctccccaaccactgccagttcagagaatgccagtccagctgcctacccacagggccctactttatggcaataaaggtgatgccccacttgtgtccatgcc

SEQ ID NO: 10301 - DNA, 752 bp, Homo sapiens
cggacctgaggtgtctgtttcctgggcaggcctgatgctcctgtttgggtccagggcccctgggggcagaccggtgatccttaccagtggaagcgagccatcgagccattggcagaaatcctgctgaatgtcattcagaaacctcagcccatggtcgccctcctgtgcccctctcctgccggaaagccctgcaacattctagggttgggggcagggccatccacggtttctgggcagagccatggtggcaggagagagatggctgaagcctgagcagcccagagtcccgctggtctaggctggtggtcggggcccctgggagaggagacagggcattcctccccactctgtctccaggctgcctctgggtagcctctagtctgctgttcttcaggaggcctgccataaactcttcggagtttacgtgttgcaccttttcacagacggttccccacagcatcctcagacagctctgtgatgtagcttttaggaggcactcaggtgtcacggctagactgcagctatgagacagatctggcttcaaatccaagagttgccatgcacttgctgtgtgaccttgggcaagtcacttcacttctctgagccccgtgttcctcatctgtacaatggggcttacgatactactacctcatagggttgtcctggggatccagtatgatgaagtgcgccaggggcttggcatggtgcccggcacgcagaaagtgctcaataaatgtttttgtcataacgtg

SEQ ID NO: 10302 - DNA, 803 bp, Homo sapiens
tggggtccagcgctggctgggcccagacagactgtggtggcctgcgcagcgagcaggcgtgtgcgtgtgtggggcaggcaggatgtggtgcaggcaggttccatcgctttcgactctcactccaaagcagtagggccgcgttgctgctcactctctgcatagcatggtctgcacctgggagatgggcggggggaggggggcgggcggggtgggaagtgcctgctgtttataatgttgaatttctgtaaaataaactgtatttgcaaatccaacattgagcttctggactacgctgactccactgctgaatcctcaatggaaagggtcgactggttgcagttgaaatgacctgaaatgtagcctctgtccttgtaagtcagttgacttgccgcacatctctttgtgtacttgtacggtactggcagaaaagtcatttttcaaaagccataggcttttccttgcccttagctgtaataatgcatctgattttgatttcctccagagctgtgtttctgtccatcacctgtgtattggccctgtgtttaccactctggcccactcctcacccccttgctcccctggtcttctggagtttgtgacattgatttgaaatggatggtgttctcttgagagcaagtgagattgttagaattaagttccaactatacagttttctaacatagctataaggtccttgttgctgtttgtgataactgatagataactcattggaaacgtgcatacatttatattcagatgaaattatggtttgcactgtctattaaatatctcgattaattttc

SEQ ID NO: 10303 - DNA, 350 bp, Homo sapiens
cctgacaggagcaatggccaccagcaggtgaagggcatcgctgccccaggcctcaagccgggcacccaaccctggatgccaccccccagcgggtaccagaggaaagctggcagcaggcgcctcctcccccaacgcatcccagccagtgccatgtcctctgcaggtggagttactggcctactccttccccatgagccctccctgtctgcactgcccaggccagagggtagagcacaggggtttccccatactacctcccctccccaggacactcccaggcttgggttttttctataggtttggcggggggccacagggaggggaccctgacaataaagagattggatccc

SEQ ID NO: 10304 - DNA, 175 bp, Homo sapiens
gcgcccccactcccggccgcgagcaggcagggcttcggggacgcggggcgcttctcgggcgggtgatccctaacagggcggcttcccagggctgcaggcgggcggaggttccaggagatgggacttcagggagacctggcttgggctaaaatcgaaatacaatatatataggctg

SEQ ID NO: 10305 - DNA, 3598 bp, Homo sapiens
cttctgagaacttgcaccatgaatgggcaagaacttatttgcaatgtttgtccttctctgcctgttgcacatcttgtaaaattggacaatggctctttagagagttatctgagtgtaagtaaattaatgttctcatttagatttatctcccagtgatttctactcagcgtttccagaaatcaggtctgcaaatgactagtcagaaccttgcttaacatgagattttaacacaacaatgaaatttgccttgtcttattccactagtttattcctttaacaacaatattttatgtgtgtcaaaagtctcacttgggagtagtgtttttttcttttagacattctgcagacatgcagggaagtcctttggtaactgcaatatacaagattttcctattaagcctcttggtaagaggcatttgttaaaagtgcaagcttactcctgcttctggggatgtgagcaaaattcgggcttgtgttctccctctcattttagtctgacttgactattgtttttcctttctggcgcatgaatccatacatcattcctggaagtgaggcaagactcttgcatctctacaaagtagttttgtcaatttgaattcagggaaaagttggtcacagcctgcaaatgacttcatttggaagtctgattgtttcagttgcctgacaaatactacactttacaaacaatgttaacactgtgattccttcattgttttaagaagttaacctagggccgggcatggtggctcatacctgtaatcctagcactctgggaggccgaggcaggaggatccctttagcccaggagttaaagaccagcctgggcaacatagggagaccctgtcttttttttgggcagcgtggtgggggataaataaataaaaggaaaaaaaacttagcctagaattagaattaatttaattgaattcatctaaagatgtctctggtgatttttatatgttccgctatataattgatgctttatagttttatcataatccaacaacttcagttatatttaattattgttaaggagtttaagactagaaagactagagtgctttctagtccaaatagaggtcagtgaaacagcttttgacatcagattttcatttgagagggagagctgtggtactggctaaaaagaaaggaagataacatccagtaaccacaggaatatattctctgtgaattaaaagtcttcaaagttatcatttctctgacatatgttggagtagtcatttccattctttacattgtcatgaactggattgataaccctcatctgcaatattttcacccctaaaatttttaacagggtttcctttttttctcacgactatttaagtttagattgctccattattaactgattaatgcactttgaagttctctggaattaattattttaacttggcctagcttcgactgtcaaggtggctgttataaatttgacttcattggcagtggatgaagcctaagccagctgagtctctatcatagctgaaccctgaggacagcctcatagctcatgtatcagggacttttgccacatttcagaggcatagcatgaacaagtaatattaagccaagaataagcagcagaaccctgttccatatggaaaaaagaaaaacaattttttgtccctaatgttcttccttttacatcctggaacaacaataaaaacatttttttaaacttgtctactgtaagatactgccatcataaagcagagacttacatgagtgaaagggttgcctcatcaagcagctcagtgtaaatggggaggctaggctctccccagccctatggtttttttatttcatgtaccccaggaaatactgtgtggtttctaaaagccctggttgttaaaagtagggactctgcctttttgttggtagggagaaaaaacgctattgctttgtcttacagagcgaatgtctgccaactacccgttcattatataagtctgaacttggtaatatatggctaatgaagattaagccctctataaagacttcctgttgaggtgaattctcatactgaaatgtagttacctacaatatttactagagatttatgaaattaaattaagagataatgtaagaaaatacatttttttggttctatataatgcttcatgattcatttagggacctagaaatattgtgtgaaaatatataaatatcacccaaaaggctttctgccctatatttttaaaatacagaatagttatatttgaagtagccctggccctagttctatagggcttggctatttaatatttttatggaagaagtgtttagttctggaaaaggtaaatgcttgtatatatttttgcagcctgggatctccctactccattttttcctttaatttaagtggccacatgtatatgtcttccctgctgtgttaggaaaatgggggctggatatcccaagaatcagaggttatataaaaatactgcaaatagaccgcagacataaatatctaccaaatgctatcttaaattttggtccaaactgaacatatggaaatagatttattgtaagtatttacttagagctttttcttaaatctgaactaacttgcttttagaagtctttttctttgtaagcattgtaaatgctaataaatcctgttaatttttttttttttttttttttttttttactgcatgttacattgaaataaaaacaaagtaaaatgagcaattgccttattgttctgctcttttgcagggggtgggggttggggaagacagcattccacagcctggtcaggagggaaggacctcacttgtttcatcaaatggagtggtttaaaactgatcaagcagctcataataatgaattcctgctctgtcttttattatcttatgtcagagtgcagcaaaatctcatttcataagacttacaataactctatttaaaattcaggtattgtactcgggaggctgaggtgggaggatcccaggagttcaaatcctgcctgggcaacatagcaagaccctgtctcttaaaaaaacaaaaagacatattcaggtactgatttttcatcaagagattgacataccaatgatcagaaattttagtgaaacttgactcaactatacacaaagttctcatcctaaatgaactatttcagtcaagcccactctaccactttttacttatctggttaataatccgaaatgttaccggggttgactcacggaattaaatttttcctctatttttatatcctttcctgttgtggatgtaacttacctttctaaactcctttagagttaacgacttctatttagtattgttggtatctccagcccccctcctttttttgtttttcttttagttatttactttgtttgtataatttgctttcattaactaaaaatggaattggcagcactggattgtatattactgtattaagagtacctttgttttcttgatctgttacttttaatactcaggtaatgctacaaatattacagggagtcaaatgcttttataaagttccttcagtggttgcctcacttgcgttttcctacaagatgtaagactgtttataattaaacttttttggtccttc

SEQ ID NO: 10306 - DNA, 333 bp, Homo sapiens
gccactctcttggctccctgtgtcattccttaatttaatgccccccaagaatgttaatgtcaatcatgtcagtggactagcacatggcagtcgcttggaacccactcacaccaatccagtgaccgtgtgtgggctggcggctcttctcccccaccaacggaacccctgtgtgcaccaaccttccccagagctccggagcgccctctcctcacttccaggttttggagcaagagcttgcaggaagcccgcacccagcttccttctgaccttcagttcactttgtcgcccttggagaaagctgtttttctttaactaaaaataaccaaaatgctt

SEQ ID NO: 10307 - DNA, 447 bp, Homo sapiens
gccagcagtaggggggctcggcctgggagtcgggcggccccggtcaggccctgcccagagagctcctggttcctgaactgagctgcctctaccgtggtgggctgggcaggcatgtgcccccctagtcagagggcaccaacccacctactctgcccctgggtggatcctgggccggtcgtgttagggttgtccctctgggtgctggctggtgggatgggggagggtggggagcagctcccagcacccctgctgtgtggttcatcttttttttaggcccctgcctgtctgcccatctgcccctcacccacccgaggctctgcccaccgcctggacctgcccacccctgaaagactggcccctggctccccgcccctcggtctccacgtggtgtatggatctgtggtcattgtccctctgcagaataaagattgctcaggcctgcctggc

SEQ ID NO: 10308 - DNA, 3126 bp, Homo sapiens
gcgtccaccggccgcgccacgaaccccttgccgatcccgatccctgtcgggctcctccgactcctcgggctggacaccgaaacctcccttcttaaagcgtgtgaggttgggtgatagccgttccttccccgacaccctcaatttccccatctctgatcctctaatctgcctctgaacccattcacccttcaccctcactcctggtccccatacccagcatctaatcatccatgccccctactcctggcccctccatcctttcttctctggtccccatccctgtctctccctttcacccttgccctccagtcctctacctctggcctgcccctatttctgaaagcttcttccagtccctgatctggctcattccccaccttcaactcccaccttacatgtctcacactatcccatggttggcattacactcactcctgttcccttattcttcattcccagtaattccctaccaaatggtggggaccctgagcccagctctgaccaggtagagcctgtgcagcctgggctgctgtcattgccctccagtaagggctcagggttttgcttttagtctccccttccttctgccttgggggcggtactctgtggagctgcttaggcctggaaaggtacagtatgtagaagaggactgtgagacgtgagttagagggagaagatggagggaatctagggaacgaggcagcctattggagatgcggacaggacagacacgttgagaagctgcagggagcagggcaccaagggagtgtgcactgtgcttgctcagagaggccaaaccctgctcccaggctgaagcctggagtctgcccccacttcccttttctataatccacccttctgcaggccctgaaatctgaagggcttagttagtaccttgccactctacccccaacacgtcacccgagtagaagctgggcaaggccctaccatcctggccgtctgttcacaagcccaaggtgctagaactagcttaggagacatgcaggccacagggcttctaggcagggaaagggcacacaccctaggtcagcgtgcagagcagtgatgctggaggacacaccatggggtgaagccatcccaaggctgacagctcagtcttcaccttgcctctggccttgtatttcacaccctgctcagtatggctagccagcagtcctgagtaggagtccaggactcccactgtctcaatctgcaaattgttcctatccaggttcagggccttcagggggcctcttttcattttctcccacaggcctctctttctttctaggttgctggggagaaatgggtaccctatgatccccctccccttctcctccagtaaatacctggaagagggaacctgaatccctgggggagacagaaggggcaggggccaccagcctccccttcttgtggtgagactgaattttgggctcagacaccagcaacagcctcttgggatgccctgagttgcttcccatttcctctttctagccgtccttttctagtgtgtgctcactcttcctaggaacttttaagacttcttggtacctatgaacataggtcctcccctcaccccaactctaggtttccaggcctcacagccaagctgaagcttggagaaaactctgcattcccatgagggcaaaggcagctgccctccctgaccctatagccccaggcctcatggggggtatgtggggaagggatggggtatccccatggatgctgggatgaggacagaggaagacctgatggggtctcctattccagggaataagccaaattaacactaaaaacggatcaaagctcccacgccagtccactagggccccagtagttgacagccttgctcctctcccaagttctccttcagaacctagttgcttttattcttccagctaccacttgggcacttcacagccagcctagggtcttcggcacctccaagagctgaatctccctccaacccttcttgcctactcctcactgccagctgggacctaggctcagtcctgtgtggtgcccatgatccttctggtgggggaagagtttaagttatagggcatttggctcaaattttaaaaggccttttgtttacctatatttctggaggctcctgtattctagaacccaatctctcacctgcttggttgcaaggctcatatttttttgtacctttcctatagattctgtagcatttgagtgtggcaatattttaattgtgtatagatttctaagaaccaacactactcagtctcctgctagtctgactcctgaagcatcagcccttgtcatactgtattgactgtgtacgtgcctttcaccttgagcatgcttcaggatttttttttaaaccacagaacttgaatacatgagggaaccagagttcaaagtcctatgcaaccttaggagggggttagagagtctgttttgattgatgttttctgaggccctagaggagtttgtatcaatttgtgagtattaatgtcagtactaccagcactttgccaaaactgtcagagggacccgtttctagagtgagtcccagttacatcaaacagtgacttccagttattccccagtaagtctgagtggttccttcaagctgggtgtctttccagcctttgccagtctagccccagcagggcaccgtgtatgaatgcagtttggtgctgttttagagtatgcctgctccccagccccctgcctggaaccctctgagcaacttgctctgacctataatgtcttaggtgcaacacggaccccaccagagctcttggatacccccctagatccatgtggctttatgtgaggggactgaatgcagacacaccatagcccccttctactactttccctctcgccctgccacctagttccacatggaaccaacaagttgagtgcatccctgttgggtgttttgtgttgagactggctgaaatgaggagactttgaccatgtgacgtgtcaacagactcaaggagacaaccacctcaactgggtcatgtggcatgcctgtgtatgtgtgtaacagaattctgattgttagactgtaatgctattcctctatgggagaaaaaaattaatataaagaaaaacaaataaaaatatatttaaagc

SEQ ID NO: 10309 - DNA, 743 bp, Homo sapiens
acatgatcctgacctttacctaggattcctcctgctccaaactttgcccatcctctttgccccctcaggagtgctgagggccagtgttgacccacactaccctcccttgaccagctgtctgggaccggaaaccagctttgtctccaggtagagacaacatcctgtgactgccaggcagaaaggacagggcccaggtcagcctcagtctgctgtgcctccagactgcagagctctcagaacccagaacagagacgaaaaggctacctctcctacccaagttaagtgttcaaaggggatgtgagggcctccactgaagcagggaggcagctgtgtaatcctatgtcagctctcttaggaagccccagtacttatattgggcatgcacttgcccttaaaaacaatgatttgtgagtccaggaacaatttactatttttaaaatattttgctgcttctgttctgggtctgaattcccttttgtgccagatgccagtactgtctgcccattggctccaggggctgtatgggcagattcagtctccagagggtattcagatcatctgcttctttgaaggagtaaatgtgttttgttcctagggccagaggagcttgtcttccttgtcctctgttcccaccctcccctgaacagaacccagcccataagagacattctcagatgaaactctgttttcttgccccagtcaggctcaagccctgtggttgtaggaataaagcctgtgatctc

SEQ ID NO: 10310 - DNA, 245 bp, Homo sapiens
cggcctgaccccctgggctctaaagaggaatgtctgctgttgcacatctggctgaggccacctgccccgatcctgccatctctgcatcgccccctgctgccttcagccttccctgggccctgaataaacaccacagccagtttccttctcattcttttctttggggttcaggaggaaaaacacagtcctagggacaaaagccaggtccacagcagtcatttttaaaataaagttatttaatagtc

SEQ ID NO: 10311 - DNA, 548 bp, Homo sapiens
ttactctccagccccctcagaaggggctggattgatggaggctggcaagggaaagtttcagctcactgtgaagccagactccccaactgaaacaccagaaggtttggagtgacagctcctttcttctcccacatctgcccactgaagatttgagggaggggagatggagaggagaggtggacaaagtacttggtttgctaagaacctaagaacgtgtatgctttgctgaattagtctgataagtgaatgtttatctatctttgtggaaaacagataatggagttggggcaggaagcctatggcccatcctccaaagacagacagaatcacctgaggcgttcaaaagatataaccaaataaacaagtcatccacaatcaaaatacaacattcaatacttccaggtgtgtcagacttgggatgggacgctgatataatagggtagaaagaagtaacacgaagaagtggtggaaatgtaaaatccaagtcatatggcagtgatcaattattaatcaattaataatattaataaatttcttatatttaaggc

SEQ ID NO: 10312 - DNA, 2392 bp, Homo sapiens
gcagcccagagccctctctatccacttggtctggccagccaggcccttcctcaccagggtctgaggggcagctctggccagtgctcaccagggccagcagggccctaggctggggtcgtacagctgaagtggtgggtgcattggcctaggctgagcgtggggcagggaattatgggggctgtgccccagggtgggtgtctggcacccagctgccagccttctgtcctgggcaaactactccctacttaagggaataggccaggctccatccggaggcagggaccatgccaggaggagcccctgtggtcacggcatcctgtggtgtccatgaggtaccacagctccactcctggctggaacccagcaccctctgtgggaagccagcactagctctcatcccccatccgggagataccaccagtcctggtccccttttgccaacacctgctggtcagatgtccccctacccccaccccactgtcctccaaggctacaggacccctgcttctgacacagtgagcaacaagcctgggtttccctgctggcagacggcagatccctcaggaaacctgctccacttgtcagggtctcttcggagacccaggatttagggtcacatgctgcaggcagggctgtggcccagctgggtctgacaaggacccagctgtcacatcgtgaatatttaaatgtcctgtcactactgtcccattttgcaaaggctgcttgaggctttaggtgaactagaggtgactgtcttggtgatgaggccagcatagcggccctcccccaggcgacaaggaccaaggtgctgctaaggccactctagcgcccagacaccccagtagctgagctctgctcctatggctacagagctggggcagaagctgaccccatttctggaggaagatccgagtttgtgaccgtcctccactcccctctattgtcactgtccccagctttgctccagtctgtcacttgcagcctggagctcagcctcaccagttaggtgaggcagagatggctgcagggccaacactggcagagcctgggagtccttcggaaggggaccagggcgtctgaagtgctcagtgcccccactactctgaggccgactccagctactctgaggccgactcaatctctcggctggaagcagtgttttcccagagcttggcccttgctgacctcgctcactgggcccatcttcccacactgctcttagaaggacacccctaccggtagcagccccaagctgagggggctccctttttgaccttcactggcccgcccttcactgtctccagcaggagttcctagggcttggcctgccttgctccacagtacggcggaggcagccctgcttgtcactgaggagccctagacaaggccaatgggttcatcaatgcccactggctctctgccaaagccaaaaaggtgtcaggcagtctccagcgtgctggccgggtctcggatgccacccctgctcactgagcctgcatgggccttgcccccgaccctgtggtctctgggattggggtcggcttaccctgtagcacagacagggactcctgctgccctgggagctgtctcaagcaaaatctcttgtcccagaggtgcccatgtgggtccgctgtgtcccctgtcatcatccttgttttttctcattttggccaagggcaggctccctgggacaggcagggaacaactgcggagatattagtgattcataggtttgtacagtgttttatactttgcaaagcactttattagctcacacctgtccactcacatgaaactcgtgttaggccctgggaggccgacggtaactctcaccgtgccctcagatgaagcacagagaggttgttacttgcccgggccatccagtgggctggctgggtcttgtgtccccatctgtggacccctctagggtctgagatgagatgagaagtgtctcctgtatccacctcttcctggcctcccttcccccacttcctggtccctgtccactcctcaggttggtgctctcacttcttgaaagctctaggcacccccgcctcccgccaggctccccattggctcctggcaggccagctgagaatgaacaggagatggaggcaggcagcccaggctgcagaggtgagggatgtggggccaggcccagagggctcagcctagaggcttccaatctcagattctcctgcctgtggtcatctgtttgtccatcaccccaggacagggcagacagaggggcaaagcactgggggccccagagcctagcttcccctcagcctgggggacatcacagcatttcagtgtcagtcacattttaaactgatcagcctttgtataatgttttttaaatcatttctaaataaaacagaaatacagagtg

SEQ ID NO: 10313 - DNA, 347 bp, Homo sapiens
cagccacagccaggagcacacagacagaagactgtgtcatgggtcatggcccctccgcacacctacaggtttgccaaaggaaaagcctggctctgttaggcacccaggagccccaggtcggcgggtgttcccaggaagaggaagtaaatctgcaaccctggggaggaccccaactcacctgggaatgaggcaaattgcatttgcttgctccctatggaatcacccagaggggtgccttgccctggctgagggacatgtactgcctctcatctagaatttattttcctagcacttcaccacctccttcatcttctccttcaacaataaaccctgagatctttgcattc

SEQ ID NO: 10314 - DNA, 129 bp, Homo sapiens
tcaccctcggtgcttcctctgtctcctctttctccctggcctgtggttgtcccccagcctctgccaccctccacctcctcggtcagccccagccccaggttgataaatctattgattgattgtgatagt

SEQ ID NO: 10315 - DNA, 21 bp, Homo sapiens
acatgctgatttttggagtag

SEQ ID NO: 10316 - DNA, 73 bp, Homo sapiens
ccatggttgccaactacatctgtcccttcccatcaatcccagcccatgtactaataaaagaaagtctttgagt

SEQ ID NO: 10317 - DNA, 2739 bp, Homo sapiens
aactgggcacccaaaactcatgggggcacaatcctggggcacctgcaggaggagcttcgcatatttaaataaataaacctagcatgctgaatgcacgtgacaccgactgacttcagggatctgggccaggagtgtggtggacattggacaaagaggccattttggctgcgggaggacactctgatctcgaagcctgccataaaggtagcaaatagactcttgggattcccctcttctgtgcacatcgttgaatgaagagagtctttttgcacaaacttcacttgaaattgtgccactgatgataaacggaatgagagccaaaaaagtttagttggagacagttgtaaattcaatttggagtttatttaattgacttttctatcacgttggggcacatgccaactccctggtttcttcctggcatggtgtttgggcagcaggcatcattttccttttctagcttcataggaatattgtgagctcaccatgctgtggaggttgggaaagagcagagtcttggctgccctgctttctccttaggactcttcacttttctcaccacatctcttgcatgacttcatggtactggggacaagtttgtatgccttcaccccagagctggctgggttatggcttttgtagcagagcccatacagcctatggaagaactagaatctcactcacagtaataagaatctaggaggaattccaaaccgaagcaggcagggtctggaacccaaaggacagcattttctacccacttcttaatattgacagcttccccgttctatttaatgtccaaaaatgtttcccaaaatttcaaactctttcactgtaaagatttgttacaaagaatgtggtttggggaattaccttattttatattgttgtaaacaaacttcaaattctacatgtgcgacttttctccttcctgaagggtgtttagtagtcagcgttttcagaattgttttgttactatactttaacattttacatttcctgtttgtattattttgtgagagcaaggtgatcatgctgcttaaggtccaggtacaacctatttgtaccttttgagacaatatttgtgttacttttgcaggttacggttccacatgtaattgctatattttgttttgtttttccttactaggcaaagttaaaatgttccatgctttgaggagtgacccatttcactactttgttttcttatcactaaaggcaaaaatcaaagcacagttgtccattaacacttataagttaattatgggtttatgagtctgtaatgttatatgctgcaaacatttactatgtaaacgtgaagtagccaataatatctcaatagtagtaacagtatctttagcgacctttggaatagttaagcacaggtcattgtggacatgaattcaggcctctgtactaaaatctatttcagggaatgttctgtctagtgatttgctcaccatttgatatataatgaattataggacaagtataagctgatctgctatagctgtccatcagagagaatacacgtggctataacatctataacaaaacgacgattcctctacaagaggctgtttctcactgctaacgttggtgtttctggcgtgggaagaaatgcacaggcgtgcatggcatgcacgttcagacagctgcattgtaagagttctgtcatgcagtctgaaaagggaagaaacaggatggctttctgtagccacacctgtgaggcgtgatgattgttgtattattagattactgatttttcttttctgaaaatacatttgagttttaatcacatctgtggaagctgtaacttttaaggtagtcaatttcatgtcttgttcaacgatgtaagcagaaactgaattgccctaattttgccaactggccattattgggattattgtttaaatttttggtaaaggaagtaatctcctttcattcattgtgacttttgttcttagggaagcagagaagactccccaagttcttataacctcattgtgcttccctaatttaaagccatgttgaggggctccattcccaattcctgggtcaaggtgaattaaccctatgttggagcactggaaaccgttatttgcaaacattgctgttaccatttagaaatatgtgcactatcagctgggtgcagtggctcacgtctgtaatcccagcactttgggaggccgaggcaggtggatcacctgaggtcaggagttcgagaccagcctggccaacagggtgaaaccccgtctctactaaaagtacaaaaattagctgggcgtggtggcggacgcctgtaatctcagctacttgggaggctgaagcaggagaggtgctggaacctgggaggcggaggttgaagtgagccgagattgcgctattgcactccagctcgggcgacaactgcaagactccatctcaaaaaaataaaaataaaagaaaagaaagaaatatgtgcactacctaagttttgtctttagaaaaactatccacctataaaaaattaccttgacaaaaatagttccggtttgactaatcattttgtttctttaagtggtaagtgtatgcaaggtggatccttgatgagccaacattgcactgtggatacatatctatgtttacgcgctattagaacagaaggcgctgtatatagaaatgttgctttgaagcaatatttgcaaaacacgcagacttctgtatctgtatttggaaaaaataaaacaggttcttgtt

SEQ ID NO: 10318 - DNA, 52 bp, Homo sapiens
tgtaagagcacaggggtccttatttaggacaaataaaggatggtggattggg

SEQ ID NO: 10319 - DNA, 3458 bp, Homo sapiens
cctctgtgaagagatcctggcatttctggtccaacccaagccagagaaccattaagaaggggccttcattctggattctccgacgcaacactgacgtcccagctgcgacgtactgtcactgatgagagactgggaagggaaaagcatatatatatagatatatagagatatagatatatatacaggaaacaccgcatccttgcactgctgctggggctggcagagcagttggctgacagcaacaaccgacatctgaacacctacatttcctttgcagacaaattgaagaactggtgggatttttttcaagaaaaaaaattatataataactataatcccttgctcacccctttcccccgccaaataagaaacgcaagccagaccacgatgattgtagaagtccctcccgccctggttctgcacgttacagttagcagacgagcaattccatttgttcttctccagcatctctaaggcccacttgaatgcaaaggaaaacacttgcacagcaaagcaagagaagtcacagcagcaagacacgcacagtcaaccattttccgagaaaaaaagaaaattccccacttggaaagaaagaggaggaacactggattcttactttctggatcttgacactgggctgcaaaacctaccttcctctctcccgcctcccctcaccctcaactctcaatgtcttgctgtcattttctgtctcggctccctcctcccccttcccccttcccccaccccacacccttcaccctctgtgtcctggtccttctgagggccactgcagatgactctcctttgaaatgagaaaaagaaaagaaagcaagaacagaaaacgaagccacaggaagggaagtagacattgtatgcttatggtttctcattatgaaggtgcagcttgtaggaggtttgtacggatgtgctttgaagttatgtatattacatataacaggaaaaaatattaaaataaacagtgctggtaagtatgaagctgacattctaaaattataattatctgactgtgattgatgtatcctgaggttcctagatctcactgaactggcccagctaaggagacctggactctgggtgtgggttggctcacagtaggggctgacgggttcagtgtagtaatactgtgtgtggtgtttgtaattggttgattggtggggaggggtggggggccctaatggagaggtgtgggtttggcaagaaagaagcaacacagatgtcgtccccaaaatgccagttcaagacaccttctccctgcccccctggtagtaacagtcagggcctggtctgtgctcaggtactgggtcccagtctgggactctgctgctgaagttgccacagtagaggtccctggcttagtccttatctccctacggggcttgccttggttttcagtcttctctctctttctctcttttttttttttttgccacattctgcccttccctgaccccattgtaataaccaactccatatccaaagggaggtggtgctctcagccattgtagaagatggtggctttaacctgactgtctaaaaattcccagctaagccttttcctctactctcttccttgttctgaatcatttcttcttctcaggccaaagtagccatggtaaggaggcttcatggggcagaccctgaaagatcaaaactgcatttgcaaagccctcccctgtcccaggacaaagctgagactgacgggtgatgttgctcataggctccagctctgcataagaccttggcttggagacctccctctcagtcaacagctgaactctgagcttgtgcccagaaattaccccaagaccacaggaacccttcaagaagctcccatcacaagcttggcattgctctctgccacacgtgggcttcctcaggcttgtctgccacaagctacttctctgagctcagaaagtgccccttgatgagggaaaatgtcccactgcactgcgaatttctcagttccattttacctcccagtcctccttctaaaccagttaataaattcattccacaagtatttactgattacctgcttgtgccagggactattctcaggctgaagaaggtgggaggggagggcggaacctgaggagccacctgagccagctttatatttcaaccatggctggcccatctgagagcatctccccactctcgccaacctatcggggcatagcccagggatgcccccaggcggcccaggttagatgcgtccctttggcttgtcagtgatgacatacaccttagctgcttagctggtgctggcctgaggcagggcaggaaatcagaatagcatttgcttctctgggcaaatgggaagttcagcggggcagcagaatcagtggcattccccctggtgcaggccggtgggtccactccaactccccctgagtgtagcagcacactttccatacaccaggttctttctacaatcctggtggaaaagccacagaaccttcttcctgcccttcttgagagttccccctctttctgggtcaagagctggagtggtggctccatcctctctgggccacttcggtctaggaactcatctttgcaggaaccaggagtcctgagcacactgaacacacctcagagggaggatccttgttgtggattttgcacctggctttggggcaggggtgaagtgaccaggcttagcttgtggagtttatgggccaccagggtttggggaaatcaccatcccgcggatgctgtgacctcccttctacggagatgcaggcagtgccacgagggaggaggggacctgcaaagctagaatctagggcactgtttcctccccatccttctctttgtagagaatagagacgtttgtcttgtctgtcttcaacctacttttccttttctcttttttgtttctcatcctctctgtgccacctctccacccaggaggccatgtagcatagtggaaaaagtccctgagggcggttaggagttctgggtgaccatcctggctcagctcctaactcaccatgtgacatcaggctatccccattccccctcttgggcctcagtttcccgacttgcaaaataagcagaaagaaccagatgctctccagggtctttttctactttgctatctcatgggtcttcattttctcttattttgttttctctggatcttttccatctgagggtacaggaagtaccaggacctgtttcagtttttgaatcctgcaagcacattccaagactggcctgaaactgcatgagcaacatcactcgaaataattttttttttcaaaagcaccttaacaaccaattgcgatgctgtcctgttcctttttactcacacccttctctcctttctcgtccccatgctcccccacctcagtgctccgtgctgtatgcgtgtgctctctgttcttgtatactcaatataagtgaaataaatgtgtttgatgctgaaccat

SEQ ID NO: 10320 - DNA, 1186 bp, Homo sapiens
ctcggggagcgctctcagctgcgaggggccccttcccacagggctgcagtcctggcctctccatttacttcttcccatcctgggacctgccagggcagcaatctctccaggtcctgcaaagatggagccagaattccctttttcactgataaatatatttcttcattgccaaagaggctgtacccatcctgaaggcacatttgtgggttccccatcagccaggccttggtgctaacctggctgaatttcacacaggctcttacacacacacgctcctaggagacatctgcctacacggcaaccatatttcctctgaatgagaaggaattgaaccaaaagtccaagaaagaactgattgcttgttccataggagcttaggaaacaagaaaccctggattgcccagggggtctgagaagttggttggtgactttttttgcggttaaatgaagggtgatggggagatcagcccgaattgccgcctgcctcttgctaaataggagcagaggacttggcctgcagctccttgggagcccttgattgggaagagagtttcaagggaggcagctggattcaatctagcaggtggtcagcttcagctttctccatcgaaatcccattctcctgtccagaggcccagtgggtcatctcccaaggtgggtgtggaccctggcctcagaggccttgctggtgctgtcacctcccacctgttccattccgaggcctcacccagaagtgggaccctccccttcctcaccagagccaccgtgactgtttctgatgacctggagagtcaacaacaaccagaaaggtttctgcccagagcaggcttcttaaggcctttacgaagttttgtgccttccaagtgctgaagaagacctggtcagcctaaatcttcccagtcccgctgtggagctgtcagtcaccggagtaatgagctcctggttcctcgggagtccttcgtgctgtgtggcagggttcctctctagacaagtacacaggccctgccaccctgacatcaaactgttgtactatgatcacagtccctgtgccatccttttccaagactggggctcacaccatgtttttgaatgagaatccctgctggttgagacttttgcttccacttgtttccttggagatgtttttccaagagcataatgtacattaaagtcttcgagttgagac

SEQ ID NO: 10321 - DNA, 1604 bp, Homo sapiens
gaccatgcaggaggaaagaaacgattttaaatcattaaaaacacaaaaactaagtgcgaacggaacagagttttctcaacctttgctatggttattctgtctagagaccctgagccaactttcaaattgacgcatacaagggctcacaatttggcttttttgggtccctcccagctttaggttatgaagattttactcacaaaaaaaatcaacaaaaatcacgaaactagaaaactttttttttcctcttgctggccgtggtggactagatagatggacgtcggcaactcccggcccagcctccatactgcggtctttttactcgttctatctgatgagaactcacactagcttgtttacaagatgacgacagtccaagggcagccttgggcacctgccatgtccctcctttccccagctatccccgctctgaccttgattttcattcttatgtttttctcttttcccttcagagctcacacagtggtcaccattgtggcaagcggctttctgggtctcagccctctctgcggttgagggcccagaggacagagagatggacatgcgtcccctccctccccccgccaagtgctcacacacaacctcacgcgcacacacacacacgcagatggaggcgcctcactgggaggtgccccgccagccctgggcagtgtcaggcaggactcactcaccgctgagcagatgagggaagttttagtcttggcgggtggaaatgagacgaagccacagttatcacactccagactcctgcccttttattttctccagccccttcttccttcagcaaaatctaggactcccgagtggcttccagggggccgtcagtcctcagccgcgcctgtgtccggtgcccgaggggcgggcggcggtgtctgtatgtatgtgtacatatgcacatagaccttagagtgtatagttaacaaacgcccatctgctcacccatgcccacccagcgccgccgccgctggctctcggggcacctggcaggaggcgggtgtgtgaatagcatatatttttacatgtactatatctaggtgtgtgtacaagtgtgtgtaaaaatatataccttgtgtgtaagcagccctttttttttttggtctccacccccctccccccgccccgcactcctaagggcccatctgcccagcctctgagttttctgttctattttttttttaaccccaattatccttctctctctcctgcccccgcatcccactcccagggtgtcacgagccctgagctgcaatggcccgggcctgcagggcggggtaggggagggcaggggctgagccccgaagccagctcagtacctgaggggctgctctatgctgtgtatgcgcctctctggcatccgagacatcctcttggctggcgcttgctgcagggggggacccccccccgtccccaggtgaaccaagggtctgctccggggcccatttccagcttggccgccgtctgtgaccttgggcaagtcacttgacctctgtgtgcctcaacttcctcctctgtaaaacggggacagtccctgcccctccctacctcacaggcatgttgtgagaataaatgaggtaacgtgtacc

SEQ ID NO: 10322 - DNA, 574 bp, Homo sapiens
gccaccccagccccctgacaccccagcccccgccagtcacccctccccgcacacacccgtccataccagctccctgcccatgaccctcgctcagggatccccctttgaggggttagggtcccagttcccagtggaagaaacaggccaggagaagtgcgtgccgagctgaggcagatgttcccacagtgaccccagagccctgggctatagtctctgacccctccaaggaaagaccaccttctggggacatgggctggagggcaggacctagaggcaccaagggaaggccccattccggggctgttccccgaggaggaagggaaggggctctgtgtgccccccaggaggaagaggccctgagtcctgggatcagacaccccttcacgtgtatccccacacaaatgcaagctcaccaaggtcccctctcagtccccttccctacaccctgaccggccactgccgcacacccacccagagcacgccacccgccatgggagtgtgctcaggagtcgcgggcagcgtggacatctgtcccagagggggcagaatctccaatagaggactgagcactgct

SEQ ID NO: 10323 - DNA, 2518 bp, Homo sapiens
gcatctgccaagaagggtgctgaaggctccagccagctgtcctgggtttccgttttggttccctttcatacagagggttttctatggatcactgccaaacattgggatcatctcctctgtccagaggtcttcaacaggaagatgccagctggcaccactgcactgtgatgggggccctctcctctgctgactctgccgtttctccaggcctccgctcagtgatgagaccaagagatcggagacaagcatggtgctgctgcttctgctgcttctccagaaaatccctgggacacctttgttccagcctggtttcctgggctgggctcaggaaagctgccaaattcagtcctatgttgggtccaagctgcccctgtgctgtttctgtcaagccaggtgtggacattccaagttcatatgcgtgaacaaaagaaaagaggaacccagtggatgtaacagaaccgactccagttgaatgtttagatttttgctaaactgttttctttttcccttttttgctgtggtttgcattcacggcagtagttagcccaggtgtggggaacgagagtgcactgcatgatagcgttctggtgagctgggaaggacccaccactgccactgaggattgttttggaagaaaggaatatttttatcttggggaccagctaagtctctgcagtagtgtgaaattccaaatggttgttttatcattggtttggtttaccaaaaaaaaggcagggaaaaaaaaaaaaaacaaccgtatgagcgcattggcttgtctgccgcaggcacagaagggtagaaagccacagcagggggcagtccagcagactctgactcaactttctaggcacctagcagagaaagataagatcaaaaggtgtttggtttttcttttaatttttattgtagtttttttgggtgggtgggggaagtaaactagactgaagcgatggattttttttttcttttttttctttagtgtttttccctttgttcttgaacacttttgccctgcagcctcagttttgaattcttttagcaacttggattagaggggcccatatgtcagaagctcccagcacctcctacttgggagaaaagtgagccatctgctggtcaggaagtcctccagagaggcagcttttcccacaatggtggcaggaaactttggggaaagcaggaatggtgtccactgctgcggaggaactgccttcagagaaggtggggctggaaaagggttagaagcctcctagctgggattgtctttgtttcacctttctttaaattagaattacagaagcccctgcccagtgaacagataacgattggtcttatgctcctccctttcccccattttttcttttgctgttttgttttttgttttttgtttgtttgtttgtttttttgagacagagtcatgctctgtcacccgggctggagtgcagtggtgcgatctcagctcactgtaacctccgcctcccgggttcaagcaattatttgcctcagcctcccgagtagctgggattataggcacccgccaccatgtctggcttttagtagagacggggtttcaccatcttggccaggctggtcttggaactcctgacctcgtgagccaccacgcccagcctcttttgctgtttcattgctgacagtgttcaacaatatgccccatctttatatatcctaagaaacactaatcctaggttattgctagccaaaatatttttgtcctgagtagtgtcactgggccaaaagatagatcaggacgacagcctttagttttcctgaaatcaccaggtcaggcacaaggagaaaaggttcctggatactgactaacttgggtgggtggatctagccaggagaaagacagtaacatgtgttctgtactttctgggaagatccctgaagccatcacagaggctccccaacttctgagtcgcccatctgttgctgtgggagtgtgaacggatcgctgaaggagagggagctttgctctctctaggtgggcaagtttcctgggctctctgtgttgcctccctctggcttcttcctcccgtgccctctccccgtgtgccccagggggatcagggatcctcaccctcctgaggcccagtggggaagaatgaacatggcttcatccaggttaactgatgctgccatttgcccagcctcttccatcccagccctgtcagtgagcccaggtctggtgcaactgctgcaggatgcctgtagtagggaactctggaagtgtattgggctgaggtgggattttccctccccacagtgcactgagcaatggagggtggtgagggagccatgctgctgaattctggttggcatttccccattatgtaaaatggggtgttgggtagggcagactctgcttgggtttggttgtaagataaacctggaggagaagcacagttgtcccattgaattatttgagcaaaaactactgtaaataacttttttgtcttttgtcaaataaaatttttttttgtttttttaagcagaa

SEQ ID NO: 10324 - DNA, 504 bp, Homo sapiens
tggtgtacagctcccaagtgctccctatccagtccaaaggaccctcttgattacagcacaggaacttgatcgttggggaaccccagccccttggaacttggaagacccgtgtttcctggaccgcgaatcagtgtgttgggcatcagtgttttctgcaagggttgtgacctgaaactttttaaaaaccacccacctttggggaagcatttctgaatttatccatcaccaaccatttcttcttggataccatcaagtaacagctattatttgccaagtggagctgtcatttaatttgatgcacctctggattcagatgaaacattaaattgtcttcctcgattctccatcgggtgtagagtttttaaactatcaatggcatttcaagtcttctgaaacagcatggctgtatgtgcgtggtccatagcacagtacatgcagcatctaataagagtttccattgtagaatgttttcacatacttgaataaatcaaatctttaattgag

SEQ ID NO: 10325 - DNA, 1368 bp, Homo sapiens
aattctatgattgaagcctctaaatgaattgtgcaggagagggagtttgtaaacaactgactacagacattcacattgggtcatctttaaaaagctggactctgcttttggatgcttctcggaggcgagttggattttggactgaagtactgtcgttccattcctttttttgaggtgttatgagtggggctataacatcgccatcctattaggaagagagagaaaaacaggcaatagagaaaagccagtttccatcatcttatttctgagtgaaagtctcaagtgcgcacatcctcatcttgcatatagattgcttctagctgtcctcaatccagggaaactccaaattacatatgccctgtgcttggggcaaattagaaacactacagtcttacgcaggaagagccttcatgaaaacagccactggcctctgcagagatgactgggagcagcataccactgcccacctctatggcctccttcacacaccttcacggagcacaaactctgtcctgttttcccaggagaaagacgggatgcactgaacccctagcttctctctcgcctggtcccctctgcaataaaaggcccaggtctacaagatggcaaagaaggggaggaagaacagtatgtacctgcagaatttaaatttttctctgcatcaaagctctaacgttggtcccatcagcataggctccagccaaagaagctcctccacccaaaataagggagagatccaaagggaggcgatacaatgacgtgaaaccatagaggtaagaagcaaggcctcctaatacttgactctatgctaaactgttctgaacttgtgggtagatcttctttggttacaagatgatgcacgatcttggagagcctctgttgtaccaggaatacaatgctggtgggaggattcgtgctcctcatctgcttatttgctctcagatccattcttcactcttcctctccctactctgtctcacaggagctactccggtaaattacatttctcagctcccatgcctgttggtttccagttagatttggtcagtgggaggctctggtgggagactggaggtgagaagagggcagagaagtcaggttttttctctccctacctcctctggcacgagcggcagtggcagtgactattctgtggttctagcttttgcaggtggccccagctcctggactcccacctgctcccttggtctctcctatcctagaggtggtagcagcttcctgctgttgaatcactgtcctctatgctcatttagctctgccaaaacttttgtatctcacccccatgttaaattttttctgttgaactacactggatctgacttgatagaactattaaaaatagttttt

SEQ ID NO: 10326 - DNA, 305 bp, Homo sapiens
ttccagaagaaagatggaaattctgaaaactgaatgtcaagaaaaggagtcaagaacaattcacagtatgagaagaaaaatggaaaaaaaaaactttatttaaaaaagaaaaaagtccagattgtagttatacttttgcttgtttttcagtttccccaacacacagcagatacctggtgagctcagatagtctctttctctgacactgtgtaagaagctgtgaatattcctaacttacccagatgttgcttttgaaaagttgaaatgtgtaattgttttggaataaagagggtaacaataggaac

SEQ ID NO: 10327 - DNA, 843 bp, Homo sapiens
aagaggaggcctgaggagctgggcgggcagggagagggtcttggggacagccctcctgggaatctacattgtgttcccccgcattccaggctcagggtctgaggaggctgtgacgccctatgaccgcagagatctagacagtcgtaacagtccccaggctccagctgggcaatccaccacttcctcttccttctgcttctgtgacggtttagagtcaagggggctgaaacacactgtgagcatagactgtattaggtttgttcagaagccgggtcagctcacagagtcacattttcttgcttagtcatgtgtccctccttgagttgccccctccttgtgggtttacactacatttgggagtcattgtctaatgctgacaagcacaccctctcccattatttgtgcactacagatctcctcctgatcagtcacctttgttgctgctgtgtagacagagccaggcctcacctgtttgtttaggccaagatgccatggacatgcagcgttagtgatcccactagctgtgacagccaggcccagaaaatgcctggcgtgagagccagcagacagccaggccagggtaggcagtgcctgcttctgctccatcaggtgcaggggatttggctgaaggcgtgcatatttcctgggcacaaacttcctgagcctctgaaatgggaggctcgtcaatttcagaccaacctcttttcaacccatcatagcacgttcaaggtgtgccttttacttctacctgtacatcccccatcccttcaattctttcattccctgaccagtgagagggttcctgggggaagtatggtgaataaactgacatgcatgcttcag

SEQ ID NO: 10328 - DNA, 2037 bp, Homo sapiens
gcacaggcgggcccagaccggcttctcggcttggatcctgggctgggtggcccctgtctcggggcttgccccactctgcctgcctgctgttggtcctctctctgtggggctgaattgccaggggcgaggcccttcctctttggtggcatggaaggggcttctggacctagggtggcctgagagggcggtgggtatgcgagaccagcacggtgactctgtccagctcccgctgtggccgcacgcctctccctgcactccctcctggagctctgtgggtctctggaagaggaaccaggagaagggctggggccggggctgagggtgcccttttccagcctcagcctactccgctcactgaactccttccccacttctgtgccacccccggtctatgtcgagagctggccaaagagcctttccaaagaggagcgatgggcccctggccccgcctgcctgccaccctgccccttgccatccattctggaaacacctgtaggcagaggctgccgagacagaccctctgccgctgcttccaggctgggcagcacaaggccttgcctggcctgatgatggtgggtgggtgggatgagtaccccctcaaaccctgccctccttagacctgagggacccttcgagatcatcacttccttgcccccatttcacccatggggagacagttgagagcggggatgtgacatgcccaaggccacggagcagttcagagtggaggcgggcttggaacccggtgctccctctgtcatcctcaggaaccaacaattcgtcggaggcatcatggaaagactgggacagcccaggaaacaaggggtctgaggatgcattcgagatggcagattcccactgccgctgcccgctcagcccagctgttgggaacagcatggaggcagatgtggggctgagctggggaatcagggtaaaaggtgcaggtgtggagagagaggcttcaatcggcttgtgggtgatgtttgaccttcagagccagccggctatgaaagggagcgagcccctcggctctggaggcaatcaagcagacatagaagagccaagagtccaggaggccctggtcctggcctccttccccgtactttgtcccgtggcatttcaattcctggccctgttctcctccccaagtcggcaccctttaactcatgaggagggaaaagagtgcctaagcgggggtgaaagaggacgtgttacccactgccatgcaccaggactggctgtgtaaccttgggtggcccctgctgtctctctgggctgcagagtctgccccacatgtggccatggcctctgcaactgctcagctctggtccaggccctgtggcaggacacacatggtgagcctagccctgggacatcaggagactgggctctggctctgttcggcctttgggtgtgtggtggattctccctgggcctcagtgtgcccatctgtaaaggggcagctgacagtttgtggcatcttgccaagggtccctgtgtgtgtgtatgtgtgtgcatgtgtgcgtgtctccatgtgcgtccatatttaacatgtaaaaatgtcccccccgctccgtcccccaaacatgttgtacatttcaccatggccccctcatcatagcaataacattcccactgccaggggttcttgagccagccaggccctgccagtggggaaggaggccaagcagtgcctgcctatgaaatttcaacttttcctttcatacgtctttattacccaagtcttctcccgtccattccagtcaaatctgggctcactcaccccagcgagctctcaaatccctctccaactgcctaaggccctttgtgtaaggtgtcttaatactgtcctttttttttttttaacagtgttttgtagatttcagatgactatgcagaggcctgggggacccctggctctgggccgggcctggggctccgaaattccaaggcccagacttgcggggggtgggggggtatccagaattggttgtaaatactttgcatattgtctgattaaacacaaacagacctcag

SEQ ID NO: 10329 - DNA, 927 bp, Homo sapiens
ggccccagctcccagccctgggcggccgtatcatcaggtgctcctgtgcatctcggccagcacgggagccagtgccgcgcaggaatgtggggtcccctgtgttccctcgccagaggagcacttggcaaggtcagtgaggggccagtagacccccggagaagcagtaccgacaatgacgaagataccagatcccttcccaacccctttgcaccggtcccactaaggggcagggtcgagagaggaggggggatagggggagcagacccctgagatctgggcataggcaccgcattctgatctggacaaagtcgggacagcaccatcccagccccgaagccagggccatgccagcaggccccaccatggaaatcaaaacaccgcaccagccagcagaatggacattctgacatcgccagccgacgccctgaatcttggtgcagcaccaaccgcgtgcctgtgtggcgggactggagggcacagttgaggaaggagggtggttaagaaatacagtggggccctctcgctgtcccttgcccagggcacttgcattccagcctcgctgcatttgctctctcgattcccctttcctcctcactgcctcccaagcccaccctactccaaaataatgtgtcacttgatttggaactattcaagcagtaaaagtaaatgaatcccacctttactaaaacactttctctgaaccccccttgcccctcactgatcttgcttttccctggtctcatgcagttgtggtcaatattgtggtaatcgctaattgtactgattgtttaagtgtgcattagttgtgtctccccagctagattgtaagctcctggaggacagggaccacctctacaaaaaataaaaaaagtacctcccctgtctcgcacagtgtcccaggaccctgcggtgcagtagaggcgcacc

SEQ ID NO: 10330 - DNA, 104 bp, Homo sapiens
aggcaccttggccctgcgcatcatggactctctcagcttccctcccaggatcagtttctacacaactctgtgtggcttttggacaaattaaagctagttttggt

SEQ ID NO: 10331 - DNA, 1092 bp, Homo sapiens
actgatgcccctgcccccgcccatccgcccccacgctgtacagagtgcatgaggagccgccggaccaccggggaccgactgcctgcgtccagccgcgccccatccccgaggccgcctgtggccaccatgtcggccctctttccaccaccccttgctcagcatgtaagccccacccacccctgccctttcagacccctgcggtgacctggctcggagaaggtggccctgggcaccaaggggccaaccgccctgaacactggggcagggaccatgctggggcccggggccacccccttcctgtcaccagcttctgtggagtccagtgttttgctttgcttgcttgtcccccatcctgtcctgagccggggccccccagcctcgcctccctcctcctaccatccctcacttggacctgggggtgtggacagtgacccctccctgaatatggacttgaatcttctgagcagaactagggcctctcccctggtgaagacccagggaacccaggagggcccttctggggcagtggctctgcagggtcactcatggaggcctaggggaacagcgagatgccccaccacctcctggcgagtccttcctgttcagctccctgtgcgaccctccagggatgcaggggatccaggattctctgccctgtcacacggcgagtcagaagggaggggcctttccctcggacccatggccccaggcagagttttgcaccagcaggacccctttgagggccttcaaggctctcccaggagtccccctctgccggccccccaatgccccagctccctcttgggtcctgtgccaagtccgccccagggcctggggctgttgggagccaagggccccctggtactcagttccctcacgattcccgatcacgggcacacctgccccctggttatttgtaaatatttctattggacccaattctcctcggaattggctggcacctctggctgccgcagctcagtgatgacgtgggggaggtgggagaggccgagggctttgcctaggggtgggttgccctgtatacatgatccagtctgtgactaccagccaacctgaataaagcggttttaa

SEQ ID NO: 10332 - DNA, 2489 bp, Homo sapiens
gatgggtgtcatgtcccagatttctgtttgtaccagcagaaagaagagggcaagtcatggttggaaataaccttctagcccctggttctatcccttcttccgcccagccccccagcctcaagaaagaacctcagactctgattctcctcttcagcctctcatcttgagcacagttcagaacagtggcgactggaatctggtttatattcatatttgcaaagactacagactttttctcccacttcatattttcatgcccccctgttggttttccattcttaactgtctccttatacctaagaagttatgaaaatcatgtgtacttctggaagctttcgaaagaatcttgtccctcatgacagcattttatcatgaaagcagcttctcctttctgggctgggcttgttcaagttcggtgtgggcttccactaaggcacttgtcctggagacgttggctttcccagctgcatctgccccaaaaggttgtaggcacagctgtcgtagcgttgccataaagagtttgccaaatctctgatcctccctttccattgcttctcctagtgatgcacgaagattaggtgcatttattttgtaaacagattggagaatctagcaataagattcaaagctaatctggagcataaaggcacagttcagagacagaataacagggatcacaagcatgaattaaaaggaatttatttgcttcaagttcctagatacaaccttcccatgctgcacttctccactgtcggagcacgttccgaaaaacagaatgccttgatccctggtgggtgcgaaggcagttgttagggatggcaggcattggtgggctccaaaagatgaaggccccacacacaggtgtgctgcatttgggatctgtgtgggtgtttcttggaccctttcttctgggagtagggtacacactaacgtttaatccgctgtctgggtgcatgtccacagtacggtggctaaactcgaacatcactgcaaataggacgctgagcaggtccgtctgtcatgtcacgccactgcacaggtccttgtccccacacgacggggagtacttgcgtcagatgttattgaatagctcgtctcgggcaggggaagcggggagttggggatattaattgggggttttaattctattatcatgtcagctgacattatgactatataatgtagttagagacaatttttatcttgcttatagtaaaggttcagcctgccaattgtaaatcattctaatttggcaggcttatttttgacattggaaagggcagaaagcgatttgccccagtagtgtaataggagttatagaccagaggctgaaacccaaactatataaaaaggaattcagtggagggggctttgtaatctccattaatttgtgttgctacttccaggatcaccaaaaattacatgtaattttacatgttaaacacattgaaacataacctatgtttataaagcataacgggcttcccttccagaagctctcctgcttgtcatgaagtgagaacaatgaaaagtcatagcagatactcagtttaactctgtgtagaacctagtagtgtttgagctgttattcagatttgaattcagactgtgtgttgtttgcttatggacactgcctgtcgttctgtcactgttaaattaatgagtctataaggtttttcttccagaggccataggtgacatcactaaaattgcaagataaattgtaatctttgctgctgctgcactccccaacctctcccccaccccccgtggtgtgctgctttctagatgagcgtgttttggagcaggcccatctgggacactctatgctttcaccaaggaagtgcgatctgagcagccacaatccagccaaaagaggatcgtagatatttgctctgatcaactagatgaaaatatagcagaatggatttagcccactgctctgttttatccaactgagtctctgaccagcaattggtgcataattattacagcaaaagttaagaaatgaaactgtagcaattatgtaaatgaatgtgttggcctcttaatacctgttactagtggacttcctgtgaggaagttagttttttgttttgatgaaatgctttcgttttttaaatcttaattctgctgtccacatcctcccaaagtgtgcttacttcatttgtttaatttaaatgaactttcctccttgtatgtatgaggtgacttggtgggtggggtgggtggtttttgtttttgtgttttttctttcttagggcatctgtaggcctcaaaggacctttcctttaggtcatattcctcagaaagtcttcaatcttcccttgtttttgtttgtttgtttttcttaaagaatattttcaaagcttaaatttgtatattaatttaggactatttagaagtataggctgtcgttggcggcagcagtatattctgaaatgtctcatagatatatatttttgaataaagatggtgttgttgaacaa

SEQ ID NO: 10333 - DNA, 319 bp, Homo sapiens
aggcaccaggggtgccgggggctgtcagccacacctgttcctgatgggctgtggggcaccggctgcctttccccagggaatcctctccagatcttaaccaagagccccttgcaaacttcttcgactcagattcagaaatgatctaaacacgaggaaacattattcattggaaaagtgcatggtgtgtattttagggattatgagcttctttcaagggctaaggctgcagagatatttcctccaggaatcgtgtttcaattgtaaccaagaaatttccatttgtgcttcatgaaaaaaaacttctggtttttttcatgtg

SEQ ID NO: 10334 - DNA, 342 bp, Homo sapiens
ggacaagaaagatgaagcttggaggtcacagctggatctgcttgttgcatttccagctgtgcagcacgtctcagagattcttgaagaatgaagacatttctgctctcagctccgggggtgaggtgtgcctggcctctgcctccaccctcctcctcttcaccaggtgcatgcatgccctctctgagtctggactttgcttcccctccaggagggaccaccctccctgactggcctgggatatctttacaagcaggcactgtatttttttattcgccatctgatccccatgcctagcagagtgctggcacttagtaggtcctcaataaatatttattaaatgat

SEQ ID NO: 10335 - DNA, 3892 bp, Homo sapiens
accactgaatttctaagactgttgaactccagtttgggaactataacacagcagaacagtttgataggtgatcactgtaaaaataaaaacaaatcactcccaagagcttactgtttaatcaccagaatagaagaaacacattataacccatttgatagaagactttgggctatctagtgaaatgggctcccagacacaatcacactcctgctgataatgatgatatacattttagccataaactttcttttaaaagtgacaattttagttaaacataagccttttgaggagaaaggcttttatgcatctcagttaaacacgtgcattggtagtatcaacaaatttgcaatatagaagttgaagatagttttttacctcactttttaggaggttgtattcaaaattaaaatctcagaatcttacaggacatttaaagactcatgttgatagcatggaggagaaggaaagaagtcacagccttctactcagttgtaggtcttcttgtcatccagctgtcacactgacaaaaagaaaagatgatacatgttttttgctcagataagaagcctgacattaaaagatgtcatatttttttctccacatttcaaaaagttgtccttctcatcactgcacagatctgtctgaaagcctcagtttctgagtgacccaggaacagatcagaaatggagcatggccttgtcctttaatggggatgcaaataaagtttgtggggttaaaagttataagacagcagtgataccccactctctccattattgtccagcggggtgacataatgacaggttaaatatttgtgattcattgattaaatattatttaaagaaatgtaaattcacaataagggttgaaaattatttggtttcatccattgtctcttatttcaggaccaagcagcaaactgcagtagtttgtgaaggattctaatatggggttcaggaatagcctctcaacgctactaattcagatctctcccagagaactactggatttcctcataattgacaaacatgagtgaccacctctttgggtggctactgttagaaatggctgttgtcatgttttctggactttgccagccaacagatccctgccaggttttggaaatacttctattacctcgctgctacttttctgcagggataaaacttttgaggtggccagacccagaacatccaaggattcctgttacagtgctacagtatacactgctcatttatcctattctcatgtgctttcttctttagtaagattattttaagaaaataagtgatatttaaagtccaaagaggaatgatcacagttgtataaggggtgttttcccacttgaactctgatgtcagtcgactgtgggtcagagctacaaccatctgtttggtttgatgttttggtggtttacttacggagtggggatagtgtgagacctaattccctgtgcaaatgtctcttattccagaaatgtgcattttgtcatctataagcaagaaatatgggcatagcagctcttggtttaaagtttgccataacctgttcatgtttgttttaagctcaggtaaagataacctcctctttctatgactccagtttccattcaggttatagtattattcaatagttgattttctttttaagctgggcaataaattgatgtttccagatggtaacatgggagagggcatataggataaagatgagcaaattctaccctaaaaatgttctagtagttcacaggaagaagatgaggtttaataactttcaaggtaattctagattgacattttgaggggaaaatgggctcttgttctagttgaagtgagcagagaaggctataaattaatatgtaacttacagcattccagaggttaaaaataactgatgcagatgtacttcttcagtgtgattcttcagatcaaacttttacttttggcatagttaatttcagaaaaatgtgctgtatgtgtgtgtgtatgagggttggtcttgctgatccttcagttagctctaaattctggcaactccttgtaattccaatgtatttgatacatgaacaatcatgttgaatgcatttgtgatctgggagacttcctcgtcttccagggaaggaaggatgtgcagcccctgaaggcatgaaactcccagtgtgtacggagccagtggaatatgggatacccataccttaccaggcgctggttccttctgctcacaataacatctgcccaaagagggagtgggaagaacgcttagctctttcactagtatggatttgagttcatggtcactatttttacccacctgcctttgttaaaaatcactttgagtagaatagcactggaggaacatatttagcacctaatattaatatttagtagtccattgataaatttgccagcatatgttctagcctctggggggaaaccaggaccacttttgtctgtggcttaaacagttcagttgctatatctgttgggtatgccgggggtggatgagtgtggcattccgtgaagaggaaggtggtaagtaaggtttcccttctactgccttcttaagttgcaggagggagcttttctcctcccctctggttgggagcactgaggacagtgaggagggcttttaccttgttaatcctttccttatttagctagctttcctttttgtctagggcttcctcttgagaccctcttccatccattgggcctttgaaaggactaatcagacacacacacacacacacacacacacacacacactcgcatactcatgcacattttccttcatttccagatcctttatttcagagcagcccattttcctctggattcattgatgaatacaagtacccacacctttggccagtaatgtcagttacctgctgcaggttctgtgtatgaggccttcatgaacggttaccttctccatacactagggaagcatttgtcagactctgcagactgggttctagagaggcagagtctttaagagtattcatttcttctggaaggtggagctttacccaaagtggaagttagccttgctcaaagatgtgttttgtggtaggtggtaaaaataaataaataaataaataataaaaaaagaaacatgtattggaggtaatttgacactgctgctggcagtagttctctattcaccattttaaagcccattcaggttctctcttcctgaaaagaactgattgctgtgtttacatgaaatgacattggagtcagatggtctgttttaaagatttccatgacagcctcttttcctgagttggagagattggaggtggtctatccgtacgatgtggaatcaaacggtgggtttcttagtagctaaagaagccatgtacttctagtgtgtttctcagaatatcaactcatgttcttcagatgcttttctttttttaatggtgagggaaaaggtataatttgggattccacagtgccttgcatatagtaggcgcccagtaaatacttgttgaagcaaaccaagtttcccaagtcctcatctcttatagtgaccaagacatctttctcctctgaagggcttggcagttgtggctaaaaaataagcagtatcattatttgcttgaaatcatatatacagtttgtatgaatttcagtatgttgccaagacatgattttttcttattgtattttctgtaaatatttctggcactgaactgtaaagtaaaggcaaagtgtaaatatgaaggcgtgcccgtgccccttgcctcctgtgtttcatcttcgtcggttagggaagaaggtccagaggtttgtttgtatttatgccgatcctttgtccagaagaagcccatggaatattgaatgtaatacatttagtcaattaaattttaaggagattcttatctaat

SEQ ID NO: 10336 - DNA, 361 bp, Homo sapiens
tttggttttcctggagtcagcagggcagtggcaatggcagaagtggatgggagagacttgccagggaggcaagaggactttggcaactgtggtgcctccctggaacccccaactcatctcctcttcagaccgacatgtgaaagcctccagaggtcccagcccttctccagcatcacagatgacctccagccctgcagggagccgctcaagtctgggagggcatgggagcagtgagcaggcccatggggagaaattggccaatttaattcagaggggtcttaaagcagggctgggccggagggtgtgggtccatattaaagaagcaagggtcttcccatacccgggggacccctgacaaacc

SEQ ID NO: 10337 - DNA, 733 bp, Homo sapiens
ggcgcaagggcgagcccccgccgcgcttctgcgctctctcccttctcccctcaccccgcccccaccagcccagtgcgccctgccgccgcgcttgggaggccaagctttaaacatctctggttcctagtttctgattattcggggatgggggggatgggaggggacagggattcacgatccatcgcgtctgcgtttctgttgtcctttcttttccacaacaccctggttttggggggaggcggggtgcatttgcgggcagggttctctgtccttccaagtggggccccgacactttggttccagtcatcgagggggttgggaagggagggagagggggcgcagctcgcaggcgtggcaacttgaccttgggggaatatttcacatccatccagagctcggaatctacagcgtccagccatttccagcaagagcgcttcccattccggagacgtttcaaccctgcagcgggaaaggctgactgggaaatccattttgggtgggcaatttccttcaacgaagccggaaggcgagaagccgcggcggggccagcttgcctgccggttttcaggaatctaaactctcatcttgtgcaatttatcaggtgtggaactgttctactgtgcgtgtggtgtgctcgtggtgaataagatgaaatgtatatcagaaaaaaatctatctctaatttagagtgcggtacataattatatccgcaaataaagaagagacaaaggct

SEQ ID NO: 10338 - DNA, 630 bp, Homo sapiens
cagaggccctccagagagactgccctgcacgccatgccttgggccacgttggcagtgtgacaggactgtgattgtgctagatgtacctgcccaagtctgctggtcacatttggcagcaaaatggatttctcctggggagaacaaagttaagggacactgagacctgcccttcagaattcggttcacttgggggcttctgtggtagagactaactggccttctgatgtctttgttcaactgtggccagctgtggcatcagcttcctggagcagtaaatgaagacagagtggaggacacaaatgtacaaaatgcacaagactgatttcttaccacattttagtctttcttgttttaaaaaaaattctttaaaatttatcttgtccgtgtagatactttattcttctggatgtattcagaaattgcatgaatgcccagtgaggggaggtctttcatgcatataaaaaggtaatgtttattgccgggcacagtggcacgtgcctgttaaggcccagctttgtgggaggctaaggcaggaggatcgctggagcttaggagttcgaggctatcgtgtgctgtgatcgcacctgtgaataaccactgcactccagcctgggcaacataggaagacat

SEQ ID NO: 10339 - DNA, 4357 bp, Homo sapiens
tctccgtgtgatggaggagggagatgcctggggaggggctcctggaatccaggccagcccaacagccctggctggggaggtgtcagggcagctggggagaggtgggctctgcttttcagaggaactcagaccccagccctcagctggctgcccatagcatcccatgtcccacgtcccgtggttctgcttcctgctgcatcgtctgccatctgacacaaggcctgtcgtggcctcctggttcactctgctgtctgatcttgggagggtgggcttgagatcccagctctattcttggtataaaggcttctccggatcagtacatgcatgtcacattaacacacacacacacacacatatacacacacacacaagctcgatcagtgtgtgtaggaatgacatacctgggctcaggggaagcaagggggcttagaatttgtggggtattcccaaaaggatggaagttaagactcagagtctcattaccactgccaatgtggttttagcaggggaggggacctgctaagctgagacccatagtcctgctcagagttatcccaaagtctgagccaccagccacacctgacaggggtgagaagtcctcgctgtgttcagagggagccaggaatctacatgggtagatgagatagacacagacctgctccccgcagccttgttgagagccacacttctgcccatgccaggagccagctgtgtgaccatccaggggtggagggggaaaaccaggcaatttcgttcctggaatcaaccaaatcatgttttcctcttggatggaagtgtcaaaggcagaagggtgtgggagggggacaaggtcagtatttaccaaagtgtatctgattttaaaaattcctttagtctgtaaaactcctagagggagggaggtaactgaattcacttctttttgtggatcgtatcaaggtcactgggttttactggctggtgctgggaaaatgaagctaagtgaggagcttccattggaatgcttttccagggagagaggccagttaatttaaaaaaaacagtcgctagttaacagcgacagagcccagcaccctggggtctttgtgaatatccagactgtttcagcccagcccatctcagccaaccctccttagactgagctgtcagagcaagcaattaggggccagcctgcctccacctcccacccccttccacctccatcagtcatgtgtgcagagtcagtgctcgggatcccgggcccagcttttgcctttttggggatgcttggtgagacagatttgccagtcagcccttttgagttcccgcctcacccaggggctcccagcctgcacttgcaggagtggtgatgccccaagtctgcgaatccagggtgcacgtggtcaatatcccctcctgcattcaggagagccatggtagggctagagttgggtcttgcccagccctgcagtttcatagtcccagccttcctggtgctggggagggaggactgtgaatggctgttctcccctcactgctgagtctcccaggaccccctttggagatgcccatggcatgggcactgcccacaggctcagccagaacctcttggtgtacccgataagctgcaggttatcccttgctctgtgcgccttttatttgtccttaaactacctccttagagctctgaaggggtctcctagttccagattttaatttggggaacagatctgggttctttttaaccctcttctttctcagtctatgagaaacttgccctgaggggcacctgggctaggggcttgggactggaagaccatccccgccttgtgccacaactttggtcatgggatctgctctttgtcattcttagccccctactgtggcccccatagccccataacccagagagggagctggacttcagggagcctgagtgatgctttcccaggagcagggcagctggctggaccagaaagtagagggcccatgggagtgactgcacccttggtggctgctggaaggggagaggttctcagcatcaggccacctccaccccaatgccaggatagatgtattctagagtaggggtggaggcggcccaggaggctgaagacaggtgcacagatgcttcccacgaccttgccatttggggtgggctcttcaacatctcaggctgtggctggaacaggacaggatgatctaaaacacacgtaccattggctgtaaaacagtatgagcccagactgacgctgaaatccctcatgagccaaccttagctacaaggtagggagttctgagggaagccgcgtgctcctcaggagagagctgtttaggttttccgatctttttgctcaggggccaaacactgaaggcacgtactgcccaacccactgagcgcctgaggccattccctccttttccgcatgcctcctgcctcctgggctattcctctccacccagaaggctgggaatcccagctgattccctgacaggagccgacttcacacacaggtgactctcaggcattggctcatgttttcagccagggataaaccatcccttcttggggctttaagtccctggggagctttccctgtaggtctcctgggtgttgagagacaagttggagaccaacctccaatgaatgagccgcggtcattcattaattcactcacgtaatttactgagtagctgcaacatgccagcctctacgttaggttctgcggataaaggaggaataagacagagtcaggagaactgttccttgtggtttccgtcccttggggaccacaggcatcagcagtcccattcaagtcacctgaggcaaagtgtctgcatcttcgtccagcgaccctttgcttttcggctcctagaatccttagagtctgaattcctttagctgggaacagctgtcatggtcacccctggataacatttgccaccaagtatagatgctggatcttgggttccaggcagacatcatccaggtccatctggaactttcagtgatagctgccttcagccagcatctttgggggactctataatagcagcttgagatcagtgtctagaagactgttctgcaatttgctgccaaatgcatctcaggtttttaaagtcattgtttcttgctcatggtggctcatttattacatagtcccctcaccccactaatggataatgggaggaaaagttgctgcttccttcagcatcaaagcctttccttgggaatctgcctccctccatggcaggggtggattcgggagctgggagtaaccaggcaaagtcaaccagatgcctagctcctgctgagacccaggtcctatggcagctcctcattagattaaaggagaccacttccaaagcaggtgctgcatggctcaccatcatatgccccaaacaactgaaagttggcggttatcaccagactgtgagtttctggcaagtagcttggggaagctgaataaactctaggcccagggctactaaagacttcaggatagaattctccatcaaatatacagcataagtaaaactgctctgcactgtttaatccatttccaaggggcttagaaaagctaacaagggtgtgtcccctgtcctgccccaccggtttgctggctttgtaataacataagaccattgtggttgttggtgtcagataccttcccatcctgagctctctcacctacctgctctctctcctagagcaggatactggggtacttttaagaagggtgctccttttaagatgcccagaaaagctgtatttaactcttgctatttgtaacttggggatggtctcccctgccccagggcacataagagcaaaggctccaatggtcagtggatgactctgcaaaagtgaccccctgtgccagaagctatagccctctccccaacaggtctctcttgttggccagagggcctgcttcccatgggcattgcaagtgccaccgtgcggggcctggctctgcacacccaggaaaagtctgcagacccccagccctccgcaataattcaccagaccagaagccactggtgtacagagaacacttaaaaaaatgtattttatgtgaaaaaaaattaaaactctgtatactgtatcagcagctttgtgtaaaaatggcaatcaagagagtctaatatatttaaaacttttttaaaaaaaatcttcgcagatctttgatatcgtactgaggtaacttccacgtagccccttgccacgcggcaccggtgggccttgggtccaaaactgtggctcagccacatcccaaagggggcacatgtccctggagttgcttccagctgccaaggcctgtgacagaattcgctgttaagagtttttaattaaaattattaaattccttttaataac

SEQ ID NO: 10340 - DNA, 538 bp, Homo sapiens
ctgctccgtgttcagactcctggtttcttccaggcttacagtggacatcatcagcttcctgctttaaaaaatatcttatgtccctaattgcctttcttttacctgactttgtcacctttgttgtctttgaattctttaggctgcatattattttacatgctttgttttgtcatgtatataccaggtattggttttatggtttaaacactatggatacaggggtttgttttgcacaattttaatagtcatgcactacataatgatgttttggtcaatgacagaccacgtatatgttggcagtctcataagattataatactgtatttttactataccttttctgtgtttagatacaaataccattatgttacagttgcctacagtattcagtgcagtaacatgatgtacaggtttgtagcctgttttgcatttttcttaggttgtatgctcttctgttttaaaggtttgaatcaccagcatttttgtgatcaaaatcctatttagaaaaaataaaactactttctgtttatctctttag

SEQ ID NO: 10341 - DNA, 1177 bp, Homo sapiens
gaggagcccacagctacagctgcagggactgctggcgtcctctcctccatgctgctgcccctggtcccaggtggggtgagctggcaccagctcctgtggaatgtttggttgctctgaagtgggctgcggcctgttcattagtcctttcttcccgctgcccacagcatttgcatccttgctgggatcctggaggactttgtgcatgggcaggcatccttctgtgctgcagcgggcagagtgggagttggctcactcagcacgctcactaacccagcatgccacttccagcaggcatgcagtcctggcccagctctatgggaaacaaggaggaaagttagccactgaaggccaaaacaccatgtggggtggacagagggtttgctgggctggctttgctttccctgctggggccacagctgtgttaaccaatgaggtctgctgccaggtgtgaacaagcatgtctctacgaatgaacgaaacattggggatctctgccgaaaccaccaaagggcatgtctgatgggcacagggtctcccaaacccagtggcttctgtctgtcctcagcccttgtccctgtttatctgcagccaggagacttgcaagggattggtgattgacagagaggactcgtgcgctgttttgtgttagcagaggatttgtgtttcacaggtaggcttagcgtcctctcagagtgtagtgccaggtcctggtgccacgctagctgagcactcaggagagttcatcagctcagatcccacagggcctcctctttagcaggaattcacaacagtttggatgccctaaacttctgtagctcaggaacatcactggtgtatttgtttttttgtttgtttgcttgggttcttgcaagagcgcgtggggacagttcttccagcaggcactggttttgttgccccagggctgctttgctgtgatgatgattgcatttcaacacatgccagatgcagattttttcccccttactgtttcaatgacctttattttaaaaacacatagcttgaaaatttatttttatactgatattagtttggatgtgccacttttggcaccaaacgtgtatgtcatttttatttccattttataaacatgtaaataatagtgataacttgttaataatagtaaacctttatacctaaagtaaatgtcttccctccc

SEQ ID NO: 10342 - DNA, 1187 bp, Homo sapiens
ccagtctcaagaggcagagttctgtgaagaggaacagtgtggtttgggaaagatggataaactgagcctcacttgccctcgtgcctgggggagagaggcagcaagtcttaacaaaccaacatctttgcgaaaagataaacctggagatattataagggagagctgagccagttgtcctatggacaacttatttaaaaatatttcagatatcaaaattctagctgtatgatttgttttgaattttgtttttattttcaagagggcaagtggatgggaatttgtcagcgttctaccaggcaaattcactgtttcactgaaatgtttggattctcttagctactgtatgcaaagtccgattatattggtgcgtttttacagttagggttttgcaataacttctatattttaatagaaataaattcctaaactcccttccctctctcccatttcaggaatttaaaattaagtagaacaaaaaacccagcgcacctgttagagtcgtcactctctattgtcatggggatcaattttcattaaacttgaagcagtcgtggctttggcagtgttttggttcagacacctgttcacagaaaaagcatgatgggaaaatatttcctgacttgagtgttcctttttaaatgtgaatttttatttctttttaattattttaaaatatttaaacctttttcttgatcttaaagatcgtgtagattggggttggggagggatgaagggcgagtgaatctaaggataatgaaataatcagtgactgaaaccattttcccatcatcctttgttctgagcattcgctgtaccctttaagatatccatctttttctttttaaccctaatctttcacttgaaagattttattgtataaaaagtttcacaggtcaataaacttagaggaaaatgagtatttggtccaaaaaaaggaaaaataatcaagattttagggcttttattttttcttttgtaattgtgtaaaaaatggaaaaaaacataaaaagcagaattttaatgtgaagacattttttgctataatcattagttttagaggcattgttagtttagtgtgtgtgcagagtccatttcccacatctttcctcaagtatcttctatttttatcatgaattcccttttaatcaactgtaggttatttaaaataaattcctacaacttaatgg

SEQ ID NO: 10343 - DNA, 1208 bp, Homo sapiens
ttgtaccccagcctcgttggagagcagcaggtgctgtgcgccttgtagaatgccgcgaactgggttctttggaagcagccccctgtggcggccttccgggtctcgcagcctgaagcctggattccagcagtgaatgctagacagaaaccaagccattaatgagatgttattactgttttgggcctccatgccccagctctggatgaaggcaaaaactgtactgtgtttcgcattaagcacacacatctggccctgacttctggagatggatccttccatcttgtggggccaggaccatggccgaagccccttggagagagaggctgcctcagccagtggcacaggagactccaaggagctactgacattcctaagagtggaggaggaggaggagccttgctgggccagggaaacaaagtttacattgtcctgtagctttaaaaccacagctgggcagggtgagaagctagatgcccctgcagtttggccctggagccagggcagaggaatgtagggcctgcatggagaagggttctgccctgcctgaggaggaggacacagcacaagggcacattgcccatggctgggaacatgacccagcctgaaagatacaggggatcatgttaaaaatagcagtattatttttcgtctcaatggtattgtaactaagttatttactcctcctgctcctcacccctgtagggaaaccttggagaggagagtggcaggtgggctgcctgctgtgttaagaggacttagtttgtgatgtaaggcactgtcaggaatggggggcgggccagggtgggaagagaagaaatagcagagcctattttggtgaggttttttgtttttaagtcaaagaagactcagtatgctttccctgaggaatgaaaaagggattgaggagttgcctgactcctgggtgggtggggtacaggcagttaggtgctgaatgaagctgccatccttgctgcagcttctaactggtaaaaagatccagggatggagatgggaaggttagaaaggcagccctcacctctgaggacagaggccggggtccaggcccgtgggcgcaaaggtgcctcatagcatagccagcattcagcacacacaaacctactgcccacatttgggctcagggttggccatttgctagttctgctgccctcttaagatctgactgccaaataaatcatcctcatgtcctt

SEQ ID NO: 10344 - DNA, 1715 bp, Homo sapiens
acctgccctggctggctcctcctccctggcccggcccaggactggctaggtgtcctggggtataggagggtgggaattggagtgtcatggggcaaacccactgaaggggaaggaggaggctgcaggttggttggcagctagagagactcccccatcttccccgtcatatttttgccagctaagctgcagctgctccaggcgtcagtgtggcactgtcctggggcaattagcttgtcatctgggcccttgcagggttctttttttttttttttttttttttttcctgagacagggtcttgttctgttgcccaggctggagtgcagtggcatgatctctcggctcactgcaacctccgcctcccgggttcaagcgattcacctgcctcagcctcccaagtagctgggattacaggcgtgtaccaccacgcctggctaattttcgtgtttttagtagagatgggttttcaccacattggccaggctggtctcgaactcctgacctcaagtgatttgcccacctcggcctcccaaagtgctgggattacaggcatgagctaccatgccaggcctccttgcagggttttctatgcccttgatatctgtctccctgtcaacctgggaccttgctgtaagtcttgataggacagggagaagagggaggccctaccgaggctcgaggcttcagtgaagggtgacagcagtgggagtgtggtacagcctctggaaggacacagtgttctccccgccccttgtctgggagccaggactgtaccctccgaagccagacatcactgccaacatatcccccttgctggtgccctggcatctcagcacatgacacacacccacacctgcaggctgtggttccggcttggcctgctccccgtccggctgctgccgctgcctctctccagacctcgcttaaggacagtcccaaactcagctggggcaggtgttggcctgaaagtcctcccccagcctctgctggccagcttggtgctcacagctgctgggtaagctcttgcctaaggagctgtgggaagcagggctgatgccccagcaacctctcctcccactgtctttgaagaaagtagctttagaccggctaaaagctttaatccagagcctgccctactctgatagtaccagagtggagggcagaataccaaatgtccaggaaccaaaggcagggctgtggggacctgaagagcagcacagtggggcccgtgctgctgtgggggaaactgaggctgggagcctcagcagagaccggtgtcaagagtctctgggaactgcataggcctgaggaacatgcattttcaagttgtccattgatggtttcgtacctgaatttctcaccttttgtgaacatcttgggagggtgggggttttgcaggggtgttaaaagcaaggcttggagcccctttcctccagctggtggctccttctcagggcctggcctcattcaggccactttgtagagaaatgccctgacctcgcaggaaggatttccccacccccaagtggaaggaagaggacagtgtgggcaccagagggccctggaaacatcttaggggaaggaaaggaaaaggataaatttggagtggggggtctctaaacagattgcctggattccgttctttcctggggttctacagctgcctaagccctcaccttgggggaggatcaaagggaataaagagaactcttggctg

SEQ ID NO: 10345 - DNA, 2538 bp, Homo sapiens
ctcagaactccttgtttgcacattattatggaacactttcctacttaggcagttactcttccatgtttatacttggcctcttctgcaagaggaatctcttgaaaacaggggcacacagaaatttgatttgtggccaaattggatgaaaaagatgaggctctaaggaaatggtggcatgaagaccctctcccttctttgtagaattaagataactttgattttatagcttttgagctaacgtaacttttgtaaagattaagctcatttagtgttgtttttttttttttttttttttttttttttttttttttagtatttcagcaggatctgctggcagggtttttttgttttatttgtttgcttatttttaaattaactgttttgagctttgaatacttaaggctttagagggagaacccaattttcaattatgttggctttttataaagcttgagttatgtaagatttaaataaaagtttgctaccaagatgattgccttattgaataggtcactattaaattcctttaaatgttgatatctgccatttgtggaaacaacgtaaattctacttaagtgtaaacaaggcaagcctcagaccagcaataaattactcagtttggataacattattttgtgcagttaatcaaatttgccaaagtctttatctgcccctttaacaagttgagtaaaaataaaaggtattttttagtcaatgtgttccatgattttgcttaaattaatacttttaagtaatggaacttttttcaaaggcaaatttaaactatttaagaaatagctcctaatacttgggatcttgtttagagaatccactttctggaagttctcagcataattagtgttgagagtggttcagttgtctttaatgtttgtcatgtggaaatggaagtagcctctttttgttctgaaattgagtttattcaaagtgtaaaagcacatactgcattttctgctgaaagatcattatgtttaacaggcacttaatctcagtaaagtcagttgccagttaagttccacccagtagtcagtcccctttgtagttagtgggattatttgataattggttagatcatacttgtaaattttaatgctttgtgtaattggtttgaaaaacagtgaaatgggtaaacgcaaaacttttgtactttattacgagtaaagtgtaatgagtactgtggaaaccaaatttgaatactgcaaatttgtaggagttactaggttagcaattagtccatacatccataagcctgatgagttgaaattgcagtttgagaagtgaattaaccttacatccctttgttcagataccttaaaagttactttatttaaaagcatttattaatcttagtctgaaatcaaaatatagattaattggctcagctttaatacctttctaggaggtgtcacaatgtagggtaccaagggttggattgtgatggggcatggtcgtacactgctcattgtgccacaggtgtgactggaaagcatgatattctagggttggtttgtagattcaaataatccagaaatatacctaataagattgagtgaaaaatttgagtcaaatatctagggcattcacagagtagctgtgagttcttggtaatgtgaaaaaggccttgtttttcagaaattcctgggtttcctgttaaaaaatcttaaagcccaaccttaggaatatagtgccccaaaaggcggatgcttcttccattatcttattttctttgatactttatttaattagatgtttataaagaaatgggtttatttttccagcataaacctcagaatttaaggaaagaaaatgatgtctgttgttatagttcattgttttgcctactcagcagaagtgatgactcttaaaaattggctttgaccaaagttctcttgttttcagggaaagaacataaaagctttttgaactacagcctttttaaaagagggatgggaggatattacagtaagaaattaggctttctaaaagtatgaaacatccttcaactgggctctcttgttaataggacatcatatggtaatagactggtttgactatattgttagctgccacagtaagcaggtcattgtataggtaaatgcctgcacccataattttctagtaatagccacgaccaatttattaacagtcagggcctatccttgcctgtagttctcagtcactggatgcacaaaatcactgtgtaacattggctcacttggtgagcatagggttgactgataaaatgtttaattcccttgctagcttgtgagaagaatgagttgatgacatgctccataccagtggctagatggagtattaaggtggagcagaaaagaagtgagaacatcttgattcccctttcttttacttgatggtgtttatgaacatgccgtagtgcctttatggccagtttgagtcctgcctactttgacttttacgttcccattcctgtgttaccaccttcctcccgatttgttcacctattttgtgctttaaatctcaataaaatacttactgagg

SEQ ID NO: 10346 - DNA, 986 bp, Homo sapiens
ggagggacccgtgttgccccaccaggcaagaatagtcagagtgacccatgtatctgggaagactctagtctggactgtggcccagcttggggaccttgtgtgctcagatcatcttcaggaaggaaaaggcatcctggagacaggagtccattcactcctctgctctctacccactcatttgcttgccaaacttagctttgccagtgatagtcaatattaaagtgtacttttttcccctttaatccaatatagttgataattaaagtgtattttgaatgacacagatattgtgatttactgcaaggatcctaacacacacttaaaatcaagagccaaggagtagtgagttgtagataaaaaaagaatgtcagctttggagacagtctgggtttaaatcccagttctgtcaatttgagctgtttactgtctctgagcctacatcttcttgtctgtaaaatggagataaaatgggtttaatgaggtctaccttgcagagccattgtgagcattggaaatgatgaatgaatcataccagaacgtctagtataattacagtcatgcattgcttaacgatggggatacattcttagaaatgtgtcactaggcaattctgtcattgtgtaaacattatagaatgtacttacacaaacctagatgttatatgtatttttatttacatgtatattttcacatgaaataccaaatgtcacagcattattactgaatgtcagtcatttcccctacttgatctgcaatgccaatatcaagggccatgtatcaggtttctgtatatgttccactataatcttatgggaccatggttttaaatgtggaatcattgacagaaatgtctttatgtagcatatggctgtgtatcactagtatataatagagcaatattatggaggaatatgtagatccaatcactttacctatacaaaatgactgctatggtgggaacacaataaacaccagttttgactttt

SEQ ID NO: 10347 - DNA, 616 bp, Homo sapiens
aagagaaggacctgtgaaactactgaggccagctggtattagtaaggaattaccttcagctgctaggaagagcgactcaaactaacaatggcttcaacgagaagcaggtttattttttccagcacataaaagaaaaataatgtttcggagtccaggactggcaggacaggtcatcagatactcagaggctgtatctctgccctgccaaccttgacaaatggcttccaatgttaggtttgctacaagatggttactggagctctagctgcctattttgtgtttagggaagggaaaatggaggaaaggggagaagagcaaagggcgcttttaaagagctttcccaaaagctccacccaatgacttctgcttccatctcactaaccacccacccctacctggaatggaggctgggagatgtggcttatttgctgggtacgtgactatccctaataacaaaggggttctgacactaagacattaggggagaatgttgggtaggcagccagcactcttttaccagagggcctcctggtgtttggattttgatctcaatgtgtaaaatgacagagatgtaacaagctcatagggtatcaatatctcttattgttctatgttg

SEQ ID NO: 10348 - DNA, 238 bp, Homo sapiens
agaccatgcctcttgaagctttttctgcctcctgattctctctttgtaaactattttcaaattgtttttcaactccttatcaaaattgtttatacactctttcctccatgagctctggaaggtatatgcatcttctgtaatactcagataggtataagatttttcacaaaatccttatgtaagatacattccatttttaaaaattaaatgtatggttgcatctgtctttttataccct

SEQ ID NO: 10349 - DNA, 395 bp, Homo sapiens
ggtgttgagggtgtcacgagcccattctcatgtttacaggggttgtgggggcagagggggtctgtgaatctgagagtcattcaggtgacctcctgcagggagccttctgccaccagcccctccccagactctcaggtggaggcaacagggccatgtgctgccctgttgccgagcccagctgtgggcggctcctggtgctaacaacaaagttccacttccaggtctgcctggttccctccccaaggccacagggagctccgtcagcttctcccaagcccacgtcaggcctggcctcatctcagaccctgcttaggatgggggatgtggccaggggtgctcctgtgctcaccctctcttggtgcatttttttggaagaataaaattgcctctctctt

SEQ ID NO: 10350 - DNA, 928 bp, Homo sapiens
tcccgcctccctaccatccctgaggctcgctggaaggcactgctcagagcctgaagggctgacagcagaaaagaggccctggccagaggcagggtggcccatcggagagagcagtgacacacccattgcccgggggctgagtctcttcctcaacctcccaccagactctgcagaggcagcccactgcccaccaccagcccaaagaacctgcaggaaccttccgcccgctgacctgcttgctccagggtaactgtggaccctgtcctcgccctgcgcacggtaccctatgtctggacacccggccccagctccagccccagcccaggtgggccgcccctggcggggtcgcttaccaacggacacccaccccagatgcatgggccagagggccggcccccggcatagatgtgcacatcggttttccagtgtgaacaaaagattacgaaacctagaaactgttggttccgtgtaagtagttgactacgtgttttagaactgtgctgaagacatctgtaagactattttgtgggggaaaaaagtagtttcctttaaggtaaaaagcattttatatgatccttagcacatttttaagttttatcttaagggagacgcgcacaaaagcggctgccaaaccgtttcgtcatcctcacagcaaggaccggacgcttgctagccaccccggagcactgctctccttttaatcatgtattcatctattttaaattgccggcgacgacttttgtctatttatgaagaaaccttgagaacgaagttacagcttatcctaccgtgtgtgtggttttggggtttcgtttgggtttgggttcttgacgtcgtttgcagctgtttcctggccctggcgagtgtctgtcttggtgcccagtgcttctctcaaatctctttataataaaacttctgaaaagctgaa

SEQ ID NO: 10351 - DNA, 1071 bp, Homo sapiens
ggccaggcctggggcttggtgtctgactgtcggtgtctctgtgctgtgtgattccccgtgagctctcagtaactcactgtctcatgaacacttggacagccctccccgcccttcgttctgagtaataataccgtcagtgtgaaaacattccgtagtttagaagtagacgttgccaatgctgtgactcaaggccacggctctactaaaagagagagaggaagcgagagagagagagaaaaaacaaaaaacagaaaacacgaatgccttttctatcgattcaaggtctcaagatggaactgtggagactggttaggatctgaggtgagtcccaggatgtttcgtccaccagggcccagattctgggaggtgctggggactcagagggcctgacccctcacctccccttccctcttgcccagggaactcttccacaggacaaagccgacatcaagactcaactcctctaaccggtacctctgaatggggctggataaccggagaccccatgggaggtccctgaagatcagaaggggcttcacgcttctcctggacatggactagcttgagccaaggcagtggcacccaaaaaccaggctgcagtggggacggataccatgagcacaccctctcattgtccttctgatttggtccatgtgttgggtttggccttagtagaaatctctgaaggcagcagccatcatcctcttcctaccttgagtttttctaccctgtgaggtgggactttcagtaaaagccatgttgaccctctctcagaaggtcagtccagcccaagtgcaggggcggatctggaggtggacaaacctaggtccccctcctagcctctgtccaagccatctccttcaatatcccccccttcctgtcactcccggggctgtccctgtactacacggtgccatggagccggggagagcggggaagtctctgcatccatgccacccaccccagtcgggtctcactttcctgtgccttttgcatgttgggaaagggtcttggtgtcactgccgctcatgcatagaaaccaccaaaagccccaataaagcatccaggagg

SEQ ID NO: 10352 - DNA, 443 bp, Homo sapiens
attttctctgggctttggtgcgcctccagctgggcctgaccctccatgtcctgccctcaaaaaactgggtggagaaataattgtttctttaaaggatatgagttagaatcaccccctgttgaattttccctcctagatccccttcttaaatgtccaacatgggtcaaaagaaaatgacctccttgccttccttctttcctagttgcatctttcttttcttgggcctctgggaaagagccctgcatctttcattaattcggttctcagagaaccaaggctggaaggcatagaactggcaccttgggaccaggcataatggctcacacctataatcccagtattttgggaggctgaggtgggagaatcacttgagtcctggagttggagaacagcctggaaagcctggcgataccccatctctatttagaaacaaacaaacaaac

SEQ ID NO: 10353 - DNA, 1724 bp, Homo sapiens
caagccgctggggcttgggggctccactggctccccccagccccctaagagagcacctggtgatcacgtggtcacggcaaaggaagacgtgatgccaggaccagtcccagagcaggaatgggaaggatgaagggcccgagaacatggcctaagggccacatcccactgccacccttgacgccctgctctggataacaagactttgacttggggagacctctactgccttggacaacttttctcatgttgaagccactgccttcaccttcaccttcatccatgtccaacccccgacttcatcccaaaggacagccgcctggagatgacttgaggccttacttaaacccagctcccttcttccctagcctggtgcttctcctctcctagcccctgtcatggtgtccagacagagccctgtgaggctgggtccaattgtggcacttggggcaccttgctcctccttctgctgctgcccccacctctgctgcctccctctgctgtcaccttgctcagccatcccgtcttctccaacaccacctctccagaggccaaggaggccttggaaacgattcccccagtcattctgggaacatgttgtaagcactgactgggaccaggcaccaggcagggtctagaaggctgtggtgagggaagacgcctttctcctccaacccaacctcatcctccttcttcagggacttgggtgggtacttgggtgaggatccctgaaggccttcaacccgagaaaacaaacccaggttggcgactgcaacaggaacttggagtggagaggaaaagcatcagaaagaggcagaccatccaccaggcctttgagaaagggtagaattctggctggtagagcaggtgagatgggacattccaaagaacagcctgagccaaggcctagtggtagtaagaatctagcaagaattgaggaagaatggtgtgggagagggatgatgaagagagagagggcctgctggagagcatagggtctggaacaccaggctgaggtcctgatcagcttcaaggagtatgcagggagctgggcttccagaaaatgaacacagcagttctgcagaggacgggaggctggaagctgggaggtcaggtggggtggatgatataatgcgggtgagagtaatgaggcttggggctggagaggacaagatgggtaaaccctcacatcagagtgacatccaggaggaataagctcccagggcctgtctcaagctcttccttactcccaggcactgtcttaaggcatctgacatgcatcatctcatttaatcctcccttcctccctattaacctagagattgtttttgttttttattctcctcctccctccccgccctcacccgccccactccctcctaacctagagattgttacagaagctgaaattgcgttctaagaggtgaagtgattttttttctgaaactcacacaactaggaagtggctgagtcaggacttgaacccaggtctccctggatcagaacaggagctcttaactacagtggctgaatagcttctccaaaggctccctgtgttctcaccgtgatcaagttgaggggcttccggctcccttctacagcctcagaaaccagactcgttcttctgggaaccctgcccactcccaggaccaagattggcctgaggctgcactaaaattcacttagggtcgagcatcctgtttgctgataaatattaaggagaattc

SEQ ID NO: 10354 - DNA, 258 bp, Homo sapiens
aacctgtctgtgcctcagtttcctcaccagaaaaatgggaacaaggcaatggtctatttgttcaggcaccgagaacctagcacgtgccagtcactgttctaagtgctggcaattcagcaaagaacaagatctttgccctcggggaggctgtgtgtgtgtgagtatgtatggatgcgtggatatctgtgtatatgcccgtatgtgcgtgcatgtgtatataaagcctcacattttatgattttgaaataaacaggtaat

SEQ ID NO: 10355 - DNA, 5062 bp, Homo sapiens
cccgtcccccagggtcaccatctttaattcttttccttcttttctttggagaggcacaaggagaatttaagggtccatggattcagtcttgctccttgtaattaaactgcaggatggaggaacagcctgagatatgagcatgagcccattttggggtaagcctttggttactttaattactccatggaagacatggaaaatgtccccactgattcttaaacatttggaatcccagtctgcaactattaatctggaggctatatctattttgttttgctttttggttggggggtggtgatctggttcttacacatcttggaagcaagaacaatcaggaccaaagtcactttgatcccacttttccaggagaaaaaccacctgtttggccagtgagaactacttgtatgaaataatttggccaaaccttcagtgtgaccaaatgtgagactgggagtttgtgtttttcacaggaaccctaagtatagacctctgctgctcatcaggaaacttactggagatgaaggccccagctgttgtcaccgggtttggaaagcaccttaactgaatcatgtaagcatcaggacataagcagcactttgtggtcaaatgtggaagccggagacttcaaagcacctctgggacccactggttgaagtttgcaatagaaacttaagttttcccaaatccataaagccttagccctggttctcaatagaatcagggacctagcaggaaatgattttactcaacctaaaatgctggatcccaggcccgtgtagctataagaattctggcctggatcccaggtgtacaactatggacaagatatgggcctctactttctcctctataaaatgaggctggatgaaatgtcagctagggccattttggctgctgaggctctgggatttggtttagttactgaatgttagattttctgcctagaaagataactatctagatacaagtggttggatcctgtttttgtttgtggtacatgtgtctttccaagagagatgtgtcaccaattagccctgcctttaaagaaactattatgtgtattcctgggactcactgacaccaattttctttttatagtgatggttcaattttgaaaagatggcttttgtgaggccaggttaaggtgaccaggatcttgtatgatgaattccttccatccctgagactctggtactatattgtaaacctggctacagtagttaattacttgagattctttaattttggtctctgagctgggcgtggtggttcatgcctgtaatcccagcactttgggaggccaaggtgtgcggatcacaaggtcaggagttcgagacccgcctggccaagatggtgaaaccccatctctactaaaaatacaaaaattagctgggcgtggtggcgggctcctgtagtcccagctactcgggaggctgaggcagaagaatcacgtgaacccaggaggcagaagtggcagtgagccaagatcgcaccactgcactccagcctgggcgacagagcaagactctgcctcaaaaaaaaaaaaaaaaaaaaaaaatttttttttttttggtctctggaaatgaacacaagggcaggttattcctgggtcacttctgggcccccctgccctcccagccccacttgagtttctctctctggtgtgggtgaaccagtcagcctgaatgttctgcatttcagcactttagaacctccctgtgaagattttagccttagcccaaacatcaaattagacggttcacatgatggtttttgacctatttcctttctaatgtattccacatgatcatggtgttaaatagtgaaaagtactgtgttgtgtgtgcaccttctccgtgcatttattagactaaccagtcaagcagacagctcagttagggagaaaacaatactctgaaatttgaaggccaatctgttgttactaagctgtttatctctattgcctttttaaatgtctggataagttgttggtggaaattaagttacttaacctcattaataccaattctagagaaagttcttttcaccatggatagtaaccctggatcctctacggtactggctgagctggaagtgccaaaaagcactcctggctgcttctggttccatctgatgatgatgtgacacacactgctgaaaaggcccaagcagggcaagtgggatggctgaaggagggaaggagggggttcagaacccactggcctggatgggagaactgggtggaggcttccccaagagggaagacagataaacaaaacaaaacaaaaactgggtaaagaggaatgaatcactcagccctgatgtttcaattctacactgcattcctggccagtcgcatttgttttaatgcaggcatggccacagctctcctagagaattatctcaaagaccagaagggacctggagaggcctatttcttaggtttttccagttggacaaggaaggagtggtttcactcagcttctagaaggagttggagcctaagtttatctgcctccgggagctgcttgctttgttttggctccgaagaggtatcagatagttttgacacctcaggaaacttgaaccaagctgtgaaaccaagacctccctgcgtgaaaatcaaggtggtctccttgtggcttcaccaggatgtttgtgtcaggctgtctcagcagggtggggaatgaccagccagggagcacagtgagccttactcagcactggggagcgcactggtgaggcaaacccatgaacctcaagaactgggagtatgttccttcagggagaagttctggcccattgcacaaacacttggaaattaacttttccctaaattcaagatagtgtggtgtcggaaggaaatgggacagtaaattaggagacgcgggctccacctttaccttactacgtggcctttgatgagctggcttaacatccctgagtgattccatgatagagatctatactccaaactttattcctggtatctagttggcttcactgccacagacactgtactctctctttttagaagtttttttccttttttttccccctcaattggcttatttagtaaatttaggtctgaatgaattggtacctaaaagcttccaaatctatacatttcagaatatgggaattttcttcctcttcttcccccatatcccaacatggaattctggaaaactgtgcctcttcccctgttctgccttcatgggggagagactggatgaaatctacaaaaacagccaaaagtgccaccctggcttcatgtcttgaatttctaacttgctcttggcaaaggtcgctttattttttaatttttttccttgcattttcttttttattctattgctgctgcaaaaattaaggcaaaagtagctttcgatctttcatatttcatcctggtttcacaaggagtcacttatcttaggaggtctgtaagtcaggttacaaggccgggagcggtggctcacacctgtaatcccaacactttgagcggctgaggtgggtgtatcacctgaagtccggagtttgagaccagcctggccaacatggtgaaaccccgtctctactaaaaatacaaaaaattggctgggcatggtggtgggtgcctgtaatcccagctacttgggaagctgaagcaggagaatcacttaaacccaggtggcggaggttgcagtgagccgacatcgcgccattgcactccagcctgggtgacgagtgaaactccatctcaaaaataaaaattgaaaaatcaggttacaaaacaccatttttcccgaaataagacaataagaggcttttctctgaattcctttatattgagcctttcagaattctccctgggtgggcaatttctttaaatagtatttgaccctcagatcaatcctgggaatttttttcatttgggtagcaaaagctagagtattgctgtggcgattataatacttttaaaaagttttaccattttaaagttgccaacatttaattaaggttttcctttgaagcctcctttaatttagggagtaaaatgttagctaaaccaattatatactatatactatacactgtatctcctgtggccatgagaggtgtggctataccgaacagaaacatgcctactgttcaggaaagatgtcagttctggtaacacctctctgtattgggatctgttaattttgtaaatctaaattcttctgctcttggccaggtgcagtagttcatgccctgtaatcctagaactttgggaggctgaagggggggcggatcatttgaggtcaggagtttgagaccagcctggccaacatggtgaaaccccatctctactaaaaagtacaaaaattagctgggtgtggtggtgcgtgcctgtaatcccaactacttgggaggctgaggcaggagaatcgcttgaacctgggaggcagcggttgcagtaagccaagactatgccactgcactcccgcctgggtgacaaagcaatattctgtgtcaaataaataaattcattcttctgctctcctgacttagagaaatggtttgcttaaaatgctagtaacaaacatcacagtcaacaggagcttgcttcatgcgaaggatcaatgtgatttgtggatggagatgatagtgatgaaattcctgtttcatggggctgtttttcttttcatctcactgggcagcaggtttagtgaggcagtgagatgctgctgctgtggattcttgtagctatgcctcggcttcttggcatatcaggtaggaacctgttacaagtgaaatacttgaaacctctctgaccaagagcctctgatggagtgggaggtgagctaattctctgaccagcttggggcactgtttcagccactggtcacattccttgcttcaaactgaaattcagtttggctttgagtatagggatacatggtggattcatgtacttcagtgtttgttttgaccaaagtttatttttctagtgcattttctaagtcaaagtggtgaaaatatgtaataattttagtatgcatgactcagtctgaaacaataaaaatctctgaaaaatgtg

SEQ ID NO: 10356 - DNA, 672 bp, Homo sapiens
atctgaccttgtccaagaaggctggacgagagaccttctgtcccctcccagagggggaaccctggcactggcccagcagcctcttctctgagctccatgtcccagataaaccaggccagactgagaaggctccccagaggcctctgtggcctccactccgggaaagccctctgcccacacccacaggcttcacattcccaccaccttcgcaccgtgcccaggtacactttcaagacactgtaaccacaagatgttatttattgagctggcgccgggacttgggcggggcctgccctacagtgagcagcccacacaggaacgctcctctcgcgagcggcccgggcagggaccctgtcccaacaccaacacctcctctccagcccaatcttctgggtccagacctgcttgtcccttttttagaaaacacttttaaactttttaaaaattttaaaccttttttcagcagatatggagagagctgacaatcaattcacattttttaagccattttagctaaactgtcattgtgcatctctgaggttccctcatggagctccacagatccatttttagggaagggattttggctcaaaacgatctgaccacctctgccctgtccaccaggataagtgacacctaggacccaggaaataaatgccgatgatttgtgtg

SEQ ID NO: 10357 - DNA, 503 bp, Homo sapiens
agccgggctgggaatggggacacggtgtccaccatccccagctggtggccctgtgcctgggccctgggctgatggaagatggtccgtgcccaggcccttggctgcaggcaacactttagcttgggtccaccatgcagaacaccaatattaacacgctgcctggtctgtctggatcccgaggtatggcagaggtgcaagacctagtcccctttcctctaactcactgcctaggaggctggccaaggtgtccagggtcctctagcccactccctgcctacacacacagcctatatcaaacatgcacacgggcgagctttctctccgacttcccctgggcaagagatgggacaagcagtcccttaatattgaggctgcagcaggtgctgggctggactggccatttttctgggggtaggatgaagagaaggcacacagagattctggatctcctgctgccttttctggagtttgtaaaattgttcctgaatacaagcctatgcgtg

SEQ ID NO: 10358 - DNA, 187 bp, Homo sapiens
caaccccacccaggccagggtcgaatctggaatgggagggtctggcttcagctatcagggcaccctccccagggattggaaacggatgacgggcctctaggcggtcttctgccacgagcagtttctcattactgtctgtggctaagtcccctccctcctttccaaaaatatattacagtcacaccat

SEQ ID NO: 10359 - DNA, 2081 bp, Homo sapiens
tgtttctcgtgctttgtgatctgttcagtgtcactctgtaccctcaacatatatcccttgtgcgataaaaaaaaaaaaaaaaaaaaaaagagaatcgtacgtcgactttcgatttttcacagcctcagcctaggaaaaatggttcatgggataaacagctggtatttgtatctaaaactcagattggtcacataaatgccacggcattccgaagttttgattttgattaacattgacaggattactgtgtgtttaattttttaaaaactgaacactgtgattatggggttttgtaatttagcagaactcttactggtagaaaaaatagacctgaattatgtgtaactttttggaaggtttaatctgatatcaaaataatcattgaaatacaattccattgtaaagttgtacagaaagttatagagattatattgtgatgctggaacttggagtgagacacacatcatttggcatttgagttgaatggtaattcacagtaatgctgccgttgttcgggacttaaagacacttgacctgtttgggctgttgccacttaaaagttcatgaccacaaatgtccacagtgtcttcctctgaggaaactcgaatcctgaaatggaaattctttgtggcagataactggcttatgacaccttgaaaagttcaagtgctcatataacacaccacactgaaccccctttcctacagcaatatgttcactatgttaccaatttgcaacttgtgcttcaatagtggaatctactttcattgttaacactgagctaaagaaaaaaagccgtgtgttttatgaatgaccttatctgtttcctggataatacctttaagaataatgtcctgagtcaggcgtggtggtgcgtgcatctagtcccaactatttgggaggctgaggcaggaggatcgcttgagcccaggagtttaaagctgcagtgccctgtggttgcacctgtgaataactgcactccagcctgggcaacatagcgagacctcatctccaaaaaagaaaacaaaaaacaaaaaaaggaatgatgttctgtagagatggcctttcacttgaggagtactcagttttcaggttcttcctagctcggggcttttaaattttgaaatctaaacattctttcccaccatcctttttgactgttgaccttggttttctcttctaagtttctgtccctctgcttccttactttttttcctttttgaattctatctttatctgtcttttgttcactttttaatgctatatatgggcaggggtgagagacattactgagcaccttggtgagcaagcctggctttaaagattggagaagagcttctggcaccagaaccctgtcttcctccagttctcaacacggtgttgctcttcagtcataccggaatctgaatcaaaaaagtatttttaaatatccatgatttctccctgtattgaggctagccctgatcatgctttttgtgcctgtcaccaggtctcccaagtgcactcatccaggtcagtgctcagatgtgtttaaggagaccctatattcagggaagttgcgtgaacactgcagtggggagaattgagaatagtcaggcctatcagtctcacagaatcacccctctacctttgatattccacttagctgtagagtccatctgtttgtccatctgctgaaatgagaaaagaaaaatttatgcactgatttaaaacaaaccaaaaaaaaagaaaaaaacaaaaaaaaaaatccctcctttctagctgaacaaaaatgtgcagttaatacttggcgcttgaaaatgcagtagtgaatgtggaaccaagcctgtctgtatatctggtagctcttttcttgctttgttttttcttaccagtattctgcctaacgtttgcttctgtgatggttatattgcctagcaagcacacccgtggttgtgaaaatagtatagcaaaaaagaaaaatccccggttattgatgtactagatttgtgtatgtcttttaaacagttctagtttcaccttacacagaataatcaggaaaagtgtaaaaattcaaaagtgaaataaaaattttatcagtt

SEQ ID NO: 10360 - DNA, 4774 bp, Homo sapiens
gcaaggccaggctgtgagggccccagctccacccaggctttgggtgaattctggatggcttgcctcatgtttgttagccagcacttctgctctgtcgtctctccacagcacctttgtgaactcaggaatgtgcgccagtgggaagggctctcttgacagtcagcgtgccatcttgatgtgtgtatgtacattggtcaggtatattatctcaaaggatttatattggcgcttttaactcagagttttaaaccccaggaacagagactcctagttgagtgatagctgggaaagttttacattgtctgtttttcttctcccaatagctttcaattgttctttctggaagacttttaaaaaaatataaatatgcatatatatatataaattataaatagattccccacgcagtgtggtggcatctctgtacaggtacagttttaaacggtttgcctcttttctgtaagattatggtactgtggaacatgagggcagaggacaccgggaggctgttagggggtcactgaatcccaggagccaacctccccctttgcagggctgcatttaaaaattaggtttgggacagttcttgtaccgtggtttcagccttgtgtggtcatcactggcttctggagctattggtgatgtccaagggaaagctttgagagtttatgtttactctttgagtcccaggagaagcctggcaccctctttgcaaattggcctttgctctttcaatgcctttcatccatctccactctctcaactgcctaaagtcacagcacagatactgcccagtgccttaagaggagacatgatctctaccagggactctcagcaaacacgggactgtgttcagtccacaaaggaaaagcgtttttgaagctctcattgttcatgtaaaaatcatacacgtggcatgttgctccacattccttacacacaggggtagaggggattgcttttgtgacccacgttcaaatatgtgactgttttcttttctcttttactgctaagcagcctggaaaggataaatgaatattagactaagatttgttttccaggaggctcaatctgaacacacagaatgtcagagctggaagggactatagagatcatctgatctgatcctcttgtacggatgatcgcaaaactgaggtgtagagaggggaatggccaaaatcacaaagcaagttagcgttaagagctgagactagaattcagggtcctcactcccaggccaccgaaccatgcagccccttctttgggggaagagacctgtgtcagtcttggttaattgttccagggaaccttgctaacagaaacttgctcttgccttggctcttcagtagatgacctggctgtaaagagattccctggacgagccagatcattcagtttcagcgagtccttgagctccacaacatctaccagatatagcagacaagcacccatggaggcaggtttcgggcctgaagcagatcagagggctttgcaaaagacagcatagagccatcttcctgcaactttacctctttccctcagatggggagccatgactgggttgcacctcaggatactgtaatttgactccataattgcttttgctcctgaaacctgggaatcaatggaaaggcagggaatgtgcctcttctgtggccagattctgttatttgcaattaaagcaagtttttaaaaaatgcaagaggcagttgttagtcttcagggcttggcaactgaaatagctatgtggcggatacggaaaacagaggacaatttgaggatcttgctggaataataaatgacagctaccatttgttgagcacctattatatatcaggcactgagctgggtaggctctaaacttcacaataaccctgtgacttaactactttatctccattttgtagttgaagaaataagttcagagagaaagattccttcccaaggtcatgcagctagtaaatgatagaatcaggattcatagcatcactatagggggtcaatatttacacaaaaaaggaaagtcacaagcctgtttaaaatgaagtgaccaccttttcttgcatagactaaataactcgaactggcatttttaggttggaaagacagctgaattagtagttaagtctgatagccaagtaagttttaaaaaccaaagcatccaggatgcacacccctgcaccatttgctgtgcgaattaatagttctgtctctctctctctttcttttttctttttattctttgagatggattttcgctcttgtcgcccaggctggagtacaatggcacgatcttggctcactgcaacctccgcctcccgggttcaagcgattcttctgctgggattacagcatatgccaccatgcccagattatttttttgtatttgtagtagagacggggtttcaccatgtcagtcaggctggtcttgaactcctgacctcaggtgatccacccgcctcagcctcccacactgctgggattacaggcatgagccaccgctcctggcctctctttcttttttaaacaaagaactttgcacttggccagagaggaggagaaagcccattttctcccttcctaagctagatccaaataaaagaaagttcagttttcccccataactattcttgggtcatgaactttgatctggagtttgttttgtttcaggaatgtgtgcacccagcttgctgatccaacaaagtctattgcttaccagtctagcttgatgaagccttttggccagaagtcaatttgttttggatcagagaaatttcctgacaaggtatatttgttttctagtgacagaaaggcaaaggaacaagtcctagttgttgttgttgttgttgaatactaaatttaagatatgtcagcttgctttcaatgagccttgggcttctgttattgcttgagcatttggaactcgagcttccagagaaatttgaggtcctcgcttgttctctgccttcaagaaacaatgacctgattctgtctttaaaaaaaaaaatctcagaattctttttttgtttgtgtttttttttttttttgagacagagtctcactctgttgcccaggctggagtgcagtggcgccatctcggctcactgcaacctccgcctcccaggttcaagcaattctcctgcctcagcctcccaggtagctgccactacaggtgctgcaccaccacgcccggctaatttttgtatttttagtagagacagggtttcaccatattagccaggtgggtcttgaactcctgaccttgtgatccacccgcctcggcctcccaaagtgctgggattacaggcgtgagccaccttgcctggccaaaaatctcagaattctttaagactgttttaattgctccatcagtaattttgaagcactttcctttttttttttttttcccctttttgtccctttccccaagccaccaattggatggatgaatgtttgacggggaagaggaagggtaggaggatgcatggatgagtggatgagtggatcgatggatgtattgataaatagatagaaccagtcatctgaagcaacttaagaattgtagccttgactccttgagactgtagatttcgatccaggaaacatttatttagcacctgccagatgccagaaatttataccatttaaaactcagtaagtcttttaaatatcaggaaggagagaagcgacatcatgatacatcctatgggtattaaaaagccaatagaatattatgaataattttatgctaataaatttaacaacttcaacatcataaacaaattccttgaaaaataaaaagtaccaaaattcattcaagaagaaatagataccagcctgagcaacatggcaaaatcccatctctacaaaacatcaaaaaaaaaaaaaattagtcgggcatggtggtgcacacctgtaatcccagcttgtcaggaggctgaagtgggaggatcacctgagcccagggaggtcaaggatgcagtgagccatggtctcaccactgcactctagcctgggtgacagaatgagaccccgtctcaaaaaaaaagaagaagtagataatctgaatagccctatatctatagaaacttaatagtgctgggagatataggtattattatcctcattttacagatgtgaaaattgaggctcagagaagtaaagtctattgctcaaggtcatgtggctagaatatggcagagccatgattcagatccaggtcttctgattcttattccagtgtcctttctagcataccatgttgcctctaaagattgcagctccttatttactagaaaattgttcctgcccaatctacatctccacctcaccccatcttttcttaagcactatgtttgtgtttttatcagtattatattcattgtctttggaatacatgttcttgtttgtgtttggaaaaaaaatctcttttaccagcttgcactcggaccaacttggaaaaaaaaaagcttaaatgtttttgctatgtacagtttaaaaatgtgaagtttgtagctttaactttttgtaagaaaatctaataacactggcttaagtgctgacttgaaatgctattttgtaaggtttggatgtaagtaatcaattgaggtcagcagtttgtatgagacatagcttcctccattgcccccactccttttttcttttttaagtttgagatgcttcctgtgtttttatgttagaattgttgttctccttcttttcttcttcctatacctcatcacgtttgttttaaataaactgtcctttggaccac

SEQ ID NO: 10361 - DNA, 174 bp, Homo sapiens
agggagccggtccttgctgcacctgtgccgtccccagagctacaggccccatctggtcctaagtccctgctgcccttccccttcccacactgtccattcttcctcccattcaggatgcccacggctggagctgcctctctcatccactttccaataaagagttccttctgctcc

SEQ ID NO: 10362 - DNA, 167 bp, Homo sapiens
gtgtcagttgacctcagtgaattctgtgatgtttctgagatgcagactcccgtgtagtttcagattcttggtccatggatgacaccacctgcccatgcttccttgaattaggctttcctaacctgaagcgccttcaaacttccaataaagagatcattttctgcttc

SEQ ID NO: 10363 - DNA, 167 bp, Homo sapiens
gtgtcacccgacctcagtgaagtctttgatgtttctgagaggcagactcccatgtggtcccagatccttggtccatggatgacaccaccttcccatgcttccttgcattaggctttctaaacccggagccccttcaaacttccaataaagggatcattttctgcttt

SEQ ID NO: 10364 - DNA, 863 bp, Homo sapiens
gcgcgcccggtagccccggctgcccaccctggagggctgcgcccgcgccaggcgcggggacgtgtttctgggttctaggccctgcttccttgcccctttgctgcagaagggcagctgaaggctcaccctagaaaccgggcctggtgggtcttacccggctcactccctcccttgtccttacacatacaggaagacaagacctgagtggtgctgtctttgtgtccgtcgtgtatggctctccctgtcttcatttcttctcactctgtctctaaacctctctctctctcccttccccctcagtacttagtctacagacctatgtgcgtgtccctatccttctgtccttttctctcttcagctctccctgcctctcacacacaattttacatgccccgaggagccaagtttgggacatttaccctccaggcatctgtgtcccctcttgaagagaaaacacacagcttcacacatccaggcatagggggcaagctcttggggcatcaggaccctggagcaccaggtccttcctggaatattagatccacctggagcaccgggtctctctaagtctcacctggggaattcggtcccacctggggcaccagttcccacctagagcactgtgtcctgccctagagcacaaagacctgctcctcccgagactctctctgactgcagccaggcatagtacctttgcctgtgtttgctccctggtccacagatttggtggctgggcaggtgcctggacagtgatgaggtcttgccgccttaactgtcccccccagtcacttctcccacaggcccagcaggacgcagtcctgaggatcagggattctacagctgcattaaaatcaatcctatcc

SEQ ID NO: 10365 - DNA, 2092 bp, Homo sapiens
aatcaggccctttggacatcctgctgacacttgggccccttaacaccttgggctgctcagaccctccagatgaggtccagcccagatctgagaggaaccctggaaatgtgaagtctctgttggtttgggagagatagtgagggcctgtcaaagaaggcaggtagcagtcagcatgacagctgcaagaatgacctctgtctgttgaagccttggtatctgagaggtcaggaaggggacctctttgagggtaataacagaattggaaccatgccactcttgagccacaatacctgtcaccagcctgttgttttaagagagaaaaaaaatcaaggatatctgattggagcaaaccacttctttagtcatctgtcttacccccctgggacagctgttacctttgcagtgttgccgaatcacagcagttacctttgcagtgttgccgaatcacagcagttctgttggagaaacgcttggtttccggatccagagccacagaaagaaatgtaggtgtgaagtattaggctgctgtcagggagaggatggcagatggaggcatcaagcacaaggaaaatgcacaacctgtgccctgttatacacacgttcatgtgcacccaagaacctatgactttcttccagttccttctaccaggtccccatcctgctgccagctctcaacatagcaggccataggacccagagaagaatcccagcgttgctcaaagtctaaccatcataaagacactgcctgtcttctaggaatgaccaggcacccagctcccactggactccaattttttttcctgccttatttagaattctttggcgggaagggtatgatgggttcccagagacaagaagcccaaccttctggcctgggctgtgctgatagtgctgagggagataggaatttgctgctaagatttttctttggggtggagtttcctctgtgaggggcttgcagctatccttcctgtgtatacaaatacagtattttccatggttctgcctgcacttactttgtaatgccacggttgagattgagagagatcagcgcagccaggcaagggaactttaaagaattattaggccaccttctccctttcctggaccccagagtcattcctccatttggttaaaatactcagtgcagggaactcttacatcctgtctccttcacttgcagcgtcccctgctatgcctcaggtgaaccacataattcttgggtttccgttcctacttgctagtgatttctgaacatgttcaatggagcggcacacagtctagacccacttccgcattgaaaccttcactgttcctctttggtttcttcagagctttcccaagagagctgtcagttttcagctgtcagtaacacaaatgagtttatggtaacacaaatgagttttgctatctctctgagaagctcatctgacctcctgactctcagccctacagagtagggagttgatgctgacaggatgaagatttaggaataaatatgcctgggaagagactgggaaggttctagggtgaggcacctcagtaactcatggtaccttggccaagttggaaggaagcagtttgttaatgaggcacagtaatcctggctgcagggtctaggaggtaagaccagctgggatgaccttccctgggttaatcaatttccctctagacaacacaaactgcaggcatgtgactaactttgaaagaacacccatcatgtggctgctgtcacccttgaccagccgtggtggtggttactccatctgtggttggagcgcctctttgggattcacttcaaggtcttgtgcctatttttctgcatatcttctgtgatgacaaatctctgtcccctgagtgttaatttgatttttagaaatggccaaaagtcacgtgatccaaactttttttcagtaatatggagactgagctgcatggtagttggggatcaaaaatatgtgaccttaatgagatttttatgatttctaaagtaacaataaaagcagtttttagagttgagttccagagagggcagggcaatggcagtgacatgtttgtcattttaataataaataacatctattgagtgctt

SEQ ID NO: 10366 - DNA, 418 bp, Homo sapiens
ttcttgccctttccagcagctgcagctgccgtttctctctggggaggggagcccaagggctgtttctgccacttgctctcctcagagttggcttttgaaccaaagtgccctggaccaggtcagggcctacagctgtgttgtccagtacaggagccacgagccaaatgtggcatttgaatttgaattaacttagaaattcatttcctcacctgtagtggccacctctatattgaggtgctcaataagcaaaagtggtcggtggctgctgtattggacagcacagaaaaagatttccatcaccacagaaaggtcggctggcagcactggccaaggtgatggggtgtgctacacagtgtatgtcactgtgtagtggatggagtttactgtttgtggaataaaaacggctgtttccgtggtt

SEQ ID NO: 10367 - DNA, 161 bp, Homo sapiens
ctccagccaccaccaggctgagcagtgaggagagaaagtttctgcctggccctgcatctggttccagcccacctgccctcccctttttcgggactctgtattccctcttgggctgaccacagcttctccctttcccaaccaataaagtaaccactttcagc

SEQ ID NO: 10368 - DNA, 173 bp, Homo sapiens
gtgggagagtgggctgggatgtgcatcctgcttcccaactcctctatccaagactgtgcccacatccgaagcacaaggacctcaagtcaccagcataagaacatcaacaggaatgccgccctctctactgtctgaaccccttgtccctgtcaaataaaccagaacaaatgccc

SEQ ID NO: 10369 - DNA, 958 bp, Homo sapiens
gcctctacgatgttttttcttggtccacctttaggaaggtattgagaagcaagaaactggaggcccaatatctaacctgcaaatcgtttttgagtttggcaataaaggctaatctaccataaaactcttgaagcttaagctttaggtcaacacttgcaagagccccttccaaagctcagcacagtttcctcctgggatgaggagaggaatcagaaaccccactttggcatagagacaagcagcactgttccagtccagggatgctgtgtgtgccctggtggtggtcttaaggacctaccacatcaacatctggacaaccctcactgattacctgcccttggttgcactcatcaggctaattgatcccatatttaacctcaaggagaaatatcaaccagacactgcatggcaacctccttggggccagccttcaaggcttcatggccatatcatgaacccaggacaggcacagtgggggtggtgaggacctgatagagttggatcagtgactaagaggctgcaataaggtgccatgaaatcaaaatcaaagggctagaactctccaaggtcttgcccccggcatgtagcaccacctgagccagaaactgcagaggacatgacagtgtggcattactgataagttatggaaatggaaataatctttcctaaactaccaataataactttaaatttttgatcaaccatgctagagcaaagattgaattatccttctgttctctctacagaaatgatataaaaactatagtcataagaagagacaatcaaaaataatcagccataaaatattaaaaaggtattataaaggtatttaaaataataataataaagtgttattttcctgggattcatgatatttgatatattcgtaagcttttgttaagtttgtaatttgttgcaatttctttttcatttcaaataaatattcacttacgtgtct

SEQ ID NO: 10370 - DNA, 230 bp, Homo sapiens
ggccgggtcccctggccacacttggcagccctcctccaaagccctcttcctcacgtggctgaggccaccgctgggactgctcctagatggatctcagcggcattaagctgtgcctgagcgagtttgtagtgactcactgcacagcacccccagactagcatgtggttctatatttgtaaagttattgggataagaaacaattaaacagtttgtagtaaacacagatggtg

SEQ ID NO: 10371 - DNA, 247 bp, Homo sapiens
cttttaagaagtacctgcaagaaacctactcaaagcaggtcaccagccaggagccctgacccaggctgcccagcctgtccttgtgtcgtctttttaatttttccttagatggtctgtcctttttgtgatttctgtataggactctttatcttgagctgtggtatttttgttttgtttttgtcttttaaattaagcctcggttgagcccttgtatattaaataaatgcatttttgtccttttttagac

SEQ ID NO: 10372 - DNA, 1962 bp, Homo sapiens
cccttgcctagatttaaggccactgtgaggagaggggttgccccagaaggcaggggaaggacctgatgagaacagaatagctgggaggctgcagagggtgctgggagcccctagaagttccaaaagagaatgtgaagcagatcaaggaaacttctgttgagctaggctcagggtgagctttggctggggttgcccttgtgtagtacagggaagtctgacacagcctctccagcctataaacagccggggggctgtggcacaggttggggcaatgttcccttgttggtgggcccccaagctggcaaggcctcttggctgaaggccagggactctgcccctggagtcctggagttaagggatgaaggcaaggctgcaggtctggcccaggggaattaaaagccagccactccagtggtatcagtctctttattggatgtgagggccaaaagggactgtaactcctgtctcaggaatggggatagatgggaggttcttgaagccccaggcgaagctggtacctctggctacagcttgctctctgagacctggggcttcactcggatcacgccctcctgggcacaggtcacagctaggactccatcctgacgccacagccgcccatggaccagcccccgagagccacctgtgggtgaggtgaagggtgatgatggcctgcttcagaacagccaaatacactttttttttttttcctgaaacagagtctcactaagttgccaggctggtctcaagcgcctgggttcaagggatcctcccgcctcagcctcctgagcagctgggattacaggcgcacatcaccatgcccaacctccaagtggacttcttgcaaagggtctggcccagggcagggctgccccacacaagggtgcactgagtgtcgtggctgctccaaatgccccttcatgagcttattatggaccgtcattgaggggtaactcctcccacaggaaccccagttgacagtttaaaagcactttcacacctctcctcgcttcctcaaaaagatcacagagggaggagctctgagaacagtctccttcaacagttcggccaagcagaactgctgtacctctgaccacttgtgttaggaaaactatcggctccctgtataataaatcaagccaggtcctccaagtggtaattcatgaaaaatatccccactaccaccaccaaggggaagaaaggactcagaagagaggacttgaggccatgaggtctggcctcttccctccccatctggagactctttctcccttgctggctttgggcccaagtttgatgtttatgaggatgattgctggtttcccttacacatagcagagctcactcagttctcacagtagccaaatgaagcagttatgtgttgtccagttttccagaccaggactgaaatccagagagggtcaggaatttggccccatgatgaagccaaatctgaacccatgtcctcacttcaaggttatcaatcttggattgtgatgctattggtacttgagaataccccttatctgagtataaagaatccttgagttttgtccttggtttatcaagcaaagcttttcttcatttgaaatgtactcccttggaaaggaggtcagggttctgaagctagacattgatgaacgagtcttgtttctctcccctgcaaggaaggtccaagcaggcccttagggaccactgaatgccccgatcccaatcaggttaatcagaatcacttagagaacttaaaaatacagtttcctggaccttatccaagacctactgagtgagaatcttgagggtggaatcagaatctattttgaaaaggcatccccaaatggcagtctgatggactgcgggtttggataccactgctgtaatgtaaccctctttgtttagatgaggaaactgaggttcagatggaagatatgatttgcctattgtaatacaaagaatctgaactgg

SEQ ID NO: 10373 - DNA, 479 bp, Homo sapiens
agcactttagctgaagcattggaccacaaacacttctccttggaagtgtgagagtttaaagtgggcaggacatactagggtttagcattttagccaatgtcttcctaggtggggctaggaatattgttacagtagagaggaagggaactccactgtgtgacagtcctttcaatctgccccttttcagccctacttttggcattccttgggagcctcagttgttgttcaaggccaaagttatctccgtgctgcaaggtcaccctcttcctcccccagcccctgagatcagatcttatttgctctgcaaagatgaatccctgcctcaggttagggtgagacaaaatcggtctggtaaaagggcctgttttcagggacaaagggaatgaggatgatctttggctgttgctgctctttatgaagaatcttatttgtaactttttattcatattaaagttgtttttaataaaattaaacaaggg

SEQ ID NO: 10374 - DNA, 281 bp, Homo sapiens
agcctgggagggtgagactccatctaaaaaaaataaaataaatggcaacccctggtctaagataagagataaaacatcaggtggtgaggttgaggtttggggcttggtagcagttgccccagtcatgagatgactcacttaacccgtctcctttaagtgagctgggctgggaggcttcctacaggggaagaggcccctctggggagctgactcagccaggctccctgaacttttttccttgtcccatcctggggtcaataaaactgaatgttgcatattct

SEQ ID NO: 10375 - DNA, 367 bp, Homo sapiens
tgaccacagcaaccagctccacggcctgatgcagcccctcccagcctctcccgctaggagagtcctcttctaagcaaagtgcccctgcaggccgggttctgccgccaggactgcccccttcccagagccctgtacatcccagactgggcccagggtctcccatagacagcctgggggcaagttagcactttattcccgcagcagttcctgaatggggtggcctggccccttctctgcttaaagaatgccctttatgatgcactgattccatcccaggaacccaacagagctcaggacagcccacagggaggtggtggacggactgtaattgatagattgattatggaattaaattgggtacagcttc

SEQ ID NO: 10376 - DNA, 266 bp, Homo sapiens
catatcctgcggggaggaggagccccaggggtgctagtctggactgctgggactcgggcccctggggcctcagagggaccccggctgccactgacatatgaagattatggttctgccagggctcccctccctgcctgtccccaagtcctcacctcaaactccctccaagtcccatgtatataggtcctgatgccttcccaaccccgcccctcaccctgttgccaccttgtttcatttgtaaaaggaaatacagaaacccccccaag

SEQ ID NO: 10377 - DNA, 192 bp, Homo sapiens
ggctcccgtcctgctttggcagtgccatgtaaatccccactgggaccaaccctggggaaggagccagtttgccggatacaaactggtattctgttctggaggaaagggaggagtggaggtgggctgggccctctcttctcacctttgttttttgttggagtgtttctaataaacttggattctctaaccttt

SEQ ID NO: 10378 - DNA, 2545 bp, Homo sapiens
gaaccaggacctgccacccgggcccgagcgcgcccggcccgcggctccggagccctcgccgcgccccccgccgctgtcaccgtttacatacagaccctgtgcccgtgtcctggccccttaccccgctgcctgaagcccggaggccacgcctgttggggctgattcggagagggcgccccgccgcgcagagaccagagctcctcagtgccagtttggcccctgggtcttcgctgccctttttctaagcccggcctcgtctcgccggaggagacgctgcaataaaggttgggagaaggcgcggaaaggagaggagctggggccttggggacccccaggtagtccatgcggcccattcctccccttcccactcccgccgcggtcctcgctctgcgctcctccggcgctgctccctggctcccggcggcccggaggcccgcggggtgggaaggccgcgcttgccgtctccgccgccccttctcgccgagccgtggggcgcgggcggccgagcctatacatagtgtacaggagacatcgcgtgtatttttaacgtccccatatttatgtgactagaagcgcaacagacttctcgccatagtcgagctctcccgctgggggcactgcggggaggcgaggcctcgggaagctgaattttccttgacgtccaagagtttgagagcgaaagtgctttaggcccaggcgggggtcgtggcctcgttccctcgacacctccgtcctgctctcgcctcttcgccctttccgcgcgcccttggcttcccaccctcctctccagtccttttccgagatgaggtgagacaagggtccaacttttcctggattcgcctcccagcggacgtgagcttccactgcggctgcagagacgcgagcaacctcttctcatcggctcttatgcaagttggggccaggataggggaggggtgctcctcaagaggaagaaaccgagaggcccgcgccccaccgaggaagccccgccccggtgccttcgctggggagcaggcgtctctcctcagtcggcttgtcgcctgctccccgtatcccatggctcctcgccaaagactgaaattgtggagctggagggcgccccctccccggagtttcctccctgggacaagtgagggaggagggggccgattctggtttaggggccggacccactgagaggccccagagccgcccgtgatgttcctcccccgtccccatctggcagctcctgtctcgcctgagggacccagccgccttctccgtgctctggggccgggcctcgctgcttagcagcggcctctagctccgtctcccggggacctgggcctgagggagggctggagtcgcacgcgctttgtccttagcgcctgtctgctctcctctaactaggacccagggcctttggcttccccagctcatccttggcccttccgctccaccagcctggtctgaggcgtgctctgtccttagagaaggcgcggtggccgggttcccttcccctagggcacattactaagggggtcaggcactgcatgctcgttccagcaccatctgggactgggtacagtacctccagccccagggccctgacctgcgcacctagcttgacatctcacgcacctcccagagctggcgccactgagtaatccggacctcaccacctcttttcctttgagcccaaggcagagctggagctggcgccacccagacagcgtcaggtgtggctggggtaggtttggaggtctgccagttacaccaagtcccctctgagattcgatcaggggactggatagattctttcaggtactcaatcaggaagctggaggtgttagacaccagccccctgcatccttcagtagacctccctctgaacaccacagccaggtcctgccttctgggggcctgaatattccagagctgatgtgatgggctgtgcagaagggggctgtatcaacatcaattagggaaccaaagttgcactatctgggcccagattgtctggttggcaagagcaaagtttccgttgatgaaacagacatcccacaacaaaaacccaagttttctgtgctacatgtgcaatatttgttatgaatgttatcacaagtcattcatcaagttatctttataatcactgtagttagatgtttcatgtccattcaagtgacttttattctgagtgcaatatttcaatagccttgtagtgataactagtgttgcttttgttttagatgatctatgtgcagggcaatgcaatgaagttgaaaacccttgtaaataggagaggttgcaaaccaaatcaagagtatttattactattactgctattattattaggcctgcctttaattttcagtgtaagtgttcagtatgccgcatcctgcctcagtattgatcttgtgttctttgtgccaatatgaaaaggagagggttggttctttcctttattgttgaatgctcccatttaatgctttatggcttttactgtgttacttttttagactcccgtctgcacaaaatgcaataaaaataattttattataccctt

SEQ ID NO: 10379 - DNA, 864 bp, Homo sapiens
gccccccaccccaagcaggaaccccaggagatcaattttcccgacgatcttcctggctccaacactgctgctccagtgcaggagactttacatggatgccaaccggtcacccaggaggatggcaaagagagtcgcatctcagtgcaggagagacagtgaggctgcacccacccaggagtgtggccacgtgggcaaacaggcagttggccagagagcctggtgctgctgctgctgtggcgtgagggtgaggggctggcactgactgggcatagctccccgcttctgcctgcacccctgcagtttgagacaggagacctggcactggatgcagaaacagttcaccttgaagaacctctcacttcaccctggagcccatccagtctcccaacttgtattaaagacagaggcagaagtttggtggtggtggtgttggggtatggtttagtaatatccaccagaccttccgatccagcagtttggtgcccagagaggcatcatggtggcttccctgcgcccaggaagccatatacacagatgcccattgcagcattgtttgtgatagtgaacaactggaagctgcttaactgtccatcagcaggagactggctaaataaaattagaatatatttatacaacagaatctcaaaaacactgttgagtaaggaaaaaaaggcatgctgctgaatgatgggtatggaactttttaaaaaagtacatgcttttatgtatgtatattgcctatggatatatgtataaatacaatatgcatcatatattgatataacaagggttctggaagggtacacagaaaacccacagctcgaagagtggtgacgtctggggtggggaagaagggtctggggg

SEQ ID NO: 10380 - DNA, 2510 bp, Homo sapiens
ggaatccgtctgcctggaaattctggaactgtggctttggcagaccatctccagcatcctgcttcctaggccccagagcacaagttccagctggtcttttgggagtggcccctgcccccaaaggtggtctgcttttgctggggtaaaaaggatgaaagtctgagaatgcccaactcttcattttgagtctcaggccctgaaggttcctgaggatctagcttcatgcctcagtttccccattgacttgcacatctctgcagtatttataagaagaatattctatgaagtctttgttgcaccatggacttttctcaaagaatctcaagggtaccaatcctggcaggaagtctctcccgatatcacccctaaatccaaatgaggatatcatcttttctaatctcttttttcaactggctgggacattttcggaagggggaagtctctttttttactcttatcattttttttttttgaggtggagtctcattctgttgcccaggctggcctgatcttggctcactgcaacctccacctcctgagttcaagcgattcttgtgcctcagcctcctaagcagctgggactacaggcgcatgcaaccatacccagctaatttatttttagcagagatggggtttcactgtgttggccaggctggtcgtgaactcctgagctcaagtgatccacccacctcagcctcccagagtgctaggattacaggccttttgactcttttatctgagttttattgacccctctaattctcttacccagaatatttatccttcaccagcaactctgactctttgacgggaggcctcagttctagtccttggtctgctggtgtcattgctgtaggaatgaccacgggcctcagtttccccatttgtataatgggaagcctgtaccaggtcattcttaagatttctcctgactccagtgagctggaattctaaatgctggtctaggagctgtctccaggatggtgcaggatggctttgcggaaaggagatgggtttggaggccaacaaacctgcttgtcaatattgcctttgcctcttggcagcccttgaacttgagtaaataacaactccctgaacctcagtttcctcatctgcagaatggggataattatgtcccaggggtatatttagaccctgtttcctttcaggagggtccccagctggtccagggcctgggaaatttctacttatcctcattacccaggtccctcctttggaccctgtaaagggtcagggtgaatcagatgggggactgagcaagtagctatgactgcagatcatgtaaggaagggactgacaagaagctcccagatgctggggagaatgaagagctaaaatagatcctaggtgctggatgctttgtcatccatgcgtgcacatatgggtgctggcagagcccccaaggactctggcctctcgagttctcctatcttctccattctagatgcttcccttgtatccagtgatgtgctggagctggctttgccaagcttgtgagagctggttgctacattttcaggatttttacaagttggtaaacacagccattataaaaaattaaatgatttaaatttataattaagtaaattacattaaaacaaaaaaattatactcaaaattcattacttaattttactacctgttactattatctgtgcttttgaggctatttctacatagtaactcttatggagacctaggggagacaccgcgcatctcttcctgattccccactcaatgacatcatgttagtctttggttgcttaactggctgtggggagtgtttttgtatcacaaagattagagaggactacacatcagggcttgatttattgtttgttgattttctagacttcagaacatgctggataaaatgtcagtaatgcaaattaaactttaaagtatgtcttgtttgtagccaatacatggtgtatagcaccaaaaaatggagggattattcttccagtagttgaacactgtcatccgtttcagctgacagctgctcaaatcatttaagaaggagttctgacattcattttcattgttttacttttgtcttcctcactagtgtaaacaaaaatttcaaccagcattcatgccgaacctatacccattcttcagtgcctagctgtacagttatcagggatttttatttgtagtctaattttgtcaaatcatggccaaatcgcagtgatagttgactttggatacaaggtttggcaaaaaaaaaaatattaacaaaatattctgtaagaatcaattgtctatatggaatttaggataaagaatatttacaataaagaatatttacaataaagagtttattattatttgtaagttgtgtgcaacaaacataccctttatctctgtaaaatttatacacacaaaaattaacaaaagattctgtaagaattaattggctatatggaatttaggatagaatatttacaataaagagtatttacaataaagagtttgttattatttgt

SEQ ID NO: 10381 - DNA, 709 bp, Homo sapiens
caggatcagcagcatctccacctgccatctcaccctcagaccccctcgccttccccacctccccaccgagaactccagagacccagatgttggacaccaggaaggggccccacagccgagacgacgtgtccagtgaccatctcagaagccgtccatcagtccaaatgggggttctgagaaggaaagtacccaacattggcttcggagtatttgactttggggaaaagggctggctcggagtctagactcttctgtaagactcacagaacaaaagcaaggaattgctgatttggggggtgcctggtgatgaggaggggatgggtttgtcttgtcttctttttaatttatggactagtctcattactccggaattatgctcttgtacctgtgtggctgggtttcttagtcgttggtttggtttggttttttgaactggtatgtggggtggttcacagttctaatgtaagcactctattctccaagttgtgctttgtggggacaatcattctttgaacattagagaggaaggcagttcaagctgttgaaaagactattgcttatttttgtttttaaagacctacttgacgtcatgtggacagtgcacgtgccttacgctacatcttgttttctaggaagagggggatgctgggaaggaatgggtgctttgtgatggataaaaggcattaaataaaaccacgtttacattttg

SEQ ID NO: 10382 - DNA, 3451 bp, Homo sapiens
catctctgcaccaggacctcttaaggaaaccactgtacaaatgacactgcactaggattattgggaaggaatcattgttccaggcatccatcttggaagaaaggaccagctttgagctccatcaagggtattttaagtgatgtcatttgagcaggactggattttaagccgaagggcaatatctacgtgtttttcccccctccttctgctgtgtatcatggtgttcaaaacagaaatgttttttggcattccacctcctagggatataattctggagacatggagtgttactgatcataaaacttttgtgtcacttttttctgccttgctagccaaaatctcttaaatacacgtaggtgggccagagaacattggaagaatcaagagagattagaatatctggtttctctagttgcagtattggacaaagagcatagtcccagccttcaggtgtagtagttctgtgttgaccctttgtccagtggaattggtgattctgaattgtcctttactaatggtgttgagttgctctgtccctattatttgccctaggctttctcctaatgaaggttttcatttgccattcatgtcctgtaatacttcacctccaggaactgtcatggatgtccaaatggctttgcagaaaggaaatgagatgacagtatttaatcgcagcagtagcaaacttttcacatgctaatgtgcagctgagtgcactttatttaaaaagaatggataaatgcaatattcttgaggtcttgagggaatagtgaaacacattcctggtttttgcctacacttacgtgttagacaagaactatgatttttttttttaaagtactggtgtcaccctttgcctatatggtagagcaataatgctttttaaaaataaacttctgaaaacccaaggccaggtactgcattctgaatcagaatctcgcagtgtttctgtgaatagatttttttgtaaatatgacctttaagatattgtattatgtaaaatatgtatatacctttttttgtaggtcacaacaactcatttttacagagtttgtgaagctaaatatttaacattgttgatttcagtaagctgtgtggtgaggctaccagtggaagagacatcccttgacttttgtggcctgggggaggggtagtgctccacagcttttccttccccaccccccagccttagatgcctcgctcttttcaatctcttaatctaaatgctttttaaagagattatttgtttagatgtaggcattttaattttttaaaaattcctctaccagaactaagcactttgttaatttggggggaaagaatagatatggggaaataaacttaaaaaaaaatcaggaatttaaaaaaacgagcaatttgaagagaatcttttggattttaagcagtccgaaataatagcaattcatgggctgtgtgtgtgtgtgtatgtgtgtgtgtgtgtgtgtatgtttaattatgttaccttttcatcccctttaggagcgttttcagattttggttgctaagacctgaatcccatattgagatctcgagtagaatccttggtgtggtttctggtgtctgctcagctgtcccctcattctactaatgtgatgctttcattatgtccctgtggattagaatagtgtcagttatttcttaagtaactcagtacccagaacagccagttttactgtgattcagagccacagtctaactgagcaccttttaaacccctccctcttctgccccctaccacttttctgctgttgcctctctttgacacctgttttagtcagttgggaggaagggaaaaatcaagtttaattccctttatctgggttaattcatttggttcaaatagttgacggaattgggtttctgaatgtctgtgaatttcagaggtctctgctagccttggtatcattttctagcaataactgagagccagttaattttaagaatttcacacatttagccaatctttctagatgtctctgaaggtaagatcatttaatatctttgatatgcttacgagtaagtgaatcctgattatttccagacccaccaccagagtggatcttattttcaaagcagtatagacaattatgagtttgccctctttcccctaccaagttcaaaatatatctaagaaagattgtaaatccgaaaacttccattgtagtggcctgtgcttttcagatagtatactctcctgtttggagacagaggaagaaccaggtcagtctgtctctttttcagctcaattgtatctgacccttctttaagttatgtgtgtggggagaaatagaatggtgctcttatctttcttgactttaaaaaaattattaaaaacaaaaaaaaaataaatttttttgcaatcctttcctcagacctggctccaggctaactggaaggcagcactcccttttttatatagtagaaaaatgaagtttattataagtttttatattttctacttgttcatttggtgcaaactcaagatttcttttaataggtgcagtctttgagataatttgtttttacctgtattgccctttatcttttttaggtaattctttgtactcctgctgtctacctctcctcacaccccagcaccccccattttttcaaaccttggtatctgttgggtgaacagtataatcttttcatctgcttttagaatgtgggatatttccagtacctactttttttttttttttttgctgaatccaaagatatataaataaaatatatatattttataaagatcagaatgatataaaggagatacatgtttcttcctttaaaaaataaacggaagttacattgttaatgttcatattatgatgccacttttctaaactgcatctggattgaaaggtgtaaatatcaataacagtgctacttagttatcagtatttaatatctgaggtgagttgggggtatctatattaggggtagggtattacagaagataattggcttgatgtcctagaagttctttgatccagaggtgggtgcagctgaaagtaaacagaatggattgccagttacatgtatgcctgcccagttccctttttatttgcagaagctgtgagttttgttcacaattaggttcctaggagcaaaacctcaaggattgatttattgttttcaactccaaggcacactgttaataaacgagcagggtgttttctctcttcctttctaatatatggagtttcgaagaataaaatatgagagcaatatttaaattctcaggaattgacttatactcttgagaatgaattcagtttcaatcaagtttacattatgttgcttaaaaaaatagaaattattctttatcttgcaaagaattgaaaccacatgaaatgacttatgggggatggtgagctgtgactgctttgctgaccattttggatgtcattgtaaataaaggtttctattt

SEQ ID NO: 10383 - DNA, 3494 bp, Homo sapiens
ccctggctgcccaggccagtgctgcagctctgcagaatgttcagcatgccatttctgactggcacatctcgtgaagtttcatagaaacaaggagttggcatcttggatctcagaatggcctggaaacggatggcctctacgctgttccatcacagtctccaactaaggcttatggtatttcattaaactgttgcatacccagttagcacagtaggtggggagtctgcttcatttctatcattccatttttctgattaaactgtcaaatctgtcattgcatatgccatcgttttctagcaaaatcccatgattggctataaacgttttgtaagaagtcactctccttgaaaatactgaacatagctgtataggtttgtgattattagagaatatgttaataaaacttcttgtaacggctaactgccacctaaaatatgctgggttttctgttgtttgagtgtgttagagaaatttgaatgtttttgtcagttacgagtcagccgtaattagattagtttaaggacaggtcaggattagagaagagttgtttttgtgttttgttaatgtctgagtgatttttaaagtattttacaaaaagatattgaaaatttggttgaaggcagagtttagtaattaagttagaattaagagttttgcgaggttaaaaaaatgtgcctcgtggatctccctgttttagtaacatggagagaaaaagtctacacgaaaaagtgaacaatttaatgaagatgattagccttccttgaaataagtatttgtggatgggtgttaaattaaaatttccagaatacactgtccatctcacacactctgaaatctaatatatgaagtagtaatgaaaatgaagtagtaatttaaccagagttcatttatccttgaataaacctttttattttcacctcagaaaagtgagtgtactggcagttagtgtcactgctttgcacagtccccattaaaggaccctccagagagggacagtaactgtgcatgagaagccgctcccataagcctcctcagccagatgtcatgggtggaactggagctgtgtcggggccagcacagctgaactgtgacaatggcaggaggtggcatgtgcccagcacttccattaatctgagcctaggagttgaattctttggcaaggttggattctgaggtccttattatgttaatgatggtgcaatactctcacctgcagtagaactgagttctgctgcagcttgtgtaaaagtgggcagtacacaagtacgtcccaaagcctgtgagcagtatacgtggatgctcacccatgagaaggagcacacacgcctcattctctgccctcacccactgctcacctagagcatcgctgagcgttagacaaagtgttacacagaatgattaaaactttcagacttctacctatgctctttagtcctgtaaattgggttgtattgatgtcaactctggtgccttagaagttagtagtttgggaacctatctgtaaaatcagatgttttttctttgtagagaaggatttctggtgcttttgcttactaagagaccgatattcttaagttgttttcttgttttaacagccttgagaaatgtttggttttggccagcagaattcttgtctacttttttctttcccaaaaagtgttttttaatttctctaccaaagaaaaaatgagcaggtttaggtttttacatgacttatatacattagataaaaggagctgtataatttagcaggaagggactatgggagaatactttactgtgagtggaaaatgttagcacatttgactggtttgccctggaatccactgcacctttacactgcaccatgaaacctacactccctggtatcatagcgcgtcatcacctcaacaagtcagtcgtctccattgatatttgtacaaaaggtatacatggggaacacgtgttcattcattaagtccatcttgcgtgcagctatatccctgattggttatttttcctttccttctgaggttctcatgtcattttcttcatcggatgtgactaaaatttttctggtgtcttctgccctctctttaattttgcctcttgaggggtagcagatgtgtcagtgcattttattacttgctgaaacattcaggcttacatttcttattagtttagtattttaaaagatttaattttctgaatgaggcatttgaattgtaccagcaatggacttttaaaaaattggatgtaaaaccattcagggtgatttttcttgtcagtggacagtgacgaacagagatttgaaatcccttacctccaataataagccattcagcctaaattcatttttatgaataaatctcttctttctcatggtaaatgtggcttgtgccactcaaacactagtgaaagggtatgtacaaccgcaacatcaggccaggacaccatttatttaaccaagtaatggaggagagtgaaacattttccaaggccttatttctttttcagaatgctttaagtgttgattatatgtgctgggtctctagagaagtttttatttgttacaatactgctgctttgagcaattttgtttctcttcattgtctgttagggaaatcaccagctttggcatcttaacaacaaacagtggatgggtaatttttatttctgatacgcatctttagagtcaaatatatcttttccctgtactcctcatgtacaaccaaagaacatacattatgaaaattgtattataatatctggaaacacaacattttcctctggcaggtgacttttgtacgaaatgaaaaaaaaaaaacctgtattttttttgttgttcttttgtgattaaggatatacatttagtagtctttgttattaaaggaacctgctgataagtacaagtgtgaccatctcattcaaatgtttgttgttatgatgcaaatggatattggtttcaatagaagctggatccttaatactgcattttctgaattctgttttaatatttgtgttaaagtagacatagctgaactcacatggaatcctggagttttgttatcagcagctttgcagtttgggaaacaaagaaaccaaagctgagtgttttaaagaatgaacatatctggaaatccttgctctcaaaacaaaacaatataatctatcaaaggtgttttactcagtgttctaatttttaaaaaattttatctgcatatttgcatcaaatatttatgtgtaaaatgtatgttttacctccttaaaatgcctaaaagttagttaatagttactttggtttaacctatacacaatgattaagtgcatttaatattggtaatttaatgaaaaccattccttgcccaatggatgtataaatttttgaaagaataagcagaattatataatatgaaatgctatgtaaagttttctatgtaaaaatattatgtataatactattaaaatatcccatgctttgatcaggtggtacatcaataaaattttaaaaagta

SEQ ID NO: 10384 - DNA, 509 bp, Homo sapiens
actgcatttttctaatgggctaaacccagatggtttcctaggaaatcacaggcttctgagcacagctgcattaaaacaaaggaagttctccttttgaacttgtcacgaattccatcttgtaaaggatattaaatgttgctttaacctgaaccttgagcaaattagttggtttgtgtgatcatacagttatgtgggtggcttctagtttgcaacttcaagggacaagtattaatagttcagtgtatggcgttggtttgtgttgagcgtttgcacggtttggataatcttaaattttgacggacactgtggagactttctgttactaaatccttttgttttgaagctgttgctatttgtatttctcttgtcctttatattttttgtctgtttatttacgcttttattggaaatgtgaataagtaaagaattacttgtgttacttgccaagcagtgcacatttcatagtttcaaatctgtaatcagcaataaaaatcctaaaatatgtacct

SEQ ID NO: 10385 - DNA, 241 bp, Homo sapiens
ctgtcgtggcctgaagaaattcatgggggcagcccttaaatcccttccctgtgggaagtcatcctggctggtctgtcttttctccatttgtttaaaaaaaaaacaaaaacaaaaaacaacactttggtgtggtggtatggtacgtagctattttcctaagcatgtctgtcaatctcccttcttgctgattagctttcatatgactatattaaatggaagtatttttgggaaaagagaaacc

SEQ ID NO: 10386 - DNA, 4299 bp, Homo sapiens
cgccaggtgccaaggcttcaggcaggcaggcccaggatgggcgtttgctgcgcacagacactcagcaggggcctcgcagagatgcgtgcatccagcagccccttcaagacataagagggcggggcgaggtactggctgcagagtcgccttagtccagaacctgacaggcctctggagccaggcgacttcttgggaaactgtcatctcccgactcctccctgagccagcctccgctcagtgtggctcctcagcccacagaggggagggagcatggggccaggtgccagtcatctgtgaagctagggcgcctacccccccacccggaggacccctgcggccccctgcctagaggagcaccatctacagttgtgccattccccagccactgccttcatgctgcccccgccggactggcagagccaggggtcagccacctgcctttgagtcatcaagatgcctctgcagccacaattctgacctaagtggcagggcccagaaatcctgaaaacctcccgctgccttttgtgatacttcctgtgctccctcagagagaaacggagtgaccttttgtcctttacctgattggcacttcgcagtctatctccctgggtagcagacggctgctgcccttctctgggcatgttctgaatgtttacactggtaccttctggtatcttctttagagccccctgcaagctgcaactctaggcttttatcttgcggggtcagagcgccctctagagggaaaagctagaggcacagggtttctgccggcccacaactgctgtcttgatttgcattttacagcaaagtgctgagagcctctagtcgcctcctgccatctgatctccctccccaccattcccgtactcagttgttcttttgtctaatcggaggccactgtgctgaggccctgcagtgtctgctcactgctgccatcttcgctgctagtcagggttccatcctctttcccctctcccagttccctaccacgttggatcccattcgtcacccatgctagggtccccaaagcactggggcaggggccagagcagcagcacccagtgctccctcctctactctgacctggggccccagcatcctggagcacacgctccacgcacacacaccccagccctgtcccaggggcctggccccctcagccatctcagggtgaggagctgccagtcatgtccagatggaatgactcccatcctctcctcatctcccctttgacgagcctcaaactgctcagctcatcaaagagccattgccaacttccgtatgtggttctgggtcccagggagccttggaacctggcaccctggggtggtttaattcatcattaagaagcattcctgcttctcaagggacacagtggcctgcatgggccagcatggaccctgggctgatcatgtgcattcctgcttctctggggacacagtgggcccacatgggccagcatggaccctgggctagagcaagcacatctccatctcttccacctcaggcagtgtggctccagatgtcaggagggactgacctcaggaccttccaggttcctctgtgccaggaatgagaggccaggcccgatcctaccacctcgccttgaccctgaagtcagagcaggccagccaagcaggaagcacactgtttactttttgcatgaaaagtaaatgtgtacttgatagagctaaaatatgatcttttttaatttctcaaccccataatttgagccattgccttgcttaattttggtttccaccatttccttttagtggagaagagaggaagtcagagggtagggacctttgcctgcccctgggcgagtgcgggcagggatctgagaccagattgttctcgcacccctgccagaactcactctcccctgaagtttagggtcccatctcccagatgtaagttgttttgcaaactcagtttgccaggatttctttctttcctaatcttaaattcacagataaagcaatgaaaagagtcagatcccatttccgtctgccccctcgtcaccaggtgtgatagccccagccaggtcacacctggcctcacactttgagctgagacttgaaaacgatgctgtggcggaagagcatgtggggcttggtggaggggccccaggatttgttgggggcaaagggggtggcgggaccgttcccaggaggtaccagcacctgcctcgatctcctctgagcctcttctgccccctgtcggccaggtgaggtcagcagcctgggagagtgcccccaagagatgagggcaccccgtgttccttggcaatcttggctcaccttggtaacaaaaggccatagaagtctgtttttctgggtcagttttttttgcctgagaataacaaattgctgctgtctacctttagcacacccaataattctatttggggcagtgaatgcatagaagatataaaaatacgcagcttaactatatcttcctgcgtgtgtatttattttcttctgggtctaggccatggtacaggagaactgtggcgtgtaggaggaatacttcaggatgagtgaaggctggagccagggagcgctggaggaaaccagccctttagccagcagcccctccaccacaggcactgctgtgtggaacgagttcttggaatgaatcccatgctttctgcagcctgtagttgttatgacccctcggaacaaccaccccgtggcttgtgtggggtctcgcagggaaaagggctggcttctaggtccccgagataagtgtgcagggggatgggccagggccaggctaagggtggctcagttccatcatctggaggtcagacacactgtccagaggcagaactgaagccctctcggcccctaccctaagccagccacccctcttcacagtgggtgagctgggctgggctggctggcatgaggccaaggggtaggcctgagcgccagagtcgcccaggttagcccacaggattcctttgtgtgccatggaatgctgaaagatgggtgactggggacccttcttaaaacctttggcaaaggtgccatcggcagggcttggcctcatgaagtctcaggtccgtgttcccgcagggcgcacatgcttggagagtcctcagcagggtagccgaggccaggccacttctgctgaggatggggcaggctggggtgtgggtgtggcctggggtggctcagggctggaactgctgcctgattcctgtgtggggagaagctcagtggccgtttgctgccactgacaaggatttcacatgcagaagagaaaaggcccccctccaccccccgcattccctgccgagtgagagccagtgtttgctgcccttgctgggggcgggtaggaaaccctgagcttcctgatgcggagtcatgaagcagagtcctcgggaaggcatctccacagccccgggtcctctgtctaacgccctccatttcacgccctccatctcacagtcaagataaaggcctcgagaataaagagccagcccccttccatttagtctcctgccgtttcccaaacagttgtccaacagttagacattgaggggcttcactgttaccaggcatgtaacagaaggaggaagactaacacacaccccctgccccatcccatccccctctcccgagctattttcttgctgtggcctctggtgcccttgagttggtctccccggctgctctgcgggggcttcactggcttcggagtgagcgcgaagtgctggtgagcagtgggcctgtgattggatgggaagatgtgcatccgtggtcaaaagtcagctgccagccctgcggaaccagagcctcaggctgggatggggaggcctccctgcttccacctgcatggtgggcatggcctggcttacaccaaaggctttgacggtttctccaagtaaggatctgcaaatcttgaatcgtcctcaaaatgacgaagcttgaattgtcctcaagatggatgtgaatcttacattccttttcatcatttcctttgtaaaaatgacgagtgctgggtttttgttttaagaagcattatgaaggccagacttactcatttttctcccccaagtgagctgcaagaggcccctgttaggcccctgtttcctgagcagtgatgtgctgctcttcttggtggggctttgggctgggaggggaaggcgggtcagagatgggggacctgtggctgccatgcaggagcccctgcgtcatctcgttggactctttaagggagtcaggaatagatgtatgaacagtcgtgtcactggatgcctatttagaaataaagtgtatgctgctg

SEQ ID NO: 10387 - DNA, 1742 bp, Homo sapiens
gcagagtccgtgcttgctatctgtctcatgttacagagcttccattacatattaaacgtgaaatctatgactcctgtaccttacctgttcaacagacctgaaaatgagccatggcattgggacagggtcacttctgacaggggaagtgggtccccaggtcagcccttctcttccctttgggctcttgccaaagctgtcttcccctactgttaaccttgtttgtcacacggtcgagttcgtattggttctcggctacttcctggagcttctgccgcctcctgtggaagataatctagcttctccacctcttgtttcacactcattcctcccatccagtgtttgtctctcgggtccttcaagccagccaggaccttttctgggtcatgaatagcacaatgaagcaagtgtctcctttccttgtccccaaggtgtgcagactttggcagccgtgcacctgaccagagctgaagctcccgctgggctgtggggttgccagaagctggggttgccatcccggggtacatgtcaccagtcctcttggggttttgtaccatctgatgctggaagttttgattagtgatattttctactactacatatttagagttcactggttcagtcttaaatgcctgcatggtgcctttttaggataaggtataaccatacatttttggtggaagtgtttctgggttagggaagttaaagtctgtttatccgtaagtggggaggagggtcagctaagagaagtgggagggccagagctttttggttctgatttacaaattaatgaagtagtttcaaacaacgcggtcatgtttacctctccatttgggagcctgcctacattcttgttctagaagcacaaaaaatcctcagatgaattagaagaaagaggtttggggactcagcggatactagttcttttaccttctgcttggtaacttagattaaactgagcattgtttttctgtcacaaatgttttccttatgacactggtttcgacatgtaaaatgtgtttgaaaacctgctttgtagatgcagagagaagctataggaaacccagtaccacccctggtctgttctgacgagacatcgttcataaggcacagcacatcgcaagatgaacagttgttaataaaagctgttgctggaaacttgctttaggaacagctcaagaaccttggagttcatatttcacaaatattaataaatataagtccaagagctgtcagcctaatctgtaggagcagaacctctgattgaccaaaaggcatatgggtttaggttggttttttgatgtcatatgtctctgatggggctgcaagtgctacctcgcgcttgtacactgctgctgtggggctccgcgcctgccggtgaagagctgcagatgccgagaagccagcaaacacagggcccactggaaaaaaatagttttttcattagtatttctcgggaggacccaaaagttaaggtcagcttgttcactgtaatttctggaagaagttcactcagaccttcctgaattcagatcatctcagaagtctggagggaaatctggcgaaaccttcgtttgagggactgatgtgagtgtatgtccacctcactggtggcaccgagaaacttacttccttgtattaagtgcacttcttgtatttctaataagatgactttccagaaagtgagatttgttatgttctggcttttaaaaggtaaaatataaataaatttcataacttaatct

SEQ ID NO: 10388 - DNA, 825 bp, Homo sapiens
ccctcgaggctccctcttcctctccatacctgcccctgcctgacagccttccccagctccagcaggaaggaccccacatccttctcactgccatggaattccctcctgagtgccccacttctggccacatcagccccacaggactttgatgaagaccattttctggttctgtgtcctctgcctgggctctggaagaggccttcccatggccatttctgtggagggagggcagctggcccccagccctgggggattcctgagctggcctgtctgcgtgggtttttgtatccagagctgtttggatacagctgctttgagctacaggacaaaggctgacagactcactgggaagctcccaccccactcaggggaccccactcccctcacacacacccccccacaaggaaccctcaggccaccctccacgaggtgtgactaactatgcaataatccacccccaggtgcagccccagggcctgcggaggcggtggcagactagagtctgagatgccccgagcccaggcagctatttcagcctcctgtttggtggggtggcacctgtttcccgggcaatttaacaatgtctgaaaagggactgtgagtaatggctgtcacttgtcgggggcccaagtggggtgctctggtctgaccgatgtgtctcccagaactattctgggggcccgacaggtgggcctgggaggaagatgtttacatttttaaaggtacactggtatttatatttcaaacattttgtatcaaggaaacgttttgtatagttatatgtacagtttattgatattcaataaagcagttaatttatatatt

SEQ ID NO: 10389 - DNA, 604 bp, Homo sapiens
cgcggcccccgcgcgcgtccccctgccggccggggctgagactccggggagcgcccgcgcccgcgccctcgcccccgcccccggcggcgccggcaaaactttggcactggggcacttggcagcgcggggagcccgtcggtaattttaatattttattatatatatatatctatatttttgtccaaaccaaccgcacatgcagatggggctcccgcccgtggtgttatttaaagaagaaacgtctatgtgtacagatgaatgataaactctctgcttctccctctgcccctctccaggcgccggcgggcgggccggtttcgaagttgatgcaatcggtttaaacatggctgaacgcgtgtgtacacgggactgacgcaacccacgtgtaactgtcagccgggccctgagtaatcgcttaaagatgttcctacgggcttgttgctgttgatgttttgttttgttttgttttttggtctttttttgtattataaaaaataatctatttctatgagaaaagaggcgtctgtatattttgggaatcttttccgtttcaagcattaagaacacttttaataaacttttttttgagaatggttacaaagcc

SEQ ID NO: 10390 - DNA, 1832 bp, Homo sapiens
cctgaccctcctccactccacctccacccactgtccgcctctgcccgcagagcccacgcccgactagcaggcatgccgcggtaggtaagggccgccggaccgcgtagagagccgggccccggacggacgttggttctgcactaaaacccatcttccccggatgtgtgtctcacccctcatccttttactttttgccccttccactttgagtaccaaatccacaagccattttttgaggagagtgaaagagagtaccatgctggcggcgcagagggaaggggcctacacccgtcttggggctcgccccacccagggctccctcctggagcatcccaggcgggcggcacgccaacagccccccccttgaatctgcagggagcaactctccactccatatttatttaaacaattttttccccaaaggcatccatagtgcactagcattttcttgaaccaataatgtattaaaattttttgatgtcagccttgcatcaagggctttatcaaaaagtacaataataaatcctcaggtagtactgggaatggaaggctttgccatgggcctgctgcgtcagaccagtactgggaaggaggacggttgtaagcagttgttatttagtgatattgtgggtaacgtgagaagatagaacaatgctataatatataatgaacacgtgggtatttaataagaaacatgatgtgagattactttgtcccgcttattctcctccctgttatctgctagatctagttctcaatcactgctcccccgtgtgtattagaatgcatgtaaggtcttcttgtgtcctgatgaaaaatatgtgcttgaaatgagaaactttgatctctgcttactaatgtgccccatgtccaagtccaacctgcctgtgcatgacctgatcattacatggctgtggttcctaagcctgttgctgaagtcattgtcgctcagcaatagggtgcagttttccaggaataggcatttgcctaattcctggcatgacactctagtgacttcctggtgaggcccagcctgtcctggtacagcagggtcttgctgtaactcagacattccaagggtatgggaagccatattcacacctcacgctctggacatgatttagggaagcagggacaccccccgccccccacctttgggatcagcctccgccattccaagtcaacactcttcttgagcagaccgtgatttggaagagaggcacctgctggaaaccacacttcttgaaacagcctgggtgacggtcctttaggcagcctgccgccgtctctgtcccggttcaccttgccgagagaggcgcgtctgccccaccctcaaaccctgtggggcctgatggtgctcacgactcttcctgcaaagggaactgaagacctccacattaagtggctttttaacatgaaaaacacggcagctgtagctcccgagctactctcttgccagcattttcacattttgcctttctcgtggtagaagccagtacagagaaattctgtggtgggaacattcgaggtgtcaccctgcagagctatggtgaggtgtggataaggcttaggtgccaggctgtaagcattctgagctgggcttgttgtttttaagtcctgtatatgtatgtagtagtttgggtgtgtatatatagtagcatttcaaaatggacgtactggtttaacctcctatccttggagagcagctggctctccaccttgttacacattatgttagagaggtagcgagctgctctgctatatgccttaagccaatatttactcatcaggtcattattttttacaatggccatggaataaaccatttttac

SEQ ID NO: 10391 - DNA, 3252 bp, Homo sapiens
aaccgtggtttgaatgttttcagagtgaggatgccatgaggacttgtacatttggctagtttaaaagcatatatacctctgaccagtgacgtggaataggcatgagacgagtaacgttgcaagcttacaatattattaaagtagtagtttgataattgttaatataaactttggtggatcagaggtgaatttaagtccaaaacaaaggggcctttgctgatgaagttacgtgcttttgctgttttgtctgtggagaatcagatgttaaagcacattcttggaactatgtgagaagactagatcatttctgttggaagtggttgcatatttaacctgctgtgcagagcccagttaatttttcctttaactgtatttttaaaattctaatgtgaagtctgattctctcttgtggtacattggggacctcagctcttaaaggtctcatgttcccaatattttattttgattttttttttttttttttttttttttttttttagtgactgggtctcactctgttgcccacactggaatgcagtggcatgatcacagctctctgcagcctcaatcccctgggctcaagcagtcctcccacctcagcctcctgagtagctgggaccataggcacataccaccacatctgtctactttttgtattttttgtagagacagggtttcgccatgttgcccaagttggtcttgaactcctgggcttaagcagtcctgcctcggcttcccaaaatgctaggattagagccaccatgcccagcctattttgatttttgtttttttatgttcctttctaataaattgtaacaaatgatgttctcaagtacatttccagtttcttttcttttctttctttttttttttttttttttttttgagatggagtctcgctctatcgcccaggctggagtgcagtggcgcgatcttggctcactgcaagctctacctcctgggttcacaccattctcctgcctcagcctcccaagtagctgggactacaggcgcctgccaccatgcctggctaatttttagtagagacggggtttcgcagtgttagccaggaaggtctcaatctcctgacctcctgatccgcccgcctcggcctcccaaagtgctgggattacaggcgtgagccaccgcgcccagttgtgcatttctggtttctaagaatcaaaccacttggctgtttttaggagttacttcccatgttataaagctgaggaagctttttttttttttttttgagacagagtctctgtcacccaggctggagtgcagtggtgcaatctcagctcccgggttcaagcaattctcctgcctcagccttctgagtagctaagattacaggtgtgcgccaacacgtctggcttatttttttgtatttttagtagagatggagtttcaccatgttggtcaggtgggtctcaaactcctgacctcaagtgatccgcccatctcctcccaaagtgctggattgcaggcatgagcgcctagccaggaagctatcttttcttgagttatgaaactttgcaacagttgttcaaattggtgtttgtccttcctatagctttcatattttcaaattaattctgtatggctatataatttatgttttaaaaggcaattctcttgactttggaaatatggaagtctctcctttaacctattcttgttcccattcccagtctcatttgaaatcattccttttattgttagtgtgtgtatttttgttggtgtgcttttaatgcatccaagtatgcatcattttggataaaaaatacatccaaattaagatgttttaacacataggacaaacttgtgcactttttatgccaaaaaaaaaaaaaattgggttttccttcatgggatttctagaaacactgcctacactttatgaaaactacatagtattcacctgtgacaggtagagtttatcactattaattttatgaggctatttattactttccaatgcatccacttagaacaagctaagagtaaggctgctaactttaattccttgcctgattttattgtacagtgtgcacaagcacaatggtatgcttgtatatagaaactaaaaatactatgaagtacataagttccctatggcttatggagagttatttattaattaactttatggtagggctagtatgaatacctttttaacaattgtgtgctattacaacaatgaagattcaaatgactccgctttgaaggatgttttctctatatggtaaaatatatatgaagaagtcttgattacgtgaagatcacttgactcagaatacttcaatgtattttgttcacattaccactaagcatattatcagtaaactattaactgactgcacattatgtaatacgttgtactttttgttgaattcaccgaagttcttccatttatatgctatttttaatggcattccggctttaacattctgtgagtcttacaaatttgactcttgaatggcaaaataatgttagtatgtagaaggttaactttcatttataatataagtggtgcaggggttcaacattttaagtaaaaatatttttacacactacctctctctttttttttttaaagttttaacatcagaacttttgggggaaaaactacttcagggcttgactttttgtacaaattttaactgtaaaatacagatttatcttgtacgcattcatggaaatggaaatcaaagctgctattgctttttattttaattatcctgttaagggtatctatcaatggtattttcaagtagatctctgtttcttaaattattggtgaaataattgattactagatatattgtaaaaccaatagatcctggttatacgataaaatatcagctcattggtaggctgaatcaattatttcaagtgcaccttattaacaaaagtatcagtggatccaacataaaattttatagtactaaatgtcaagcctaactgtgaattttgttctgtatcttaagtaaatttatgataatgttctcgagctatcaacaaaatatatgtacttttgtgagctatgaattttctaattaaattttacatgctataacatgatttttacatgaatgatactttgtttataactatcaaatgtcagtattttactacaattttattataaagtgtacattatcactaaatgaacttcgattttaaaaatcaaattagctttagttgtatattattttttacaaataaagatagacttgtataaaggct

SEQ ID NO: 10392 - DNA, 641 bp, Homo sapiens
gacggaggactattttcctgtggacgccggggaagcacagcaccacccccgcacctgccctcggcctttgtgagctttgtggtcttcccatcaggaacgctggaaagtgacattgtgtacacactgcagcttgggggttttttctttgtattgctgtttattttatattttaaaaatatttaaaaaaatgtcgagatggggtctcactatgttgtccagactgatctcaaactcctgggctcaagtgatccacccaccttggccttccaaagtggtgggattatgggcaggagcctccgtgcccaggctgctgccattttcaaatttcctccctgcctcatgtgagaccacagggtttggagaagcagttggaacccacgtgtggtgatgcctcccacatcggcctgcttggggttctacaggggttgagggaccaggcctggccggggctgatggacagtggggactttccttctctccatgatggctttgcaggggctccatggtccttctctctgtgatgggtttttgcacggggtgtgctctgccactgtggtgggtgggtggatgctgcttctgttgcctccagacctcggtgcccacagccttgaggatccttccaataaaggtgtcaagagctc

SEQ ID NO: 10393 - DNA, 1058 bp, Homo sapiens
ggtgactggtatagtctgatgagaaagatgtggattgccataatacctcaaagatacacttgtttgcatttttcggtaatatacataggagctggggattctacagtatctgtgaatacgtggactcctttttataaggagttttaaaaattgttatgtattggatgaatgacttattaatggattataccgtttctgagaaccatcattttttttttcagcacacggaggatgtcttggacatgtgagatgtaacgtgacaggattttgcattttaaactgcagatcatttacatgtccttattttccacctcccccagtcaaaatgctttctaaatcattttcacagattatatacttcggatctgtttactgttcagttaagaaattcttggatcttattaatatttcagatgatagaatacatcctacagaaatacatgtttaaaatgtaaattgttttaattattcagaaagagggtcattctatttggccttttgaattagtatcaaaatgagattttttttttttttttgagatggaatctctctctgttgcccaggctggagtgtagtggtgcgatctcagctcactgcaacctccgcctcccaggttcaagcgattctcctgcctcagcctcctgagtagctgggattacaggcgcacgccaccacgcctggctaatttttgtatttttagtacagagggggtttcaccatgtttgtcaggctggtctcgaactcctgacctcgtgatccgcctgcctcgacttcccagagtgctgggattacaggcgtgagccaccacaccctcccgagatctttaaagtttaccaaaataaaggaaaccacctttgtagtctgtcagtgtctcttataaattgctactgttttcttaaagttaacttcagggtccaccttatgttgcacacatatcacatcgtttaaattgcatactatggtttgacttgctttggaattttcaagtcaaagtcccaaccctttgcctctccccctttaatttgccttttctcttttgatttaatgtttttttattc

SEQ ID NO: 10394 - DNA, 283 bp, Homo sapiens
gacgaatgccttagtttccactttccagcctggatcccctcacactgaacccttcttcgttgcaccatcctgcttctgacattgaactcattgaactcctcctgacaccctggctctgagaagactgccaaaaaaaaaaaaaaaaaaaaatcaccccagccatttctcttcatcctcactaacaatttggtaatgaagtattgatttccacttctctgcttatgggcggtattagattttcattgataaattgcaatggggctgtctcgtctccacagtaccc

SEQ ID NO: 10395 - DNA, 802 bp, Homo sapiens
acattttataatactttttttatttgtttaataaacttgaatattgtttaaaatgataattttccttcttcaaatgacatggaaagcaaaactttcttttttaaaaattttcatttatttaatggaaacttgcccattttcacatgtctgcttatttattttatatttttaaaagaagacagtattcacctatgtattttgcataacgattatatcaagtctaggggcttcatgtcatgttattaaaatcagttaagcaatcttttatgtttctatattatttagaatatttgttgttgcaattttcacataagaaaatttaacagttgtgtcatgttgtttctgtctgattttaattgctgtctaatgacggggaaagcacgatgaaaagatgtacaatcctgcatccttgcttatttcacaactaaagctttgtcatagacttcaaaatatatatgtatatattttatttaaatatatgttacatattatatttaaacatacatatttaacattttttacatatctatcaatatcagagatttgggtaaaagaatgggtaatgtttaaacatgtggaggcatgtggagctttatacaaacagggcagaaccacagaagaacgttttagaaaccaagagatgtgcagaaagaaatgtttagtgttttttcgttttaaattttagattttattttagtgctttgtaattaattggggtttatattgataaagatgtggaagttaaacagctatgtatgtaaaagtaaggcttatttcttaaataaaggatgcatttcttccc

SEQ ID NO: 10396 - DNA, 691 bp, Homo sapiens
cagtaactgccaagaattgttaacacacttgtgatgtgtcagccacagattcacccaggaggtcacagaatgacagcaagggaaatgacgaccaagagaagaagcttaaagtcctggctaattgtgtggtcattggaaaactctgcaatacaataattttctttattttctttttcttttttaaattcttagtgtaattgaaacgtgctctatagatattgactctgtgttccctcttttacagctggacagaaagaagtcaatgtcacgaaatgattttctattgtagatactttgtcccttgcacttctctgaatctgtccttttgtggattcttgtgattttccttccaagtgtttcagttgtatgacagtcagtattgacaataaaatggcttttaattatttgttatttgtttacaccctattcctcagttattattactgtggttctgattaactactggaaattatatttgattatatcaccaattagttaaatcagtgcttcgactcactcttatctgttctgttcaaaactatttgttcaaagaacccgttagtgttgtttacagggttacagtttctctcacatgctttcctcacccctttacccccctttttgaaagcctttattttgttcggagtctcttcataaaacatttgaaaataaaagatcattcttcacccat

SEQ ID NO: 10397 - DNA, 2366 bp, Homo sapiens
tgaactcttcagtcgtacacactgaaaacctatttcttctaaattacatgatttggattggttttagggttttagggttgtagggtttcttttggagaggtagggggctaattgctatgttctcatggataaactttgccagcaaaaatcaggcttttgaacaattttaattttttgcctcataaattttgtgaatgctattcattatagggcttgtatatataatctaaaatgtcagcaaggcatcggagatgggttaacatctcaaaacaaaatagcctacaaatgttccttgtgggagactttggcgagggtctgtgggtaaaagcaccagggggttaatcttggctcagtttcctaaaaagcattgattaatttaactggcttttaaatatccccttccgctgatatttgttgtcagctgcctacagtttaatatgcagcgttcacaaaacagctgccagtgctacaattaatgaagcaaaacttaatatgtaatcacaatctaaattagcatcaatactttgacattcattacattggtttgggggaagaaaagtagttctggtatgtttcattgatccccagataccttccaatctggacatgatggggctgattccagatggtttttctgaaatttcattaaggtaggtcagcgtcatttgtctctgtttaggtaaaatataaaaaccctgcccagtagcagtggcatcgcttggttcctgatgcccatgttccagaggaattcggataccacaaacagctaagacaatctcagcttttcttagacaatcttctatctcaaacttcagacattccagaattgtcatgatgtttacactgtctgagttaaaaatcctgttcaagaaaaaaaaagattttgtatcacttcttaaaaaggaatattcatagcacttgtcacaaatagaaggcaaccatgagataatacaagccagggagaggcttgtattacatgacaggtgtaattagtctgctgagccagctttacccaatgaagggcatatgtgttagagagattagctaagagtagaaattcgagcatagaggccaggtgcggtggctcacgcctgtaatcccagcactttgggaggttgaggcaggcgtgtcacttgaggccaggagttcgagaccagcctggccaacatgatgaaaccccgtctctactacaaatacaaaaattagccgggtgtggtggcacacgcctgtagtcccagctactggggaggctgaggcagcattgcttgaacccaggaggtggaggttgcagtgagccaagatcacaccactgcactccagcctgggcgacagagggagacactgtctccaaaagaaagaaatcccagcgtagatccaaactgagacactgaggcttcgtccttatagtagtcaggagcaggcgattgaagtaattctgtcctgcggggttcagcatcatgcacgttccccctgggccattctctgatgcagggcacttgctccacactctgggaacccagattcaccagtctgccctgtcacgtagttgaaggagttgcatttatctttctggctcctaattcctttaaaattacatttgttgcagaacctccacaaggctaaataaaattacatttgtgaccatcagagaactgaataaaccattaactggccatcctggttttgcagagatcaggttgttgacagttcctggttgacccacagctacccatgtcagttatctccactaacatatccaagaatctttgtaggacaatttctccacctgcaaggtctttcaggtagaactcttcttttaaggcaattagcccattgccaaaaggttttactgtcttaaagctgtctttctgagatctaattccaaggacttctccacagctaagtgagatgcctcacaccattaggtgatgctttggacagaacagagtattttcatcttgtgtttaaagcaattccttggcttcggctcctcaccactttctatgccagtctcccatttatgtccctagtaatgcctatgcaaaaaaaaaaaaagaaaaaaaagaaaaactgatggtgaaacctacaggtttaagggcttaaatctcaaactttgttaggagtaacaggagcgtgctgagcgggcaagcaataaaacaaatcataccaaaaagccacattgctctctcctaagccccaaccccactccactcctgtggccaggggtccaaacagaaaataaccggagaagacaaggaggtcaaaggatcagggaactaagcattatgtgaattcaccagcaagatgtacagaacgcctgtgtttacattgtttttatggaactagcagaataaaacatctatttt

SEQ ID NO: 10398 - DNA, 799 bp, Homo sapiens
gccaccctctccgtagggttctttctcgaggactctaccctcctcccccacgtcctgtctcagctgcagtcgtaagtccgtgcaccatccttgacgttttgctgccacctctgtccacattcttcttggatttgtataaaagaatctttttttaccttgatgtagaatcatggtggaaaaagttggaaacacagatctgtgcagttctacattcactgattattacagtgtgattttcatcggttttgtaagtacaggacttgccgtttcttttgatctcttgattgaaggaggatagggcattaaagtgcttttgacatgaggaattttcatttggttcttctgtcaactttcttgcttattctgctgaaccctctgtgtatttcccttccaggtatatttgaacagataagcaggcatgcagctctgagactcctgagttttatgccattatcaaaagcattttcaagaatccctcaattctatcctgaaatgatgttattctgataataaagctcagatctgcaactttattgttatatatttttcacttctgtaaaattaatggccagtttttcctgacaatttataggaacagtatctttcaacatactccctacattatccttcaatatctgcaatacttgtctttagtaactgtatttctggtaagattatgatttcatgagaaacaattgaaaatatatccgatctaattaaattaggtcagcctgctattgctctcaggtgttgcctgtcttcacgaatgattagtatcgattgacctctttcttaggtg

SEQ ID NO: 10399 - DNA, 33 bp, Homo sapiens
ggactgtctacctcccttcctcctctgctcacc

SEQ ID NO: 10400 - DNA, 615 bp, Homo sapiens
agcccgcactgccaccgctcctgccccagaaggttgtttagtttccacgtaggcaggtcgctttgtgcctctgagtgcgctgctgtgtgttctctctatagttctgtgtcataaagctgtcctggccagccttcaagctggtgtggccactcttgatgtgaggcgtgtcggttccaggggggacatgggaggggctgcacagtggcccgaggtcatgcttgcttccacctgcaggtgcatttggtcctttccatggccaggaagccctgtgggctgcactttttatgcttgcagtaacaagagactccagagtcctcaccggtgcagagttggcacatattaattaactaaaattctaatgatcttgctaccagcaataaatcaagtaggccaagtgaaactgggctttaaaaaggatggatttcaaatacactgtgcccactagaagcttcgaagggcctcgtccctctgctacagccctgggaggagccaggatccttgttggtctagctaaatactgttaggggagtgtgccccatctcatcatttcgaagatagcagagtcatagttgggcacccagtgattgggttcaaaaataaagctggtctgcctct

SEQ ID NO: 10401 - DNA, 72 bp, Homo sapiens
atggatttgtgtgtcaggagagaaaaaagttgagtgttgacaaactgtatgcaaactaataaaactattctg

SEQ ID NO: 10402 - DNA, 80 bp, Homo sapiens
atggatttgtgtgtcaggagagaaaaaagttgagtgttgacaaactgtatgcaaactaataaaactattctgaagaaaag

SEQ ID NO: 10403 - DNA, 1267 bp, Homo sapiens
aattggaacgaagaaaggttaggagagtagggaaggaacaggactgcaaaaatccttctccaccgcacagactgggaacccctcctggcctgggggaagagtttgttacctaccttactatttaaagagccttcactggttctgcatcacccgcccctggacttcttagttgtttctctagcgctgagctatctcctaactttggacctattatcagaaggtgacaagtactggctctttattcattaagctttttttttttgaaccccattctttccttctctgaaagtggtgctataagttttagaatcttttaaatacattccctgggccaacagacccacacacttagccattgaaatgtcaaattgatgtgccctagatcaacagatcaacaataccttttttttcagtgttaaggtaatggttggtttttgtgtccgctaaatatttaccttgaaaaaaagaaaagtgtgtatctagcttcttcagagatcaagtcctctggtaggaggcaaaggttctatctgcttagcaactagttaataagtggtatctgacacactctaaaccccgtgttcaaacgggggccttctggttttaggaaacttgtagaaacgaagcctgctgattgatttttttctcctttttttttttttttttttttaactttgaaagttaactcttcaaatgggagactctttgaaatgacatgttcctttaaggtactgaagctttatttgcatatttatttcagatgtttcgagtaaacttgaaaagggtaggcacgaagcaatttgttgctgcttgtcacccccaagtccccgtggaggttctgtattttaagaaacagtgcgttgagtgtacagattttatttatgcgtaatttaatggggtctgtaaatactggtgcacttcttacgacttttttgagacatgggatccaattttaatattaacttttaatggtgatggggtaatctataacacatcataaggttttattcatatatatacagggtattaagaattaagaggatgctgggctctgttcttggcttggaagattctatttaattgaaactctctgttcagaaagcaataactttgtctcgttcctgttgggctgaaccctaaggtgagtgtgcagtacagtgtgtgtgggtgaaatggagatttggaattgaactctctgcctgtaaatgttccccaaataattgttgtgtgtatgatacgtgtataataaaagtattcttgttagaatctg

SEQ ID NO: 10404 - DNA, 532 bp, Homo sapiens
aaataaatcagaagaacttctgattgccagaggcttttcattagttttgttttgattggcaaatactattgtggaaagaacatatattatattcttaattctgtaaaagtgaaataaaataactttccgttaattatatatttttgtcaaaacaaatgctgtactccaattttctttgcaaggccttattcttgcctctatagagacagatttctgtcctatcttctaaagcaaattataaaagaatatgttattttgacctttaaattatttttgaaaaaataatattttatacatgtcatcaaagtctacaaaatatttaccttctacgatacaactaatgttaacgcataaagtatcttactggtaacaaaaatcataatgatctgaatttgagatgttgcaaatgaattgtggtgtccggtagtttcttcttacattttcctttgcctttatactttaggggtcttactccattaattcatttgttacattagtaaaattcagtatgaataaatatttggattgatgt

SEQ ID NO: 10405 - DNA, 363 bp, Homo sapiens
tggctggagactctggctcagccagagttgtttctctccactctgcctcatctctgtacgaatttgggtcccagccttgttgggttgtcagccatggacatggatttcaacccctggagaaaacgatgtcattgttcagcagctgagagcccaggcgtccgcggcgacttgccgtctctccattccactgcctgttgcagagtttttctgtaactaagggggttgaggttattgtagacgttagattgcgggcaccgccagggattttgcagcgcttcagtgtacgtgttagagaatattggaaaagcgtctgtgagccccgtgctgtattttgtaataaagtcttttgcagattgcttcccg

SEQ ID NO: 10406 - DNA, 1781 bp, Homo sapiens
ccccgcactacatctacccaccagccatcgtgcagcccagcgtggtgatcccagccgcccctgtcccgtcgctgtcctcgccctacattgagtacacgccggccagcccggcctacgcccagtacccaccggccacctatgaccagtacccatacgccgcctcgcctgccacggctgccagcttcgtgggctacagctaccctgccgccgtgccccaggccctctcagccgcagcacccgcgggcaccactttcgtgcagtaccaggcgccgcagctgcagcctgacaggatgcagtgaggggcgttcctgccccgaggactgtggcattgtcaccttcacagcagacagagctgccaggccatgatgggctggcgacagcccggctgagcttcagtgaggtgccaccagcacccgtgcctccgaagaccgctcgggcattccgcctgcgccctgggacagcggagagacggcttctctttaatctaggtcccattgtgtcttgagggaggactttaagaatgactgagaactatttaaagacgcaatcccaggttccttgcacaccatggcagcctctccttgcaccttctcctgcctctccacactccaggttccctcaggcttgtgtccccactgctgcatcgtggcggggtgtcacagaccctctgcagcccctggctgccctggactgtgcagagatgcctgactccagggaaacctgaaagcaagaagttaatggactgtttattgtaacttgatcctcccgagctgtgagcgcagtctgaggtgtgaggacacggcctcctgttggagtcccattttctccatcagggcacgtgggcggcttcctcaagcccggaggagctcccaggcgcacaggggccgccggtaacaggggccgccggccaaaggcccctttccagtcatagcactgaagttgcaacttttttcttgtaattgttttgctactaagataatttcagaagttcagtctattttttcagcggatactgccgccaccaagaatccaaaacctatttttgacttggagagacttgcttttgttggttccgcccgtggagacgacgatagtgtttctgtataataaagtgtctgccggctcgcgggccaggatcctctcggtgggatgggcaccacagacaggaggcccctcaggcccgtgcgggccactgtctgctgccgcctgccggggtggcagagtgagttgtctcaggaccccgtcactgcgacgttgacactcctctcccttcccttcctccccaactccccaaacactgtggaaggggagaaggaagtgatccacagcattcaggccacttggggtctagaccatggtggtgccagcctggggggggcagtggccctcagctctgcccgctggagcggttgagtgcagaagggtgcgcctcttccctctacccccgcaccacctgctgtgtgccagcctgagacggttcctgcctgtcttgggggttggtggagggtggaggcagttctgccagccgtggcagggctgctatggggcatccagggctgtgggggtctggaggaggggacatgaggtgagaggtatcctggccgagggcggggggcagcggggggtctccctccggacctacctcagggagctgagcgtgcaggcgctccagggcaggcctgggacagagtcaaggctcagagaataaaggtagctaatctcatcataatatttttattagaatgttctgatgataaaaataaaacttgttttctttaaag

SEQ ID NO: 10407 - DNA, 656 bp, Homo sapiens
tcagggcctgagtgctttacctttaaaatcattccctttcccatccataaggtgcagtaggagcaagagagggcaagtgttcccaaattgacgccaccataataatcatcaccacaccgtgagcagatctgaaaggcacactttgatttttttaaggataagaaccacagaacactgggtagtagctaatgaaattgagaagggaaatcttagcatgcctccaaaaattcacatccaatgcatagtttgttcaaatttaaggttactcaggcattgatcttttcagtgttttttcactttagctatgtggattagctagaatgcacaccaaaaaaatacttgagctgtatatatatatgtgtgtgtgtgtgtgtgtgtgtgtgtgtgtgtgtgcatgtatgtgcacatgtgtctgtgtggtatatttgtgtatgtgtatttgtatgtactgttattgaaaatatatttaatacctttggaaaaatcttgggcaagatgacctactagttttccttgaaaaaaagttgctttgttattaatattgtgcttaaattatttttatacaccattgttccttacctttacataattgcaatatttcccccttactacttcttggaaaaaaattacaaaatgaagttttatagaaaagatgg

SEQ ID NO: 10408 - DNA, 303 bp, Homo sapiens
atccagacggagttctgcccaggggtgctgcatatcggtcaccaggcacccagggccatgccagggaaaggaagagctcccctgaatcccgaggacacagtcccctgcgtacttgctcatgggatgttgcaaagaacacaaagtgtgccttagacattctcaagtcatcagcgtcacccttccagaatgttcacgtccacacccattcttggctaatgtaatgaataaggcttctctcatttgtttttgataccttgggaatttctatgcagggctttaaaaaaaaataagtgattcaatttt

SEQ ID NO: 10409 - DNA, 7801 bp, Homo sapiens
ccgaacctcagcctctcagacttgatgatgaagtaggtggtcctgaaagttaacaggagggctggggtccctgccaccagttttcacctagccagtcttgagtcttctccgtgcaaaaaggattcacagaaatggaccagttctgttctccaaagactgcagcaatgatatttcagtctgtgaacttctattatgtaaagaatctctagtgtacaaagggactacatcgttggcttttgaccttgctgaaaaggaacatataattgtatggatggtaggattaagttgttgagtagttttgtaatcaagattttatgtaacatttgtaaagggaaaattagcacttttgtggttcttaagggaaaagaaacagaccttgtggagattataatttccttggtttctgttaccactgttagagggagttgtatcatttaacatatagtaggatagtttaagtgtagggaggacaattattgtctgaagctaaaatgggttatttataggactgatggaaatgatttcatctctgccatctctaaagcacttttcattgaacatgttagcctaggatacgtacagtaaattaacaatgatagcagcagatgcctagctcatcctgggtttgcttctgaccttgtcatgtgtgtgccaccaaacacgttattggcacctttttaaataagctctcatgatcaagatggtgatggtagagaagctgcccggaataaactgaatttcatatgttctaaaatgactagcaatggtttaaaaaggaagaagagtggaagtgaagaaggtggtataaatgctgtcaatttttttttaacccaagtattttggtggggaaaagcaagtatctattgcttagcatatgtaaagttgtagtctatatttatggggccattgcttaaagattataaattatgtaaatacattaataaattctaagtttcatttgacattccattgaatctcgcacccagtcttgcgtatgcctgcccagttttcagcctcttaacgggagactcaagcacattggtattgtataaaggtatagagcacttagcttacaatctttaaaggtttctctgccttcccttctacccacccgcctcccaccagatcccatctggaaatcataataaagacatatgccactttgacaaacctgactagtccttactagcctgagggtaaaagattaagctccaacctcaagtcatttacctggtcttggtaataagtttcttttagcttgtacagcatcctcagaccaactgaggagctttccttgttaacaatttagcttatctttctgtttcctttatttttcccctgcctctgttagtggttaacactcttttccctcagggagcctaatgaggtttttaatatcatctaaaaataaagcattgaagtgaagttggtgaaaatttgttcctggtctaatttggcacccttccaacctgagtattgtaggggaaggaaatttacaagatttaataggaaatgaaacagcttgaatttcaaactaaattgtattttcagagctatcctgaaactgaacagctgaaactttaaaaaataattggtattattttgtgccccccacttaatatggatagattttaatgggaaaattataattcagattaaataaaaaacaattcccttttccctgttgtatatcttaagcatttggaattttttttatcttctgaaatcatataaaaagaatgtcattagtaaaaattctaacttcgttttgtttaaaagacatgtggatgctccatgcccctaggattttgcttcctccccggtgctaaattagcaagctcctagagaagccatgtgattcccagagccaggcgctttacacctaaagtagtttgactttcttctgtatacatccagatggatcccaggcatccgggcaccaccctggtgtgtccctagaattcccactgctgggcctctatctccatgacaacaaaataaaaacagaggttgcttgactcattaccaaagaggcaaagcatgtgcgaccctttctgtcttattttaccaaaagatggtgcaaatctatgaccttcacattttttccaccacacccaccagtagctgttggtgattgcatggtgtctcggtgcatggggaaaggcaaggtcttctgagctcatcttaactggtgaggcatctggatgtgtctgatcttactgtgatgttttactgtaccgagcccaatgtgggtccatctcatcagccctttgctgatttcatgatttctcaccctccctcccatatgtagggtgtgattctgttttattatagccacatgttttattaacagaatgagtgatatgaagcttgtacttatgcatttctcgggcctcttccctcattttcatcagtctgtctaagaacttgactcggcactgtttctcgtgtaatatccttctaatgcttagcaacaacaacaaaaaattgctctctcagatccataatccatactcagtgaaagcagggaaaaaatattttcacttattttatttgcttctaaaatgcaaagatgaatactaaagtcagaagcagtgtttcattttgaacacattttggattattaagctgactaagcaatgatctaatacacatttcatattttctttataataatttcttatggagaagaggctatatttcaaaggaattgagacatactcccatctataaacatgtttggttttcttacgatacagggccatttttttaaaactctcaggactgaacagaagagaaaaattattaattagctgctactgtatgttgattcttttcggagaaattgaaataagctctttgcaggcgtccaatcctagaaaccaatggtctccagaactctcacacaagtgtttttctgattctatgataactaattaaccatcatctggtgattaaaagaacataaagtaagattatgattaagtgtccatcacctgcctgtcagccgtggtcagaataagttttacacgaagcaggtgaaagatttagttcttttcaaagtaacttattttcttgtgacccgtttatgatgttgtttgaagtccctgtttcccattgtgtacgcactttctggatgtctggaaggatcgggacttttgtgtgagaggcttgagcgcctcctctatgtgggctggtgtccttcttgaagttgtcaattcctcttattcttaaatatctaaagggaaaggaaaccaactttaatttcagaacttctctttacgtcttgtatgtatttcttttctgttctcaaggaggaaaattggtctaggaagccttctaaattaaactctgggaaatatagtaatgaaaatatcctttagctaactttcctgtaactgtcaaaccaaaatgtcagtatttttagggcattgtgttaaaataagcagtttagattccgacgacactgcactaattggcatgtcagcctccagctcagaaaggcatttgctcatggttacaggcatcttttagattctaagagtgagttacagaattctttttggtactttcacttattctttcagaatacatcaaggatgtgatttatgggcccttaagagtataagatataggtgcacagtatgttacttaagtaacggatgagcccccctaaacatccacgtgtctctgcaggaacctgtgtaagtattgtgaaaacccttttcttccagggaaaaattattggaaattccttaactgagctatacttggtacttgctctagaacatttgggaaatgacaaactcaggctggctctcctctctaacctcactgggctataaatgttccttctaactctgtaatgaaagttcagtgacaaactagatagtgaacctgtgaaagtcattatttacatttgctttaaagggacagttttaccgttcaacttcaagagtttttctacctctttaacagttaatattttttaaaggaagaaatggaatgtaccttcaggggtcaagctgttaactgtatacctgcctctagttagcttggtttatcaaaaggatttttaaatgattcaaggtaatgtttaggatatttgttttaactcctgctgtgctgtgatttaaaaaaaaatagtctaagaaacaaatttatccatgagataaacatcatattttatagttttagaaaaaagggttgggggtggaatttagcctagaacttaaagaaacaacctctgcgaatttctcttgacagcggagttgcttgtcttgacttctaataatataaatccaggcagtttgattatccgatttgcaagaaactttaatggaattctggggcatttgtcctgttttatgtgcaaatgaaagtctaaaaaatatgaggaagatattacatttttcaggagcctccattttttcagtctaagagaatgataagtgagaggcctattgtgatgaagttgcattggacataatgtgggaagtgaataaatagaaccaagaatcttcatctatctctgttggtctttcaggattctcttagcatataggaaaatgatttaccttccagatctcgaaggacttccaatagcatagatcaggtttaatttgatggtctataccatcagaaataactaatatctgttttctttccttttagagtataatcaattatggataggccagaatatttttggcttcaaaacaaaaggattcataagcttaaaaaaacaaaaatcccaaaccttccatctatcccttttattacgttgaacattttagatagtaagattaagatgtatcattagtatatggtgaaattaaaaccgtggtgtctaacagatttaacaaaaagtgtttaatttactgcaagttcatttttagatctgtatggtgcccagtactccacaaaatgcatcataattgaaacaacaaaattattttcatgagcaagaattcaagtatcaaggcctatcagccaattaaaagccgtaagatagtaatgattttttttctttttttttttttttctttttttagatggagtctcactctgtcgcccaggctggtatgcagtggcgcgatctcagctcactgcaacctgtctcctgggttcaagcagttctcctgcctcagcctcctgagtagctgggatgacaggcgtgcaccaccatacccagctaatttttgtatttttagtagagatggggtttcaccatgtttgccaggctggtctcgaactcctgacctcaggtgatctgcttgcctcggcttcgcaacattctgggattacagacgtgagccaccgcgcccaaccagtaacgatttttttaaagggcctttcttaattgacagttttaagctgtagacattaatattataacaaacaaaacatgccagttttactgattccgctttttgcttgattcaggaacttttcattgtttggggaagcttttgaatgcagtactgtggaggaaatcatccttaaaatagcatttcacacatagggccaaaattgaaattgtcaaggaaacccctcagcatctaacgtcatcttgtagaagagctgggcatacctcttcctctaggccaattcagaggccactggccacccaagtagagtggggcccactggcatgagtagtccctgtgcccatgcccatggtggtgcttgactttgctttggggcttaatcctagtatcatttggccattaatttttaattaagtttatacttgaataatcagttttactcctgaaaaattttgaagccagcactgactttgtttatattcacttaccttgtatatgaacttatgacattagagtttgtgaaactgtcttaacgtggctcatacacgtgatgtcagagggactggtcagttctttacagggtgaattaatcggcagctggctagtcagagcaactgatgggtggcttttttttctttttttttttgagacggagtctcgctctgtcacccaggctggagtgtaagggcgcgatctcggctcactgcaacctccgcctcccaggttcaagcaattctcctgcctcagccacctgaatagctaggattacaggcgcccgcccccacacccggctaatattttttgtatttttagtagagacagggtttcaccgtgttgatcaggctggtctcgaactcctgacctcacgatccgcccgcctcggcctcccaaagtgctgggattacaggcgtgagtggtggccctatttttaaaccattcgttacgctgtgtagacagagctttattgccctggaaaagattttttttttaactctcatgcagttcagtctttccatcatttcactttgtgagtcactcacataattgtcaatcattcctctgaccttcttaagaatttacaccttaccgtctctgtgattgaagcagacttctcgctttatttcccttaggctcatttttctgtgggctctcccttaaagacacatggccacagacacctccttcgcatatgtaatctgccttcccctgcggccttccgtggtcacagcaacagggactgctcaccccctccagctggggcttttctaacaagcacagtcagaaatgcgcaggcctggggttggggatgaacagaagttgattagtgggcacagaaatacagttagatagaaggaatagttccagcattcgatattacagtagggagactgcatttaacaataattgattgtatatttgaaaacagctagaagaataagaatattcccaacacaaagaaaagataagcgaggtgaaggaaatcccagttaccctcattcagtccattacacattcgatacaggtatcaaaatatcataggcacctcaaagacatgtacaactcttaatttaacatttttgaaagaaaaaaaaaccggccagagcattaaaacaaataaaataagaaacacagaggccagtgttaggtgaagaactccgctgcttcagaaagagaatagcagcgctcgcttaccgtgggaacacggccagttaacaaaatgggttttggttttttgttttgttttgttttaccattggtaataagatagttaacataagtggtcagaacttcgctgaatttgtaataaagcatttgttaagcgtgtaaaagtccaaattaaaagtcttgaagaaaaacagctatggcaatgagcctagacatttttcaaaaaaaaaagctaagccgtcctaccagcaatctctctttctcctaagaatgtcatgccttctcaagacctgatgaaaggaataagatatttgtgcctttttataaaagcatctattacgaaagtaaaattcagttgcttacagttttggccgctttgtagcactattataaacagcccaaatttatggccttggacttactgcatgacacatggcctggttacctgtcatggaatgctgcagtggtggtttgccaagcttctgtggatgtttgaagactttatttttgcagtcttaaccttgggctggacctaagtgtatgtaaaccatatgatgcctgtattgtttatagatgctgacaaaagaaaactagaccttttgttttttgttgtaagatttttgttttcatgcctatgctcatagtagatagtttgcaaatgaaagttgatttgccatacttttaaataatattgttttagcttgaatattctataatacacttttatagagtataacatgctaaatcactgttttgttgtaagaagggtgtaaacattttgttaataaaatgctatgtttacaaat

SEQ ID NO: 10410 - DNA, 2670 bp, Homo sapiens
aggtagcatgcacaggatggtaaattggattggtggatccaccatatcatgggatttaaatttatcataaccatgtgtaaaaagaaattaatgtatgatgacatctcacaggtcttgcctttaaattacccctccctgcacacacatacacagatacacacacacaaatataatgtaacgatcttttagaaagttaaaaatgtatagtaactgattgagggggaaaagaatgatctttattaatgacaagggaaaccatgagtaatgccacaatggcatattgtaaatgtcattttaaacattggtaggccttggtacatgatgctggattacctctcttaaaatgacacccttcctcgcctgttggtgctggcccttggggagctggagcccagcatgctggggagtgcggtcagctccacacagtagtccccacgtggcccactcccggcccaggctgctttccgtgtcttcagttctgtccaagccatcagctccttgggactgatgaacagagtcagaagcccaaaggaattgcactgtggcagcatcagacgtactcgtcataagtgagaggcgtgtgttgactgattgacccagcgctttggaaataaatggcagtgctttgttcacttaaagggaccaagctaaatttgtattggttcatgtagtgaagtcaaactgttattcagagatgtttaatgcatatttaacttatttaatgtatttcatctcatgttttcttattgtcacaagagtacagttaatgctgcgtgctgctgaactctgttgggtgaactggtattgctgctggagggctgtgggctcctctgtctctggagagtctggtcatgtggaggtggggtttattgggatgctggagaagagctgccaggaagtgttttttctgggtcagtaaataacaactgtcatagggagggaaattctcagtagtgacagtcaactctaggttaccttttttaatgaagagtagtcagtcttctagattgttcttataccacctctcaaccattactcacacttccagcgcccaggtccaagtctgagcctgacctccccttggggacctagcctggagtcaggacaaatggatcgggctgcagagggttagaagcgagggcaccagcagttgtgggtggggagcaagggaagagagaaactcttcagcgaatccttctagtactagttgagagtttgactgtgaattaattttatgccataaaagaccaacccagttctgtttgactatgtagcatcttgaaaagaaaaattataataaagccccaaaattaagaattcttttgtcattttgtcacatttgctctatggggggaattattattttatcatttttattattttgccattggaaggttaactttaaaatgagccctatcactgagaaatacgtgtttcatgatttaactctgtgtgtgtgtgtgtgtgtgtgtgtgtgtgtgtgtgtattttttttttggttgtcttcagctgacagtatgaaaaatgaaactgctgaaaaagctgagcacctggtcacccttggccttccattgctttggccttcagtaaaaagcagcctcccttctaggtcagggaaccatgccattgagactagtaacgggcgttctgggcacagtcccactgtgcacaggtttgagaggacaagttcatcagaaggaaggcagtccttagaagtcacatacgttgagccacgttgctcctaagcctggctctgtcaagctgggtcaggggccttgaaactggagaagtggaagtctatggttggtctgagtaagtaacttcctgtcttcatgaaaaaagttgactttgaatcccaggtactcacagaaatggtgaacagacttagttgttacccaggcacccatggattgtgttgagtgtgcagacagggaggccaccccaataggaattcgtctccaggatttttcccatgtgtcccccagtacttataaaagggagtgaaaagaccgagctgtaaggcatgtgccttctgccacctgactttccgtgaggggactaaaatttactaattgtagttgctgcagccagttaagtcctgtagcttccaggccctcatgtctttgataggagagtgcttaggtggtccccaacagtgcctaggggtacagtacagtcccattacactagagcagggctctatttatttttaaaggatatggccgtgtgttttgataaaactttattcacaaaaacagccgggtcatgggatttggcttgtgagtctgtaacagttcttaaaaagaatatctgagaaactactctgttttagacctttgaaggtgatttagagttttgtgtacatctaggagaaggtgttcagcttctcagaggatgtggacattttggttgcagctaaaaatcagtctctgaagtctctctcccttctagaggttaggacttggtgaacatgtttgtgggccttttgactgagtggcagaaggaaactgctcaggaagagaaacaggtgactgatgggaaggttgattattttctcagtcatcctggcagccaaaaatgtgccaggaaaagaaagaatgtggagcacgcgtggctcctggaggacttggagatgcatgcacatttagggtgttttccctagaattacat

SEQ ID NO: 10411 - DNA, 3233 bp, Homo sapiens
gtggcattgggttttcgtgtgtgccgcgcgtgtggatctcccgggtgtgaggggcttggcctgcgccccgccagctgcccgcagaggtgcagcctcgaggaatctgagggcgtcggggcagcgaacctttgcatccacggactcctccttccctagtcctgctcaagcggtccggggaatgggtttttgtttttccttcattgttgagaatttaaggacctttgatactgctgcacaatagagattgagttctgggatcagttataatatatattttttttagaaagagaaaatgagctgagagtttacaggcactgcagaagctgttcagtattatatgtgtatatgctatttttttagcagccatgtctgagcagaatgttaacataatttttggaaaaattttctttaaaccatctggtttttaagaaatttggtaccaaaaattgatgagtagaggcaaaaatgccccttcatctttctctatatattttccagttgaaaacaaactaagaagtcctttaagaatttataatccgttccccattaacttaatttagcttttccatcactgttaatgatcagagtaacaaagtgtgaaaaataagaaaccatcattgatgttaattaacacatttagatgggccagttaaaacagcttcataagttttaaattaattgtaaatggaatattcctcatttaaaatttttgcactgcattttctactgtaaaccaaaagaggttactaagcaaaaccacctaaatttaagttggtgatttaaatgaatctcacattaaaagaaagcttgacagtgttatgaaagccaccagactcagccagtgtgtccccatgggtatccccagccatccttgctcaatccattacttatatactaactacataatgacctgttcaaaccagactctatttaatgaactgtgaatttacacagaggccattttaaatgggtcaccccatttaggattagtggatctcaaattattaaccaaacatcactccatttcaaagtaaaatattccaccagcgatttgatttattggctcttccattgccactgagcaatgcccaggaagcaggcacattgccaaggactgggggcatcttgactaggaagctcctcgtttgtgtgagcgtgggtcagaccgccaaagtaggacttcatcgtttacctacctattatcaatatggtgcttgaatatattcctataactgtagaacagtgtggaaagtgatggtaactttgaagttgttcatgttttattggctttgttttaattgacactagtagagttttaatggtctttgtgtaaattttaatggcttttccattgtttttgcttctcttaaaaagtttaagaagaatatgacctcattaaatgtgctgttttatttggaccagtcacacaaaatgtctctctagagttgactttaaagttgtttacagaaatttaaactcaattccagagattgaagttgtccaaacagctcatgggcttagtgtccaaacccctgcccagccttccctttccaagttggtgccacctccaggtagccattggtggttttcctattactgatgtggctgtggaatgataaggtcctagaggggccctggcatttcaggaagcggacctggtattccctgacaaacattgcttaggaaagagggccggagaataagaagccagcacctcatcagtcagccctgcaatgtgagacttccgtagctgttgagagtcactgcaggtgttctttcatcccatctgattttaacccatggttgagacgttccaagttagatctgctgctcttaggtgtggggctgtccacattagggaacttgcctcaaaaacagtccacagtggcaataccggacttctgttcaagctttttaaagtgctgagccttacaaacccctgaaggaaagtgaccctttaagagaggatcatctttttttatatttattttcaccaaatagggtgatgagggttggtttttgttccctcaacccatttgggtaaaataacggatctgattagaaactgttttaaggaggggctgggctcggtggctcacgcctgtaatcccagactttgagaggccaaggcggtcacgaggtcaggagttcgagaccagcctagccaacatggtgaaaccccgtctctacaaaaaatacaaaaattagccgggtgggacacgcctgtaatcccagctactcaagaggctgaggcaggagaatagcttgaacccgggaggcagaggttgcagtgagccgagatcacaccactgcactccagcctgggtgacagagcgaggctccgtctcaaaaaaaaaaaaaaaaaattgttttagcgctgggtttcccaaggtgggagagacagacccagcctggagctggcccctggcctgtgtgctgacttcttggggtcctcaaaccactgtatttttctgttgagcctgtacttggggagagatcagtagcatttgaggaagtaagagaaaagaatcatggtacctcagggtttctttccctttactcgctggcagccattgtctgtgggcacctcatgtttttccacactctactgggccgtggaggtaacgatcacccaggccagtctcctctgcctgggatgcgccctctgagaggaggcctagcagggcaggctccctctgggcatccctggatgcagcctctggacacatgcctcctttaaagtgtccgggtgcagctcaggttgagtggaggtagaaggagaaacagacatgtttaccacgcgttttccaaagctcctgatctttcccaagattgtaactgaaaactgctgtctcttgttttgttcgttttgggggtggtggtgctggctgggccatgcttgtgaagtgatgtgtgtctctgatttaacggattcactgttttctctgctaattgagagagcgttatttacattatttatttgttttgacacaagtgctttcagtgttttatcctagctaatggcttcttaaaggtaataaaacccttccaacgtaattggtcagataaaactttttttcttgtatgcttaaataaagcaattagtgaagcacttctatccaaaatgacttttttgtccttttttaaaaccaatttactgttactggaaactttttgtacaataaagcaatcacgcagattaaagaacatcctgcaatcctagtattaatttt

SEQ ID NO: 10412 - DNA, 517 bp, Homo sapiens
gcctcctgcctcggccctgacaaacggggatcttttacctcactttgcactgattaattttaagcaattgaaagattgcccttcatatgggttttggtttgtctttctggtcgtcagcgtggtggtggaaacagctgaagttttaggagacagcttagggtttggtgcgggccacggggaggggaccgggaagcgctggggcttgtttctgtttgttacttacaggactgagacatcttctgtaaactgctacccctggggccttctgcaccccggggtgaggcctcctgcctgcctggtgccctgtcccagccccaggtcctgtgcagggcacctgcgtggctgacagccaggctcttactccagccggggctgccagcgcatccagccagcccagccctgtgaaagatggagctgacttgctgcaggggacctgatttatagggcaagagaagtcacactccggcctctcagaattcacttgaggttcaattaaatacagtcacaccgccccctc

SEQ ID NO: 10413 - DNA, 512 bp, Homo sapiens
aggatcagcactgccagtggagatgggcgtcactactgctaccctcatttcacctgcgctgtggacactgagaacatccgccgtgtgttcaacgactgccgtgacatcattcagcgcatgcaccttcgtcagtacgagctgctctaagaagggaacccccaaatttaattaaagccttaagcacaattaattaaaagtgaaacgtaattgtacaagcagttaatcacccaccatagggcatgattaacaaagcaacctttcccttcccccgagtgattttgcgaaacccccttttcccttcagcttgcttagatgttccaaatttagaaagcttaaggcggcctacagaaaaaggaaaaaaggccacaaaagttccctctcactttcagtaaaaataaataaaacagcagcagcaaacaaataaaatgaaataaaagaaacaaatgaaataaatattgtgttgtgcagcattaaaaaaaatcaaaataaaaattaaatgtgagcaaagaatg

SEQ ID NO: 10414 - DNA, 455 bp, Homo sapiens
tttagagcatcctccagagctgaagcagaacattccagaacccgttgtggaaaaaccctttcaagaagctgttttaagaggctcgggcagcgtcttgaaaatgggcaccgctgggaggaggtggatgacttctttacaaaggaaaatggtagcagcttcagtgagaaactgcccttacaaacagtcccttctctgctgtcaatccaatactgctcccaaatcctgttttcagtgttcatttccctcaaggcaggcgctgggctcccacgacccctcaggacagatctggccgtcagccgcgggccgctgggaactccactcggggaactcctttccaagctgacctcagttttctcacaagaacccagttagctgatgttttattgtaattgtcttaatttgctaagaacaagtaataagtaaatttttaaaaagcctttctgctgggttggatt

SEQ ID NO: 10415 - DNA, 1869 bp, Homo sapiens
ctgtgagagaagctgtgccgcggagtcgcttacagaacagtttctcattagatgagtgtttctcctgcagcactccaaaacccactctgcactgcagcacagtgaatgatatgcactcaccattagcttcgacacagggactgagggagacaggtggggagcagctgacaggcattagggtctttgctgacatctactaaccttgaagagtttgatgttcagtgcatacttattaacttaaaaaaatagcaaatttattgtaaagtgctccctttgtttcaaagtgtttgccaggcatccagactacacgtgtggatttgcagggagccactggagttggtgttacatttttatactttagcagcactgataggcaccctggaatcctcacttggtatccgagggctactaagactctttccttaggttctttcctctgagcaaacactgactggcatcctgctttccagtgcctgccagcctccagaagagccaggtgcctgactagtacatggggagctacagagccaaggtcaatgtgagtcaacatccactagaaatatccatgttgtgtagacctgtgcatacaacatgctaactggaaaagaggaaaaaagaaaagccacagtcctctccacaaaaatacctggtccaaacaagaaaaacaaaaagacaagcaaaactaaagaactgcagtcttctgatctttatttctgaagagctagcctttaacatatatgtttatatagtttaaatttcttactactgttagatcccaggaattcattaataatcatccttggctttccttttaaaggctattttgaaatggtcttttcactttcattcagtcatcaccccccaaaatgctctgcagcctctctgctctttgagaaagggcacaccatgcgctcggcaaccattcaaatgcaggaattaagcagcaatggctgcagtgtccttctcagttatggaggacatcgtctcattagggaacttttacagttcaaattaatttgcagaagttgccataaatgtttgcataatgacatagctttaagcactacatgattttaatctgctcacattataacaggaccaaatacacaagagcgtaatcaaatcatctgtaacttcttaattacagtttacctatttctgacatgcagcactgccatctcttccagcaccatcagggttttaatggccctctagaattaccactgagatacactatttgatccatggataaccggtaatgggaaaatgctccgaccctcaatgcagtaaatatttacttgcaggcaactgggttctcatctcttgatttgcttttgtaatcagcaataataaaatagcaggtagatggatgacagttgctcattctgagaaacttcactcttttcacttatgcatcacgaggaaataactaaaatacataccaagagaaaaataccttgccatcggatcatcaacaagtcttctatttacaaacttcaaaaaacacaaaacaacattcatgttttaaatgctttctacttgtggttcaagaagcactagatttagtaagaaactctacctatatacttagtttgaagttagtaacttcctgagatgctaaagacttacagcctgcgattatacaaggatttacacatgcttcctctggtgctttacttcccaaacctaaaaaagcaatgaaatagatgtaaggaaggagggatttaaaccttttaaaaaacttttgctgacttatattactgtaaagatttgtttgctcaatagtaatcattaaactacaaagtaattcaattttaaatggcaaaattgctttatttcagactaaataaattccttttcttgaagcct

SEQ ID NO: 10416 - DNA, 1624 bp, Homo sapiens
acctccaccatccaaagctcatgcccggcagtggactcgccctcgctccatctacctgcccccgctgcctctttcaggaaggagccccttaggaggacaggcctgcagcatcctggtctcgggaggcttctgtcattgctcacacacagttcagatttccacctctttatagacaagaagtgaatttgcctggggcagaacacccacccaaagagtccccacttaacaataccccccccccacggcaagaatgcccaaatccgaatgaccccagttttcctaatgagtaaaatgatcccagatgtgccccagagcatgacgcctgcagctccggtttcatgcaggaaattggttttggagagttttggcaagttggaaagccacttactggcttttgacatgacttctcttggagaataagtggactccaagctaactctttgcaaatgtaaacacatgtccatcttgtaataaatgcaaaatgcccgtgcagcagaagcatgcgactttcatatccttgcctagaataggctgcatggtgtatgtcagtgagggccacgaggcgtcggctttagacacagatcatagctctacaggagtttatgaatttgaagcttatgggattttggcagagaaattttcagctgtgcttgatacccaccaaaagaatgtatctcgaaagaatgaaggaagaagaaaaaaggatccttgatgtttgtgacaagaaaatgagaaagttagtatctgcaatacagagcttgttcctgttcagtgactgaccctctgtattctgtatagacaccaggccgatacacagtggagttcccaggccttgtttgcaggaagccgactgtaaagacagccccagctcaaggctattaggttgaatatttgctttcatgagtaaatgtggatctttggggaatggcttcaaaataagtcacgaacacaaattctttgtaaattatgtaaattcctgtttatataaattggcaacaacttataccgtctgacagttcaaaatctctttcagctgcgctcttcccaccgagccgagcttactgtgagtgtggagatgttatcccaccatgtaaagtcgcctgcgcaggggagggctgcccatctccccaacccagtcacagagagataggaaacggcatttgagtgggtgtccagggccccgtagagagacatttaagatggtgtatgacagagcattggccttgaccaaatgttaaatcctctgtgtgtatttcataagttattacaggtataaaagtgatgacctatcatgaggaaatgaaagtggctgatttgctggtaggattttgtacagtttagagaagcgattatttattgtgaaactgttctccactccaactcctttatgtggatctgttcaaagtagtcactgtatatacgtatagagaggtagataggtaggtagattttaaattgcattctgaatacaaactcatactccttagagcttgaattacatttttaaaatgcatatgtgctgtttggcaccgtggcaagatggtatcagagagaaacccatcaattgctcaaatactcagaaagtactgtcaaaagcctaataaaaaacctaaagtttgctctg

SEQ ID NO: 10417 - DNA, 579 bp, Homo sapiens
agattttcttctgagaagaatttgtgtttaattttttgataccaacactgaacattcatcagggaactttcctgaagttcagctcaagactaccctacctgctgtgtttgtgagaagagtaggatcacacacacaggtgcaatcttgaccacacttacctgcaagaggagtaaccagaggacacacttccttccttctttggtgtctgaggagtgtgaactgttggggtcagttaagacccaacataactctatcagaagaaaactgttgtttgcctttcaaccttgttttacagttctgcagtgtaatggaggacgggcaacgtgcatgtgcaggctcaccactcccaggcctctgacatgagggacatgtgacagtgtcattcagtattatgttcaaaagacatttttatcctgatcataattaatttgaaaactctttaagttcatgttatacaagatgatttactgtattatacttttccttttttatataatgtctaacaaaaaatacagctgcaacattttgattcctgttaattttgttctttaattaaatgactacttattgcaggaaatt

SEQ ID NO: 10418 - DNA, 2409 bp, Homo sapiens
atatctaaaatgctgaattgccaagacctgcaggtacctcaatgttagagcgcttccaaaagtcaaaatactgtgaattttaaggaattttacaaatactgacatttaagtagttgactggcatttttgtccacctttatttctaccctgagtggggttattttcaaagggaagtgtctttcaataagcctttctttgtattgtcagtcttaggcaaatgagagccctttagataaaaattatgtaaaatatgtgccatataaaggaataaaatggcacctctccagggaaagtgtcagtgaaacctcagctacagtagccggtctgtgtagagcagctagtggtgttacctccccattttcacatgcacgtaagtatatgaaatagtgcagactgtttcaaatggtgtggaatcctaaatgtttaaaataaggtccttcttgcccactccctcgcttacttttttataaactcctcaagcaaaatttctgttcattttacccttaggagaagctttagttcttcctcaagtcagggagtagtgagtttgtattttgagtagtcatttctcactaagctggttgctttctagagagacagtggaatctagtactttaatacattttctctgacatggttttttttttcttttttgaggggcattttaaacttagaggtggtggtaaaacctacttttgagttctccgaactgaggttaaaataacttgcagaattttccaaagtcaatgggcttagcatgattactgctgtttggtggggctgagaatgaaatatttgacattctggaattgctggcatgtaaagcttctccagagaggcaccccagggaaatcactctttacaatttgtaaaggaagggcctgtaaaaggatcaaaacacatggacctacattcagtgtaatagttacaaagttactgatttgggttccacaccctgtggtccttagtcaaaaataatgatctgtttcagtttgcaagagcaggattttattattttgcttggggtgaggggcgggagagtggaatatgagtaaggttgctgaatgaattctaaactcgcttatctggtcttcaggcttcccaactctctccaagccttcttatttcactgcagttaaataacatcttcttgttcctatagttgtgctgtgagttttctgttcatatttgcgcagtgtattttaatacggcccatgtcattatagttgattttatccctttaaacaattactgtatttgtttttgacgtagaggtttcaattttttcaccttgggggcaaatgaaaaacttggcatttttcatttgggaacatataatagcttgtaaacttttcagacagcagtaaatgtctgaaaaaatatcaaaaacagcataaagacaagattatgtagctctaattatacgtatataattataaaaaacaatgtgcaagggttatattttaaggtcttttaaaatctgattttgatcataccaaatgacataatattttttatggtagccttttactttcaagacttaattttcagacttgtacaagttccttcttacattctttccctctcacaccatcctactggagaaagcatacttttatgctaagatcttactttaagctttttatgtgaacaaaagatgtacatatagtaagtattacttccgtagtcctcaaatttactataacttttgtacttagtatatgttttatatttggaaaacagcactacgcttagttttcctgtagttcctgagtgatgtctgtgtgttccttgcctgcccttttttgtgagcacagattagtctgttatccatggctggcacttcacttatgatcctttctctgctagatttttatgcagctctctatgaagtttcatggcccatagatattcaaaagcaagatattctatacatatgtgtatatgtatatatactccttatgttaatactaaagtgtttatgctgagttgctgcctttccccgtcatgtatccatgtgcatgctcttagagaccttgaatggttgagggtaaagtgatttattagtaattctacttgccttgtgtatgtctgagctgaaaacaatcgtgattaagaaatttagaggtggctgggcgtggtggctcacgcctgtaatcccagcactttgggaggccgaggcaggcggatcacctgaggtcgggagttcaagaccagcctgaccaacatggagaaaccctgtctccactaaaaatacaaaattagccgggtgtggtggtgcatgcctgtaatcccagctactcggaagtttgagacgagaatctcttgaacccgggaggcggaggttgtggtgagccaagatcgtgccattgcactccagcctgggcaacaagagggaaactccgtttc

SEQ ID NO: 10419 - DNA, 382 bp, Homo sapiens
aaaaaaaagtctattttggagaattgaaataattcatggaagggaatcactattcagggatttttcccctttgctcttcttttccctccttaaaagaaaaattaccttctagtcctaggatgaggacacactattagtttgaattaaatgctttgatattctcagatcagccatcttgaaccaaagcaaaaccacaagttacactttcttaaaatttgatttgtcatattttctagagaaacttgaatttaattgtgttattcttagcttccactggcagcctagctttgagggtaaatgaaaatataacccatagattacccagccacttgggaacagcaggtaatactgaagaaaaataaaaatagattttgaaaacgtt

SEQ ID NO: 10420 - DNA, 2045 bp, Homo sapiens
tccataacacaggttggcatttcttctagagagtgtgctgtgaaaaacactggtctcacagcaccgtgcattcatccagcaggtatttaccaagcagggactttgggccaggtccgtgctaggctctgcaggtggaccagccagccctgacctccatggtgtctcttctcatgggagaggctgcacagcagtcattgagaaaacgaagaaacacacaggtactttcagatgctgataatgactaccatgtgctaaaagagctccaggtgttgtctgttttgagacaatcttctcgacaatgagatagaatgaaccatgcaaactttgggggctacgatggttttaggaaagagctagagtgaaaaatcctttgacatatatacatacaaataaagatacatgtgtataattttatgtaattgacatcacattatatgctggcacctgccttttttgcttaatgaaaatgtcaaaggtaatattaccaatcaatcaatatatttcaccatcgtgtttaatttctgcagagcacttattcaagcacatactgcatttttcttagtcactcactggtgggaatagaaagttttctcaggcatgcatttttcccacttctgaaatgatctccttagaataaattccccaaattgtattgctgggttcaaaggcatgaacattttacatttttatacaataatgtcaaactaccttccggaaatgatgctcactttactttccctccaagactgtgtgaaaatgcccattttcctaaatgcttactatgactggtttccaactacattttaattcttgttcaatctgataggcaaaaaatgatatttaatttttatttgattgataatgaccttgaacgtgcccattagccttttgcatgtattcttttatgaaacatctgttcctatccttcgtcaatgttcctcttcatatgttaacttttcttattgatttgttagagcactttgtatattgtgaatattagcttttgtgatcagaattatggaattgttgttgtctttagttttgcttatcaagtttaaagccattcagagatgttgtaaatgtgtatgttgttaaatttatgtcttattttgtgttttctgatgctcatatgtttagaatggtcaagcaatcccaacttatgattacttaaatattctcccatatttgctcttagcattttttttcttttcatgtaaccctttgttctttcaggaatttactttgcggtaagaaatgggctggcttccagttttatgtttcccaaatggtgattcagctgttccatttccatattctcccttattagaaatgaccactatattatgttctaaaatatctgcgtacttgtgtcccttcctataatctcagttcatctctttgagctatcttttgattcctttttcaaaccacactgctttactgaactgtcatcatcttatacatttttaatactcagcaagacaagtttctcaatgccactctttttcagagtttttctggtggttgtaagatgtttattcttctggataaactttagaatcactctttttgtccaaggtaaaatatatcccacattgagatcatactgaatatacagactaattcaggaaaaaatgtatgtctttattgcattgagtcttcttatccaataaaaaagatatgaatttccatgtattgaaatcttcactgagacttatttttggcttttcacatgtcctgcaaatgtattgttaaatttatttttaggtattttaggggaaatgattttctaaagtttgtattttctagcttgttataatttacatatgagatagtcattgttgtatattatttataactgatcatattactgtatttgtattgttttaatagtttttctattattttgggttttcctggaatacaaccttattatctacaaattatgattgttttgccttttccaatgttcataactgtttttatattcttgtctgattgctttgttcagcacttctagaataaagtcatgcaatactaatgat

SEQ ID NO: 10421 - DNA, 298 bp, Homo sapiens
ctgacctcgcatcttcggaccgaagtgagagccgtgctcggacgccggaggagcaggactgagcagaggcggccggtcttcccgactccctgcggctgtgtccttagtgctgttaggaggccccccaatccccacgttgagctgtctagcatgagcacccacccccacagcgccctgcacccggccgctgcccagcaccgcgctggctggcactgaaggacagcaagaggcactctgtcttcacttgaatttcctagaacagaagcactgtttttaaaaaaaaaaaaaaaaaaagaag

SEQ ID NO: 10422 - DNA, 1216 bp, Homo sapiens
gctcctactgaagtggcgcataactgacgctgtgtgtgtcaggacgcgaggaaaacgctgcacttacagggagaggtggtcactttgtttacggagtttggaagagacccatactgctacttgtgttttggacttaactgaacttggacatggtctgagttagaaccacttgttttggggaagtattcatgggtaacctctttgaggtctctttatctgtgtttcctttttagttgcgcatagcctaattctaaggttttggtattttgcaaaaaggtttctatagtgaaagctgaatccttactttgtgacttttttttttttttttaatgacaagctttgacttttaaaagtggaaccaaatctgttggcagaggtggcagccaagtacatctctgtaacccagctggcccctggtgctgttggcctggcaccccactgccaagggtggggtctcaggagtcaggcagggccagcacagggtggcgtggggggcaggggtgggtgggtggagggcacggaaggggttttcccatggatcatgttgtataagtgaaccagaccaccctgatggcatccacagtgatgtcaaggttggggctggccaggggtgggtggactagaagcatttgggagtagtggccaggggccctggacgctagccacggagctgctgcacagagcctggtgtccacaagcttccaggttggggttggagcctgggatgagccccggcagcgccttggcccttctgtggtccctgccagcctctgacctgggccggtcagtcattgctggactctggccacacactggcgttctcatccacttggaaacaagccagtcttttctgcaaggtcagttgaccaagagcatatttcccctctgttgtacatcgttgttttgtgtttgtgttgtaacagtgggtggagggagggtggggtctacatttgttgcatgagtcgatgggtcagaactttagtatacgcatgcgtcctctgagtgacagggcattttgtcgaaaataagcaccttggtaactaaacccctctaatagctataaaggctttagttctgtattgattaagttactgtaaaagcttgggtttatttttgtaggacttaatggctaagaattagaacatagcaagggggctcctctgttggagtaatgtaaattgtaattataaataaacatgcaaacctttaaaatttt

SEQ ID NO: 10423 - DNA, 3302 bp, Homo sapiens
gggacacacattctggctggagcccttgtggtagcgtgttcatccaggggccggatgggctggcggcagctctggtgaattgtgacatgttggttacctgttcgcccagtgccacgtctgcatgtgaagcgtgctcatttcatgctgggtatgacgccgagcgcacaccactggcgtgagacagcgcttggtggtgtgatacttttggtgctgtgtatagtattgtatgtcggtacacggagaggtatcctttttttgtcccccgcccccttctcaatgtttctagctagctttgggggtcattttgtcatcagagcattctgtgcccagggacaggacagatctcgaggacaccacagtccacctgttcccgtcaacagacgttaggtctcattttcctcctcatgcagtgttgtagtgtgggttgtcaacttttctttaactggctacgccacagctggacacacatgcagcccctggagggcagcctcttcctgtgcctcgatggggtgggtgggagggcatcttctgtgcgttgggtcagtttctgttacgtaacgaaaaggataaacatctcccacgggagaggccacagatggccacttccagagcttgcccattgcctgtctctcgccaattccgtttatccaaaaaggtacatgtttttgtattaaaaagtaaacagggatcagtgactgtattccaaataaatatgaatccctaagggccgtggacaaattgcctaacccagggccagcggtattgctgaaggaaaggggcagctctctgggaagtgggccctcagagattactctggctttgacccttgtttagctgatggtcatttctgggattggaatatttaataagcccaattctaagttgataggtaattttaaatattcaaaccaaatcttcccaacagttggcaagttgtttattttatattatttcttccaggacctacttgctcagatctccaagcaagcatttcttttcttttagggatgtctgaaagtcacatccagttacattactgtgttctttctaatgaaaagtaaaggttttatatagagaaacttgagtaatttttacatttctaagacattaaatcccatttaaattctgtgtgaacattaaagacagcacacttgcaaaagtatggtcaaaggaaaaaaatcccacatttcaattaacaagtagcatggacatttgatcaacctttagttggaataataatattcatatttgctatgaatccttttaaaaaaatctttggataaatgctgacagatttccaagaactaccaagaaaatacaagagatatccaatgcttgatatatgaggcctagtaataacgatatttctctttaattgatgttttgttttaaaagttaaaagtaattcttggcgtggtggttcacgcctgtaatcccagcactttgggaggccgaagcgggcggatcacctgaggtcgggagttcgagaccagcctgaccaacatggagaaaccccgtccctactaaaaatacaaaattagccaggtatggtggtgcatacctgtaatcccagctactcgggaacctgaggcaggagaatggcttgaacccaggagacagaggttgtggtggggcaagatcgcaccattgcacccgagcctaggcaacaagagtgaaattccgtctcaaaaaaataaataaataaataaataaataagttaaaattaattctttatccagagtcgggtgctttagaatttataagtcacttatgtgttttgcttgaattaattctgacagcccctatgaggaaatctggaggcaggtaacagttcccattttagagatgaagaactgaggcacagattaaaggacttgcctgtgttgaataccagtcctgttctaggacattctcccctctcctaggagacggatgtcacgcacaaatggggagagaagtgtttattttgtaggcactaagggtttctaaaacccttaacactggtaagggctcaaaaataaacgtatgtgttcatattcgatcaccgaaatgagagttcttaattgctaattgacaaacgcgttagcaatttcagttagggagtcatctcccttgattgtgttcttttcctgtcaattttcatagacctaatttgcaaactcaatcggggactaaaatttcccactgaaaatgttaaacattttagataactgtgaagatagtttatttttattccttgccaatctgggaatatgccttttttgtgtgtttgtgtgtttttttaagtgctgtattaataatactttctgaaagaaaaggacacttaccccaaaacttcaatctgaaatgtcttacattaagaatatcttgaatgttgtgtatatattttaaaaagcactttgcaaaatagtttgtacatttatttcctaatttatacatgatttttggtgttaatatatttaatgattaataacagaatgtttatttaatgtgctgtccatttttatgtaatattatggggaaagtgatgccagcagttccttttcattattctatcttctgtcatatgaatgttgagcaaagcttaggccaacatgaattgtttgtgaagtgtggttgatggtgctttgtttttttctgactacttctatggaaggccagtgaagaagcaaaggaagacatgaaaattgacgctcattcttcttcctattgttccctgacatccagcaaattgtgaatttgaaaaatgatggccagttttcagaagtgctgacaaattcatattggtatgcaaaagctcatcacccattaaggtttgttgttgaatcaacagtactcagcatattaaaacagtacatcagaactcatgccaacagtctttatgatgggattaaggtggacaagatctcctaagatctgtgaatgggattaaggtggacaagatctcctaagatctgaaaagaaaccttaatacgctcatatggttggagtgttaagtgaacctctgattttgtcagggtttttctacgtgtaggcgtgaatagggggcaccccttcaaaactgtacaaagaagacgactgttttccatttccatttaaacatttttagccacttcatttctatttattgaacaggtcaaatttgtcttgttatttgtgagtacagtacatttaaaaaacatccttatcggttatttttttttcagtcggagtttgacgtataaattgtttatgcttttggtgtaatctcttaataaactggttcttcaaaaatcatcctataaagtgagttttcatgaag

SEQ ID NO: 10424 - DNA, 1677 bp, Homo sapiens
ccacgccagagcggggtcgcctctgggcctctgtctgagcaaacctgggtgtgaattcggtggttttgaatgcataaagtgccttgtggacacgggggagttgtggtgcttctgggtctctgggccccgcctgctggcctgagatgccctcatgttgggaagcattccgtgccccctaccccgcctgccctccgtatttcctgcacctgtcagcctgcaccgactgatgagccagttgctcatttgtgctgattaacacccctaataaggggttggggtgcccataacggggtggccctgccgctgactcaggtctccgccatgcacgcgtggactctcggatgagctcagcagaaccgcacagccagagccccaggtcagaagtgcagaccagggttctcagcacagtgcccgtcgtgcttccatggcttgctacggagagagacctctggatccacactggggctgcgtctggcccgttgtccagcagccctgcggtaccgcaagcccaggcaccagtgtctcggggggcctcactgctgcgcaaggggtggggccgaggatgcaagtccaggcagagcggcgcaggcagctgtgagcttttctccatcagccgtctgagaagagcagtgaggccagctgcttcctgtccttcagaacacttctctgtgctcagtgggagccaggaagcctcaggcttcacgactgaatgcacccaatatccgacctggctgcgtgtttctggctgggctgccgtgtgcacagcaagttaactagaggggctgtgggccatggaactgtcagcgttattctcagaaggcggccgtggcatgggcagggtatagtgaggagtggaaggagacgtgtgcctggtaatatggggcggaatttccactcagctccatttgctggggatttaaagagaacccttgtgctacgccaggcagttaccgagccgaagggagatgatgggccttcgcccctcagtgggatggcagctgagggggccctgcatttgaccgtcgagactgcagcagcgcctttcctgtctgtggtttaagtctttgcagtcaagtactgatgcatccaagccaggcccatgcctggtgtctccctgactgcagaggagccccagggcaaggacagctcagctgctggcagcctgcctggcccatagacatcccccaagtagtctcaggcctctgacatgtccctgaggggcccctaagaaagaaagtggaggggacactccagaggctgtcgtgggaggatcatgtgagcctgggaggtcaaggctgcagtgagccgtgattgcaccactgcactccagcctgagtgacagagcgagaccctgtctcaaaaaacaaacaaacaaacaaacaaaaacagaacattctgggcacggtggctcatgcctgtagtcccagcactttgggaggccgaggctggtggatcacaaggtcaggagattgagaccatcctggctaacacagtgaaaccccgtctctactaaaaatacaaaaaaattagccaggcgtggtggcggtcacctgtagtcccagctactcgggaggctgaagcaggagaatggcgtgaacctgggaggcggagcttgcagtgagccgagatcacaccactgcactccagcctgagcgacagagcaagactccatctcaa

SEQ ID NO: 10425 - DNA, 2326 bp, Homo sapiens
gggcctggaggggcctggggcccgggaccggaggctgacgaggctggacttcctcgagtggccactgtgagcctcgtcacagcagaaaccaacttttctaacgactgagttcgcggagatagcatcatccctgatcaaggatgtaattctaattaactgttgattgccaaacatttcactctgctgtgccgtctcttcataaagcttcacttgggatcatcgtcttcattaaggtttcaacagggaaattcttcacggcgcccttttatgtggcagaaatcagctggggcttgtttagcttccagcacactctcagtcatagcatgtgtagctaaaggaagtaatgggaaggggttcatgttctctttataatgcagtggcaaaaggttctgaaagccttttaaactcgaaccagtgggggaaagatggatcttgaagctaatcctgcagagagttttatagaggccagggattgccttctaaattatgataaaacagaagtgaagagtttcagagcatcagattgagtgaaaagttgtcagattctgtattttttaacaatcttcaataatgtaaagattacttttaaaatatttaagttaaaactacttgaatagtattttgctgaagagcaagatatgcattaatcaccggttttatactgtccaaaatgaagcatccccgtgacaaaccagagtgggcagaagcatcgagagcgtgacaggaaatcccaagactgcttccgcctcagaggcgtcccggctgcgattcgctgccctgttgtcagtgaggcctggctgtcaccgcacaccgcgtccgtgtctccagggggttcctttcttctcacacgtcgcgtgtacccatagcactcttgtgtttctgtttttcccagtatgcatgtttaaaatagaagtgacaagaatcacatccggttgtgtcctgtgggagggtcagaggcagaatctacttacagtggtgtaattaaagttatttaaccaaaaataggtatgtgtccatctcagcattcacctttatcaagtgactgatttttttttcttttctttccttttttttttttttttgagacggagtttcactcttgttgcccaggctggagtgcaatggcatgatctcggctcaccgcaacctccgcctcccgggttcaagcgattctcctgcctcagcctcccaagtagctgggattacaggcacgcgccaccacacctggctgattttgtatttttagtagacacgggttttcaccatgttggtcaggctggtctcaaactcccgacctcaagtagtctgcctgcctcaacctcccaaagtgctgggattacaggcgtgagccactgcgcctggccgtgactgattttttttcatgtagaattgtcaacacgagagatcacagtggagcactttgaaagaccgtcggttgtgtgcacgcacgcacacactcatgcacacgctgacacgcggttgcatggagtccaggttactcaggccggcacttctgagtgacaggtgccacctgcgtgtgtcttggcgtccacatcacacctgtgacggaagcacttctggaagtgaacactcgttttgaaagcttgattttgtagctttggaagctggaagcgatggtgtttggtgccgagtcctgtgtcatcctcggggcctatgagctccgtaccagccactcaaaagtgtctgaacagaaccgctccgtgactggtagctgggtctgaggattcaggattgtggcgttattcaaagaggagactttgaaattccccgatggctggaatgtggagcccaggtgcctctggtggagggtcatctgcttttccagactgtggttgtgaaccggctccttctccaagaaaggttgcaagctgagaacatccagaggtgagactcagacacattgaaagtgactgcatttagggaggtttaacgagttcttactgatcattccacttgttactggttaagataatttgcccacgggtttgtttccaagtcctcttctaggaccaggctcctggtatttcaggggctggttggctgcacagacagcccctcttctgctgtccttgaggacagacaccaaaccagaggtggaggaagaacggtaggaaggctgatggcaaaagcggctgtgtgtcgaggttattttaactttttactactttttgttactgtttctgcaaatgctaacacataaaccatgacctaacttttgtcaccttggatatctattgaatgttaaacatctctaataaagatggccaccacttaatgtgtggaaagtgatggccttctcgtgggc

SEQ ID NO: 10426 - DNA, 99 bp, Homo sapiens
gccacgcgccgtcctccgaggaactgggcgcttgcagtgcgttgcacaccctcacctcccacccactgattattaataaagtcttttcttttacctgcc

SEQ ID NO: 10427 - DNA, 53 bp, Homo sapiens
ctggagagaatcacagatgtggaatatttgtcataaataaataatgaaaacct

SEQ ID NO: 10428 - DNA, 80 bp, Homo sapiens
agggactccacctggcacctatgccaccaatggcccctgaacgggtatctaggcccacccttaataaagatgagctgctc

SEQ ID NO: 10429 - DNA, 402 bp, Homo sapiens
ccaccgcccgcgcccacccggccacggcgggcactcagcatttcctgatgacagaacagtgccgttgggtgatgcaatcacacgggaacttctatttgacctgcaaccttctacttaacctgtggtttaaagtcggctgtgacctcctgtccccagagctgtacggccctgcagtgggtgggaggaacttgcataaatatatatttatggacacacagtttgcatcagaacgtgtttatagaatgtgttttatacccgatcgtgtgtggtgtgcgtgaggacaaactccgcaggggctgtgaatcccactgggagggcggtgggcctgcagcctgaggaaggcttgtgtgtcctcagttaaaactgtgcatatcgaaatatattttgttatttaagcctgcg

SEQ ID NO: 10430 - DNA, 2503 bp, Homo sapiens
gctgtgcgccccggaacgtgtccaggaggagcctggccatgggtccttgcccccgacagacagagcagcccccacccgggagccttgatgggggtcaggcagaggccagcctgcactggagtctgaggcctgggacccccccctcccaccccctaacccatgtttctcattagtgtctcccgggcctgtccccaactcctccccacccctcccccatctcctctttgaaagccagaacaagagagcgctcctctcccagataggaaaagggcctctaacaaggagaaattagtgtgcggcaaaaggcagttttctttgttctcagactaatggatggttccagagaaggaaatgaaaggtgctgggtggggccgggcctccggcggcccggctgctgttcccatgtccacatctctgaggcctgcaccccctctgtctagctcggggagtccagccccagtcccgcaggctccgtggctttgggcctcacgtgcagaccctgccatgcagacccatgcccccctcccccaggcagctccaagaaagctccctgactcgccccttcaggcctggcaagctgggggcccatcgccgtggggagtccctcccaccaccctcgccgcaggcagctgcagcccccagaggggaccacaagcccaaaaaggacaaaaatgggctggcctggaatggcccagaccccagcctcccctcctccctcccatcctcacccaggccaaggcccaggggctctgccaggacaccacatgggagggggctcaggcctcagcctcaagatcttcagctgtggcctctcgggctcggcagaagggacgccggatcaggggcctggtctccagcacctgcccgagtggccgtggccaggatggggtgcgcattccgtgtgctttgcttgtggctgtgcaggctgaggtctggagccaggcccagagctggcttcagggtggggccttgagaaggggaatgtgggacaggggcgatggtgcctggtctctgagtaagatgccaggtcccaggaactcaggcttcaggtgagaaggagcggtgtgtccaggcaccgctggccggcagccctgggctgaggcacagactcatttgtcaccttctggcggcggcagccctggccccggcctccaagcagttgaaaaagctggcgcctccttggtctctaggatccaggctccacagagcacatgactagccaggcccctggcttaagaaggtcgcctaagcctaagagaagacagtcccaggagaagctggccgggaccagccaggagctgggagccacaggaagcaaaagtcagccttttcttcaagggatttccctgtctcagagcagcctttgccccagggaaatgggctctgggctggctgcctgcaccggccatgtcgacccaggacccggacacctggtcttgggctgtgttcagccactttgccttctctggactcagtttccccgtctgagaaatgagagtcgaatgctacagtatctgcagtcgcttggatctggctgttgagttgacgggttccttgaaccccacaaaatccctctccaaccacaggacccttcggctcaccaagaacagggcccaggggagtcaggcctattcgctgcacttcctgccaaactttgcccccacaagcctggtcatcagccaggcagccctcccagtgcccaagggccaccaaccccagggaaacagggccagcacagaggggccttcctcccccacagagcccccatgacatagtctgctctgggcggaagagctttgctgccagccagggatgtccagaggtcagtgcagcccctacccctgctcaggagtgggctcagagtctagcaaatgctaaggcccctcaggctgggctctgaacgaggacctggactcagagccagacagggcagcctcagacccttctctggggctcctggaccttgggccataatttctgagcctcggtttccccatctaaggaacagatgtggtcgttccgccctctcagctggatgagactgtcctggaggatccaccccggaacagacagaatggtgtctctcaggatggtgctctgagagagggcagagtggatgccccactgccctagaccctcggtagacgtggggtctctggggcggggtctgtggctgtgactgaagtcggcttttcccgttgatgtcttgatgctcctatctgtgcacttaccgtaggtagggacacgtgtccacgcaccacagacacacccacgacacctgatctcgtatcactagcttgcggccaggtcatgatgtggccccggaagctggccctgcgtgccatgagtgcgtcggtcatggagtccggagcccctgagccggcccctggtgacggcacagccctcacagctcaaacgcccacccccactcccaccatctgcaggtggtgaaaacaaaccccgtgtatctctcaataaaggtggccgaagggcctcgatgtgg

SEQ ID NO: 10431 - DNA, 945 bp, Homo sapiens
accctcagccctggtggcggcagagaagcgggcgaggcactgtggtcgctgagggggttggctgggtctgagtgccaccccccaggccacagtgataccatcccagtgccatgagcccacactgcccgccctcaggctctcaggtgaacgtggccgtcagcggggaaacgtgtgtgtcagttggaccatgtgggaccctgatggacctgaaagaccaggatcggtccagctcagatattgagggctctgaagcctagttctgtcttctctggagcagctgtggcttccccgtggctgcttggtgacatggattagcgctacgtgggctgcagcatttgggatccaggctacctagaggggcatcgggccagggaaaacctcggattagcaagcaataaaaacatgacctcactcttcctcaaaggagcccctggtcttccctgtgtgactcagttctttccatctgtttgtcccgctgcaagcctctttctgcgctgactgtgacattggaacgtggccttcctgtcaccccctccgtgccacgcactgaaggccacccccacccacctgggaaactaagaactggatattttgcctcattcacttgtactgtaacaatgtatataatttggttggtatttcactatttaatttttaagaagcctattttactagtgttttatatgaacaaagtactgcagaagttaaacctgtgttgtattttttctgagatgttttgctttaagagatactttttgctcagtttttatatgccagatacagagaatttgtagcggttatttttgtatgatctagtaacttgcaaacagaccaaatggatgagaggcggggaccgtgcagctgtcggctgatgaggaggcggccgccccagtgctgatggagatgccactttcgtgtgactgcgaacattaaagcacaaaaaaa

SEQ ID NO: 10432 - DNA, 350 bp, Homo sapiens
ggaaaggagtgcccgtcggcgtcttggtcctcctgtccctgctgcaggggctggggcctccggagctgctgcgggctcccctcaggctctgcttcgtgacccgtgacccatgacccacagtgctggcctcctgtggggccactatagcagccaccagaagccgcgaggccctcagggaagcccaaggcctgcagaagcctcctggcctggctgtgtcttccccacccagctctcccctgcgcccctgtctttgtaaattgacccttctggagtggggggcggcgggcagggctgcttttcttagtctgataccaagcaaggccttttctgaataaattcatttgactttg

SEQ ID NO: 10433 - DNA, 426 bp, Homo sapiens
aattcaacgtgaggaagcaagtgacaaggacgcccgaagcacagtggacggtcatgaaggagcgggggtgtggcaggcgggtgacgtccaggagagggagcgcccctggctgcccctcggccgccgactggacgcgcgggccttgccagcgagcaccctcatcgggctgtcgcctgacagcatacctcaaaaggccctagctaataaacctgtaagcccagcatttgagagaaggtagggtgtgtatatataaaaggttgtgtacaactccacgaggtgaaaaatattcagtaacttgtttacatagcatttgtgtaaagactatgatctcatcccaataaaatgatatattaaaccttcagattaatgactggctacagagtaacaaaaaataaagaatttaatgtacagtaaattctctcccat

SEQ ID NO: 10434 - DNA, 3561 bp, Homo sapiens
cgcctgcgcttgcgtggtggatccaacaccagccctgcgtcgtgggacttgcctcagatcagcctgcgactgcaagattcttactgcagtagagaactctttttctcccttgtacttttttttgacctggcatctttttatagggaaaaatggcctttgtaggcagtggaaaacttgcaaggaaagctgccgtctctttggcagtctgatgcagagcctgcactctggcactcgctgaagaatctggaaggttgcggtttgctcttccagtgttcgggggcctctggctgctgaaggattcggtctaccacggagggctgtgctgttaggctgcatcccactcaaaatacaggaaaagcacgaatcatgattctgctttctgttagcttaggcagacattgggccttcacctacaagtttttccttacccctgtggtttttgtgtttttttttttttctttttccataggaaagaatatataaatttgtaaatcctaattcaaagatggctcatgtgtgagggcattgagtttgatttgttttccctttggtctgggttgtgtggcttttgggggatgcgtgtgagggggctatgtgttttttaattttttaaatatatattttggtgctgtgtgtggtaagagacttgttcctagtggatcaatgaaccatctcttctgggcagttttgttgaaaataaaggtttctctttgatttcaagaatgaccaaaatggcctctaaaagatgttaatcatctcaaatgaccttttgtctttggggcgttcttccccctgtgatagcggcagtggctttttctggtacctgcagctggaaaggccacttggccctgtgctgagtgagcggccttcattagagcgaggcagcccttggccggtggggacgcagagccccagcaggtggtgcacgactgttggcggaaggaacgcgtgttcatcctcagtgatctgccctccagcatctcggcagcatctcatcctccatcgtcagctggctctgccgatgtcctgcttctgttcactcacagaactgtcccctgctccgtggtgggcaggagggaagtggtgcagggctgcgtgcattgcctgcgagtcgggacagttgatgggcacatggccttgtagctctgggcacagatgtgtttggattcattgcagcggaccaccgggcactgttgaccccactgagcagtgctaagtgttggtttagtggatgttcgtggaattgctgacccatccaagggcgtcctttggagccagtggagcctgccggcgcatctgaggggcagaatgctgctagcacttgaatctgggatctcgccttattctcaagtagcaaggcatctcgacaagcatggtctaggtctggtggccagcttgccagtacctgagccggtcgggtcatctgcctctgagggaccgtcctcaccgagctcctgcatcccttgagtgttgatcaggaggcgtccacagcattgttctcgcctctgaatgatgcttctttctgtgttggagcctggcgaagttgtgttttcaagccctctacttctctttccagtgggtaggagcttttggcagtgtttactttacctagatggcttatataatccagtaagagatgcaaagataaaattgctgcggttgttacagaagcatggcggcctccagactgacccattggttgccctttagattttgtaaggatgcggtgctggggaggtggtgcttccctaccccctagaaatgctgccttccaactaccactctcccagatgtgacccttgcgattatttcctctgaggtttgaggatgaagataagttggagggaaagagagtaactaataggggatgaaatatagcagaagctagaagaaagcggtgaggtgagagagatgcatctgcacgttttcttcaacagcaccaggtgattcagcatattcctaattacctttcactattcgtgtatataagatcgtttacttgcataatatatcatcaatttgacatattcttaaaactagagggtgtgagaagcacagcaataggaagtctctccacaaactaggggaacacaaatggggtcattcacgtgcctggactgtcactatgtggctgtcacgtgaagtgctggtgttgatttccatttcagccagtgggtagctgataagccagtgccagcatccagcatgagcagatgtcggggagactgggaagtctccagcgttactgctctccttcccttcatgataagccagtgccagcatccagcgtgagcagacgtcggggagactgggaagtctccgatgttactgcctgccttcctttcgtgtgaggggctgcacttgcttttcttgtgatctgttagtggacgaggtcttccaaggaagtgctttgcacactttctttgctcctttttacagtctttgtctttgcagcaagcaaatgaaattaagccactttgggataatgaacattcagtataattctactttgtctcattttggatctcactgttgtctttataaaaatggcacattttacaaagtagtttattcttattatactttctgctggagagtgccttgaaataaaatgtgagagtattctggtactctgtgttccagatgcatgaaattgggtgaggaataacccctagtctggaatctttgtgaagcatagggttattgcaaggcaaatgggaactaacacatcttgccatttgaatcagggtctccagtttctagaaaaggcagacactggttgggaccaaagtctccatggcacatgactgaagactggtggtcgtgtgtgtgcggagtccacggaagcctcggggaggtggagctgctccttccattccgtcaggacgtgatctgaaaacatgtagagaagatgagttgaggacagcttttctaaggcaatgtgatgtctttgctttcttatttctctttctctgcgttgttagttttgaagagtggaggagctaggggctccagaaagaatcttacacatgtgttgaagacattgatgtcatagggagcggggagctgcattcccttctgggctgttactgctaaatctcagtatgaacagaccaggcggaaagcttggtggccaagcagtctgtgtgcttccccgctgatggagaacgttgcgttgttcacaatagggcctcatgggtgtagccgcatggcagacccatggctggcgcagctgcctgttgccgtctgtcttcagtaactgctgctctgttaactgttctattctgatactacgcgtgttgttttttacaacaggtatgtttttgtttcagaaatatgtattgcttttctcatattttttgcaaattgtattgtcaacatgggtcatttaaagtcctgtatgaaccataacctgctgtggtacctttgtacatgtttgattctgtattctttattccagtgtggcatatgtgcccctctgtatcttttgagaagtgcggaataggttgcttctaccacctgttcttaatgtaacagtaaaagttttcacatttttctcag

SEQ ID NO: 10435 - DNA, 1097 bp, Homo sapiens
ctcccaaccccacagcctctccaaggacccaggcgccagcagccccaggacacaggggactcagtgtgtgggacttggtcactccatgtcagacacacgagcagagaggaacacaaaccactgtggagcctgaagctccttaagaagagtccacaacagctggtgggagggtggggtgggcctgggtccagaccaggctcgctgctctctgggcctcagtttccccacctgccagcgggctcggccctgtcctcctcacaggctggtgtggccgtcagggtgggtggggttattgttagtaggcgcagcctcattcccaccacgatctgttccgcgtggttcccgccaaacctccctcggtcgccgtgttctccgcaagcctcctgcagcgcccgcctgccaatgtgaggctggcaccaggctgcagcctccccaatcccagcccactttgctgtgtctctggcgggctgtcctccttggtgggagctgtcctgcacactgtaggatgcttaaaggtatccctggcctccacccacccctagccagcagctcccagtcagacaacagccagaaatgtctccagactctgcccagcctccccaggtagccaccctcgagacacgacctcagagtctctgtgtctcctagaagcctgacagagacccccagggcagtgggtgggtggcgggctagagacccttgcctgtgtccgggaccctggcgccgctctcccctcctgtggatccctccgcactaacagtgttctcagtgggcagacgcctgggcaccccttgggccctgcccagcatggccatggcgcaggctctcgaacccgcatggctttcccaggcctggtgattctgctctccagggacggttggcaccttcctcgggggcgggccccacgcaccccagaacacacagacccacctttctggcgttctttctacctcccttttcgttgcctgaggagctggtggtttcatgagttaatgatacatcttgcaaggtgtacacatagagaaaaaaacctaaaaatgtggaaaagcacgccaaagccttatttaaataataactattaaactattcaaaaagaa

SEQ ID NO: 10436 - DNA, 246 bp, Homo sapiens
gtgccatggccggccaggtgggctgcagagtgggctccctgcccctctctgcctgttctggactgtgttctgggcctgctgaggatggcagagctggtgtccatccagcactgaccagccctgattccccgaccaccgcccagggtggagaaggaggcccttgcttggcgtgggggatggcttaactgtacctgtttggatgcttctgaatagaaataaagtgggttttccctggaggtacccagc

SEQ ID NO: 10437 - DNA, 1916 bp, Homo sapiens
ggcccactgcgcccccgtccccagcgcccccgggcgacttcgtgtttgcactctgccctcgtcgttcctcctccttccatttgacccaagaatcagcaactgcagtgtgaggacagcgtctcgggaggcaggaccctagggagacccgggtgtgcgccgcctgcgcgtggggagtcttcggtgcgtgggggcggcttgctgtccagcctgtgtgggggccgtcccgtcccacactcccctgggcattcttggactcaaggccggggctctgcgtggcttgctgggaggtgggctgcagcacagaggcctgtgactgcgttccagcggccagttcactacgcagtatctctggggcctgggaccagccacgtgccgagctgtcagcgacgtgaggtgtcccttctcgttgagatatttaactttggttttgctctagttctttctttttgaagagagtgactggagtggtaaagatggaaatgctggaaatgatactggcgctcacgctgccatccgaccaccctcggctcccgagtccacgcctgcctgggcctgtgctgtcagacccgcgtcggtcgtaaccctctgtggctcccctgcatcagcaccgtcccaccaccaagttcaccaggttcaccagacacggcctccacaatagccacacccacacctgagctgttctcagtgctggaacttgaccatcctggaacaccctggaagaaaaaggagcgcagggtgggccctcggccctgatgcaggagggtgcgatagcggacgtggccaggcaggaggggccgggttcaggagctgagcaggggatgcctgtgcgtggtgcctgggtctagggaagctccagccccaggatggggctgccctgcacaccggtgcccgccacatgccaaccctcacctccccgaggactggatgatgtgctgccacgtgtgactcgtctcccttgtctgccctgtgtgaccctcagtcttggccagccatgcatgcgcccgaagctcgtgcagtttgtacgtgaggtgctctcctccctgccaccatgctcatcactctggccttggccatgctccctggtcaccccacttcccggtcgccgtctgcagcactcctggagcagcctgggcccttcagcccctgtgctcgtcccaccctagggactcagccacttgcagaacaggatgggaccgagatttcagcgagccctcctggcgcccggtcctccctgtgggcaccagccctcttggtagctggtgtggagggccggtgtccttggctgccacggagggatttgatcaccgaagcagccacctgctgtagttggacctgaggtcagaggcggggcatcagaggctcaaggtgctgagaagccaccgggaaagcagccagcacaaagggcccaggaagccagcccccgagagctgagcgtgggggtctttgagtgtctttctccaagctgagacgtgggcggccgcgtggtatctcccgagggctgcttggaccctggtgggctgagtgctccgaggaggggtggactccaccttggacagtgggatgtggtgttccacatgtgcctgtttccacgccagcaccttgacttggcagcatggagccaaggtctgtccccgcccaggagggtgccttcctcgggggtagggggacggcccactctgccccagggagtcccttttgatgggaagtgcagtcagcagcgtggaggtgtctgggccaccttcagaaggtggatgtggtggccgagaccccgtccacggagggtgatggcctttcccttctgcaggtgcgggcaggtgggcctgggaccggtgctggggcctctccttgctgtgtgtgagggcccaggtggaaggcgcggacctgacagcattccaataaagcatacgggaacatgc

SEQ ID NO: 10438 - DNA, 213 bp, Homo sapiens
gacattttctgcactgccccgaggaacgctgagccttcctccctgggtttgtctggacaccgagagcgaccacatcctggagaagccaggagaaaagctcaggaagagcctgcaggtggaaggagagggaagcagcggcctcggccaaggcccaccccatactcttggctctgtagcatttccaagttcagataaacccctgagtgctcaccc

SEQ ID NO: 10439 - DNA, 291 bp, Homo sapiens
cctgagcggttaccaccagccccaggcctgcggaggcgctagtccaccagagcccctccccgcccctctccccactccgcatccctcgcccccctccccacctcccaccccccaccctgtaaactaggcggctgcagcaagcagaccttcgcatcaacacagcagacaccaaaaaccagtgagagccccgctctctaccgcccggccccagcactcgctagctttcctgacacctggaactgtgcacctggcaccaagcggaaaataaactccaagcagccagtagccccg

SEQ ID NO: 10440 - DNA, 60 bp, Homo sapiens
gagatgattttctaatatttatccactaataaagaagagtgtaaatgcacatatggaatt

SEQ ID NO: 10441 - DNA, 462 bp, Homo sapiens
gatgtgcccagcctgccacaccgcctccaggaagcagagcgtcatgcaggtcttctggccagagccccagtgagtgcccacggaggcccccagcacacccaacgtggcttgatcacctgcctgtccagctctggtgggccaagaacccacccaacagaataggccagcccatgccagccggcttggcccgctgcaggcctcaggcaggcggggcccatggttggtccctgcggtgggaccggatctgggcctgcctctgagaagccctgagctaccttggggtctggggtgggtttctgggaaagtgcttccccagaacttccctggctcctggcctgtgagtggtgccacaggggcaccccagctgagcccctcaccgggaaggaggagacccccgtgggcacgtgtccacttttaatcaggggacagggctctctaataaagctgctggcagtgcccagg

SEQ ID NO: 10442 - DNA, 117 bp, Homo sapiens
tcctggccccctcttatttattctacatccttggcaccccacttgcactgaaagaggcttttttttaaatagaagaaatgaggtttcttaaagcttatttttataaagctttttcat

SEQ ID NO: 10443 - DNA, 223 bp, Homo sapiens
agaccccacaagcactatggacgaagcgtgggaccccagcacgggctgccctcaggaagaccagtgttgcccgaggaggggccggcctgctggcctggggcgtgcagacactgctgagtggagacagagctgcggggtcccatctggacacttacttgcccacctgccagtgtcttgggcatttccttggcaaggacattaaagtgatttcatcacagtgtca

SEQ ID NO: 10444 - DNA, 203 bp, Homo sapiens
acactcaaggacctgtgctccttcctccagagtgaggcccgtcccccgccccgccccgcctcacagctgacagcgccagtcccaggtccccgggctgccagcccgtgaggtccgtgaggtcctggccgctctgacagccgcggcctccccgggctccagagaaggcccgcgtctaaataaagcgccagcgcaggatgaaagcg

SEQ ID NO: 10445 - DNA, 1058 bp, Homo sapiens
gtccggctcgttcaagaacataagctaccaccttctccctccccaccccctccaggcccggggctgaaacagcccgaggacagccccaggggctggctttcaccagctgcagggtctgcttttacttggggtgggggggcggggctgaccctgaaccctcccccccgccaggtcggggaggggtcccaccactcaaagtgcctctaaagaaaccagctttttgcactaaagccaaaccacaccgctgtccccttagccccaagggccctgggggcagccaccctcccgcctgtcggcccgtagatttatcaagggtgttatgggcccagctttggggggccagtcccgatgcactttgaggggtgttggagaggggactcccccactcgcacttaactcaacggctctcgggccctggggctgtttttaccatgtttgtttttgaagctcaggtgtctcacgtctgggctgcaccaggcgaagagagaaattaaagatttgaggtttttccagaagctttgtctgcctctcgggaggaaggccgtggggctgggaccctgtggtgggcaagtgggtggagtctggcagctgcccacagagggccgagggtcacccgtcggccgccgccaccccaggcgaggccggaggaaggatcatctgagacgcaggaggcatctgctggagcagcaatttcccaatttattgaaagtgatcgctttgcaaggatgtctaagctaatcccgtcacagaaaggaaacgcacaggcgcctaggcagaaacttggagactcaccgcagaggccacgtgaacccacggccacagagaggcaggacggcagagccatgatttcccaccgagcgattacgagaacctcttcccccaatagtagacacatctccaatacaaacacaggtttataataagtaataggaagtcaatataatatagattatccccagaaaaaaatcaacaatcttcaaacactgccctttttttgtgtgttttgtttttgttgacaggttgaaagcatgttgaaaaaaataaatatttaagaaaag

SEQ ID NO: 10446 - DNA, 38 bp, Homo sapiens
cctatatgccccagtgggggatcacgcacttgaactcc

SEQ ID NO: 10447 - DNA, 1590 bp, Homo sapiens
gcctgtggttgcttcacccgctgcagagcacacgcaacccagcctcagcatcacagccgcagctctgttcagcggagcagccagccagggcggatgagcagagccggccctgaggacagtcctgcccatccacgcggagatgtggctgccgcgtttgcatgaatttgaagaacacaggcttgtacacagatgttttacactcacgtttgtagatgaaacagatcactgtgctgtccttcctaggggtgcaggaagtggacagggcggagggtttgaaagaatattgagccaaagcccaggctccctttgggaatcatgttagcccatcagaatgttgaaggattgaagagttctaagcataaaataagtggcattttctgacttcttcctcctcctccttccctgactcacagaaggaatgcaatcacccagcaagtcctacctgttacgcaattttttatctcaaaatgccgaacgagaaaactgtccattttctgagacccccagaaaggaaactgaccctcagcagctgcctgattgttacgcgaatctagctttaacggaagcaaattcattattttttaaatgcagtggacttttcaaaaagtttaaattaggcaaagcagctttagcctcatagaatattatttctttggactcaagctgaaatacaagccttacattgccttatgctttatttctttctaatttttatatgtatatagatgagggttccttaatggttgtgagcattgtgtggaattttacacctggcctgcgtggcagcctcttccagttgaggtgttttatgtcacgcacactccatcccagtgtacaaaacctgcttctcttctcaaccgtggcagctcccgctggctcctatgccctgccctaaagggctcttgagcctctgggaatgggaggggccaagagaaggaaaaccctgtctttagcaccctttaaaagaactgtgccccccttctcagtgctgcctttgcatgggcctggcccggctcacattcgtcagtgactccaaccctcctgcttgctgtacttgggatgaaacgaccccacaggtcaggtggagggtggggcgtgggcatcagccaggattgccgttacagtctttttctcaggagctacaaagatctcttcctgttactaaatagtcgcaccccagcagcctctctcgcacaccggggccctgcatgtcagatggcgtggtctgcagggggagctctgtgccttagtggctcttggcaggacactgagggcctgcctgtggtgtgcccggctctgccactcccgggaggggaagggctgctcagctcaaggtgtcctgttcggtagagcaagtgtcctctgacagccgtgtccccggacagttcagacacccttggggatggcactccacacacgacagagatgcaggggccagggaagcccagcgctcggtgcccttcgtccagggttaaaatcggcctgtggggtgtggtgagaaggcaggttgtgcgggtgttgaccgatgtatcttttccttaaagttattataataatgggtaatttgtcaataaagcattcctttggggg

SEQ ID NO: 10448 - DNA, 2473 bp, Homo sapiens
atccaggaggagctgtggtcagaggaggagccggcgcctggccacgccaaccttagaatcatgaactgtagtcacagagatgggaaggcagcctcctgcctgccctggccttgctggggcccctcctgcctccacgcccacccagcgtcgacccttgacccacgaagtgcgtagcatgcagtatttaaagcagtgtagctacggtcttctgtttttttcccttttttaatagcatgtatggggttctgttccatgtctgtgttgtggacattccgcggcatgaccgcgtgaactgcacggtggagctgcctcagggctgtcggtcaggttggtccagtgaggggtgactgcagccggtcaggtgggcgaggagaaggggggctgcccctttcctacctgtgcttgaggggccggaggcaggtgctgcctggcagagctgtgttaccgtcttggcctcggggtctggtccacactctgtgctcccagccttgaggctgcagtaggactctgatctcacctgccagaagagaggcggggccgcgtcctcctggcgtcaccggcgtcactgtcattccttggtgtctgtgctgggcatggttggcttgggggtctgtggtttcctgggccttgtggcagggtttctcccgtgggagaatttggtgtggaaagcataggaggccccttccgaggttgacaccgtgtcctccgcggtgtttctcgcctggtcgtctcgtcgtgtggacgctgccgttctggttctcggaggtgtgtccttcgccgtgttggggttatttgtctgtgttcctgcacttttcccgggctctgagctggattgatggggccagtctcccccctcccatcttgaggtcgttctccacattccttccagcacacctgtcctttccatagccctttttggacctttagaaccacagatgataggaccagcccaatgagccacagtcagagagtagattgtgcatgtgtgagcacccagctactggggacgggggctctcccacgacccctcctcctgtgtttgccagagctcccatctgccccactcgcctttgccccgtcatcgatgattcaggcagagccagattcgttaggtccctggaggaaggactgactggaccagagggaccctctggctcaggagggttgggtccctgggaggccggcagccaggccacagaatccacacgtggaccattgtgggtccctgggaggccggcagccaggccacggaatccacacgtggaccattgtgggtcccttgggaggccagcagccagactacggaatccacatgtggaccatgggaagtcagtctcttgcgtgtcctagaccttgtgggtggcgccctgcataggggagcagggggaacgggtctgatgtccctgtgctggctgagggctcagagctgcccgcactccgtagctcatgggatgtgctgggcctgcctttggcgccatgctgcagactccagtgggcctggtttctgcagaatgtccatggtggccgctgcagagttgcagaggtccctgtagagataaagctgaggaggaggctgtgtgtgatggctctggctcggaccaaccagatgagcctcctgaagcccccttccctgcctgcctgctgacccgtggccccagctcactcattgccctcagcagccacccgaggctgtgcagaagggtaggttcaggttgaccaggaagctgccaaaagggacatggatatgaggatacatctggacgtgcttaggaacagggtgctggttgagggcccccagctgacccctactgcagatccgcatgtggaccatgagccggctgccagcactaggtcctgggcagctttgtttgtcccacttttctttgtttcttctcactaaaatgatcacgaagacctttgacaagaggagagatatgcactgtgatattaaattagaaataatttatcaaaatcagacctctcctaaaagaataagaaattcattgtttggcccatcctgaaaggtgaggtggcgagacagtggggtgcctccgtgccgcttcgtgcagcagcaagttcagcctgagatgctggctgtactcagcctttgcaatttttgtagatgtagcttaggacgtgagttatttttccgcagactggccaagagccaggttctaagcttggacctaaggtagaaagctgcccatcgggggccctagctcagccccaccaggccctctgttgggcctgcacacagctctgtggctagaacactccaaggcccttcggtacccatcagagtgggccccttgccaggtggcttttcagttacagagtccagtggaccattttgtagaaccatgcagctccctgcggaaggtggggtagggtgggaaagaggagcaggtctggaggtttgtggaacccagtcccctgcagaatctgtaaaacctaataaatcatggttgtggcc

SEQ ID NO: 10449 - DNA, 105 bp, Homo sapiens
ttgagcggttgccatggccggtctccgtggggcagggttgggccgcatgtggaagggctctgagctgtgtcctccttcattaaaagtttttatgtctcgtgtcag

SEQ ID NO: 10450 - DNA, 747 bp, Homo sapiens
gaccgccccgggatctgcgcctcggtggcggggggcggtggagggggaatgcggagacccgcacttcctgtggcacctggacggggcggagccgccgctcccagcctcgggcagcagagggcggacgcgggacgctgggcgcgctccggctctgtcagcggctcccggctgggcggagggcagagcgggggactcctggggcccctaaaacgtcacgtatccgtcctgctccactttggaccggggccgggggtggaaattgaggggaggggaaggctggacttggtgaattcggagcaaaacaaccggataaaggaaacgggcccgaagggaagcgggagctgcgggccttggctgtgagcttggccaggctatttcctgctgcctccggaggggtgaccacggcctgggctcagagactgcccagccccctctgcaggactggccaggctggggcccgctttctggcccctggaaccctccatttgctgggggactgtcccctggttcccccatctgatgcgcaggtctgggagtctgtcacccccctcccccaatctcggcccatggaggagcaggggaggtaaagtacctgacacctgttaccctccccttcccggaaaggccgcgagcaggctgtgcctctggcattctgtgggatcaggggcagcagcagaagaaagaagtaacctcccaagctgaccctgacccagccccacactctgtgttaatgtatttagtctgtgc

SEQ ID NO: 10451 - DNA, 166 bp, Homo sapiens
cccctcgtgtagatgtgctgcagccttgggccctccccggcccacgtcctccgttgacacagcttctctggagaccctagaaggcggcatgtcctgccctcaacctgcctgcctggattgcacctttctgccctttccccctcattattaaatgtttctttttgcc

SEQ ID NO: 10452 - DNA, 1839 bp, Homo sapiens
ctaggcgtggacctgcccatggtgcctgtcagcccgcagagcccatctacgcccaacacagagctcacacaggtcactgctctctaggcggacacaccctgggccctgagcatccagagcctgggatgggcttttccctgtgggccagggatgctcggtcccagaggaggacctagtgacatcatgggacaggtcaaagcattagggccacctccatggccccagacagactaaagctgccctcctggtgcagggccgaggggacacaaggacctacctggaagcagctgacatgctggtggacggccgtgactggagcccgtgcccctccctccccgtgcttcatgtgactcttggcctctctgctgctgcgttggcagaaccctgggtgggcaggcacccggaggaggagcagcagctgtgtcatcctgtgccccccatgtgctgtgtgctgtttgcatggcagggctccagctgccttcagccctgtgacgtctcctcagggcagctggacaggcttggcactgcccgggaagtgcagcaggcagcttttctttggggtgggacttgccctgagcttggagctgccacctggaggacttgcctgttccgactccacctgtgcagccggggccaccccaggagaaagtgtccaggtgggggctggcagtccctggctgcagaccccgagctggccctgggccagccgcacctctgaaggttttctgtgtgctgcacggtgcaggcctcatccctgactgcagcttgactctgggcccaacccccatttcccttcaggagaccagcgagaggccctggcccattccctccagcggtgcaatgaactatcatgctgtggaccgtcaacccagccctgcttctcagtgtggggcaggtgtctcaggacgaaggcgccgcgtgaccacatgggcagctctgttcacaaagtggaggcctcgttttcctggtcttgactgctctgtttgggtgggagaagattctctgggggtccccacatcctcccaaggctcccctcacagcctctcctttgcttgaagccagaggtcagtggccgtgctgtgttgcgggggaagctgtgtggaaggagaagctggtggccacagcagagtcctgctctggggacgcctgcttcatttacaagcctcaagatggctctgtgtagggcctgagcttgctgcccaacgggaggatggcttcacagcagagccagcatgaggggtggggcctggcagggcttgcttgagccaaactgcaaaggctgtggtggctgtgaggacactgcgggggttggggggggggcgtctgtacctcaggggatgccccgctgtggtcacccagagaatcacccttcctggtctacagatggaagctgcaggttggtgactttgcaaatgcacttcctacagatgaactattaaaagacctgcaacattgaaaaaactcattttttccaccaaaaccttggccaggtaacctaccttaggcacctgcaaagaacaggaagtgatggctgtctcgcaacagagcctgggctgctcctcctgctctggggagtctaggccgtggggactgttctggggaggctcatgctgtctccatgacgtctgtggcaggagtccctgaggacgggagctgcctagctacagttttcttgccaaggcgaggtgttttgtgaatctgtgctgatgtaatgtgcaccttcacgtatttatgcatgtggcaagcgttacttcctgtgcacgtagccagccctgggtctgtctctggggtaatgaaaaaggaccctaataaacacctgctcactggctgggtattctt

SEQ ID NO: 10453 - DNA, 1803 bp, Homo sapiens
gccgtgtggtacccagaagtgtcccagcccaccacaccgtttacctccctcgccctgccccgcaccgtggggatgcccaactcacagtgacttcccgtttggggcccggtgtggccgcgggcgggtttatccaaagggatggctggaaattggccgctcccacgaggctccctccaggcttggggccgtggtggccctatctgtgtgcataggggcactgaagaattacaaagtgatttatttttgttttctgaaagaaatctgaagagcagctcaaagtctccagtggaagctcatggacaaggttctcagggaagttttggagtttgcaaccacagtattcctttgtctgtcgaggctgggagggtagccgtgagcgtggtgggtgggtggtgtgagtggcatcttggcctggaggacacgcctggggcagcgtgtctgtgctcagtgagggccgatgaagaaagtgcgttttctgttttcatttaattcagttttgtgttaagggtggaacaaagctctgttctagagggaaagttaggaataggcctcccagaggatactccagacagttgacaagcatcgcagcccctgtcaggtcaaggaattttaacctgggagactcctgaaaatcagcctaatgtctgggggcagctggcgctgaggctgtgcagatgtgtatggccttgggtcacagctccctactggggctgcagcctttagaccctgggtctgggatccacgtctagggaccactctggcttctgtgcatccacccaggcccccgacccatcactgccacattctccgggtcatggccgagcttgacctctgcatccatggtgacggaggtggcaatgacatcatcaaggtcagagggtaaattcctaacaggagaccacaaaggtttcacttcttttagatccatccaatatgcgaaaaaagggtacattttaatttaatgtgttaaaaacacaatgtccctaccgtgtaaatagaatccaagtcaattgtgactgcaattccaagttagtatttaaaaatagagaaattgcacttcctggaaaaaattaaaaagtagttagtttaattattctgtaaattatttaattttgtcaagatgtaagtatttatattcacagcctcttatgttaacgtttgctatttatttaacatttttatttattaattttatactatttcaactagaccccacaccagggcaccctaagaggggaaaaaagtgaattcaaagcaaaaataactatttgactataatataggccacaaaaaatcttgatataactcctagttataattttgatgcaaccaagttattttttatatattttgttatttattcttttaataatggaatttttttaaaaagtattttgtaactgaggaattttgataatttggggattttgttttcccttggtctaatggagagaaagacattttggttttctttttccattttgggttccttttgtttcaggcacggataacagcaaatggaattctgtatttattattatttaagtgtagcgcagatgtgtgtgcttgggcgtgtttctcgtgtcgcgtttgcgtgtcggctcttgcggtggagtcctgttgctgtgagggagtgctggccgcaggcagcctcgagtcaccgccaggctcacaggctgtgccacccgtccctccgacagctccaatactgtgaccctccttcctcaggaagcgcgttgaacccacagcactccgtggtgtgtttgcagggtgatttcctaataaaagtccactctgactgtg

SEQ ID NO: 10454 - DNA, 324 bp, Homo sapiens
atggcagtgccatgggccgccctcccctcctgctctcttcccagcacctggagccttggatcatttacttccaggaccggatctccattcagaccctgatctacagtctccctgctccctctgcccttcctccctctttctttccctccctccctccctcccttcttccccccttcccttccctcctccttccttcctcctctccctccctccctcctttctttcttcctgtggttttttcctctcttcttcccttctttctggttggtgctgctgggccaggtgggaatttctgattaaatctgctattccttttttaccaat

SEQ ID NO: 10455 - DNA, 3104 bp, Homo sapiens
aagccagagaagaccttcctcttacatcacattaaggtctcacccttccatggaaggattgggaggggtggaatttcctttattaaaagggtttctgtccagagttttttattcctgccaccctgccctgcccgtttgtgtttgcctttacttcagaggccagtagcagagcctacctgacacagaggggacctgggggcctggcacagaatcttatgcctctcccagtgggcttttggatgggctctctgccacctccctggtgttggaggaagtgggtttctgaagcttgcagctgcttttgcaacctgctgggcctgggctgccctagttaccgggaacctcctagtcaccccatagaaggtgaactggaacatgggatgccctcttactgctcctgcttgcctgcatcagatggacacagaaggagggggctgctgctgaaggagtcaggcttgggatggagagcaagaggccaaaggactcgtctgggagcatgatcggcccctcttactagcagctccatcagctgatcagaaatcagagacagaagggaactaggttactcgttaaatcctacctattttcagcctagaaatcacatgggcgtttccagtcaagtgggaaggaagctcatttttagggcctagacctagactagttttgcctgcctttttttcctccctgctttcttctacaagccacacaacattgcttataaaaggtacttttattactatttttagaatatatacaccccatatgtaaattaccctcacttttaaagtaataatagttccttcacggaaaaaaaaatagttctcatcagaaggatgagcttctaagatcctgaattttactttctacttgattaacattttcgctttagccagagttgctatttgcaaacagctttccacttccaaagtgccactttctgaccggtttttcttcctgttttcctcaaatcatcctactcccaaataggcacccactcactaccttggcgtcgttttttgggtctgacttgactcgtcaactgctggtctctcccacctggttggaaatgtcgttggaaacttgcaaagactctccagaccttagggaacaagaggcatcactcagtccttctgggacagcttccctgtaagcaaagccaggtttgttttagattcactctggcctgaaaaaaaaagtgccttttgctgctttaaagaattggggtatatggtatgaagcagccatgtacttgtattttcctggtctttcctgggcactcttctctcttggcagatgttttcttaaagtgaacacaccagaagcactctaccccaccatatccagtcctctttgcatgcctgttgtgtgcagggtggagggtgtcccacgtgccagagcagctgggagccctgtccgctgagttacactaagcactttatttttatttattttattattattttcttttttctgagatggagtctcactctgttgcccaggctggagtgcagtggtgcagtctcagctcactgcaacctccgcctcccaagttcaggcaattctcgctgcctcagcctcccgagtagctgggactacaggcacctgctaccacgcctgactaatttttgtatttttagtagagatggggtttcgccacgttggccaggctggtctcgaactcctgacctcaggtgatctgcccgtctcgtcctcccaaagtgctgggattacaggtgtgagccaccacgcccagccaccactacgcactttaaaaccaaaaaaagctcaaagggatggatcattgtccatggctcaggagccccactgtggggtaagtgtgatgtcgatggattaatttagacagtggtgtattcatcagggcaaaggaaattcttccagaggtgatgatgcggcagatattcccagtgctctcccaaagcaagctggccctcttgtcatcctctcagtgggcggcaccagctgcccctccttccacaagtactcaagcctgtttgtaaatactgaaggaattgatggggttgaggaaaggaggtgcatgtgaccagggtcccaaggccacagcttttcagatcctaggaagcaagtggcatttgcttgagttgtggcctcggaaggagaatgtttatctgttttctaactttgctgacaccaggattctccctgtcattgagaagaaagcattatctaattaccttcaggtggtttacttattctgtaaagaatatgtgtaaatattttgtacagagccctgtatcaaataaacagccatatgtggttactaatcacctcttctgtcattccgtccttggccaccgctcagtgggaatggtctctgatctggatgctcccaccttccatgtcaggcccagaactgtgccatggtctgtggactcctggtcagccttgactggctaggagaccttgggcagtacctacagtcttgctgtttctgtttcatctgcaagaattatgacccacacactccagctgcagcccagggcactgtgatattttatacgtgtgtagatgtttttgtccacagttcctggttcatcactcccataaccctttgttataatgttgggacactgcaggcctcagaaaacggaatctctgtctgtgaccttctcctgccccatttcacttgctcaacaccagactttaatctgactgtagctcataagaccctcattccagagagggtgctgccccatacccggaaggaggaacgctgcacagagaggccaagaagcatctggacagacaggccttgctgggtttagaccttatgctttttgtccagtttcatctcaacacagctgccatgcttcagccatgcctatccaatgacgtctccataaaaggcccaggaacacgggagcttctgaagagctgaacatgtggagggaggggaacgagaacttgtccatgtgccaagagggtggcgcacccccactccatggggacagaagctccagcatttgcccaggacccgtccagacctcaccctgtgtgtatcttcatctggctgtttacttatttgtatccttttctaataatgtttgtaataaactggtaaacat

SEQ ID NO: 10456 - DNA, 1267 bp, Homo sapiens
cggccctatctgtctcctgatgcctgagcagaggtgggggagtccaccctctccttgatgcagcttgcgcctggcggggaggggtgaaacacttcagaagcaccgtgtctgaaccgttgcttgtggatttatagtagttcagtcataaaaaaaaaattataataggctgattttcttttttctttttttttttaactcgaacttttcataactcaggggattccctgaaaaattacctgcaggtggaatatttcatggacaaatttttttttctcccctcccaaatttagttcctcatcacaaaagaacaaagataaaccagcctcaatcccggctgctgcatttaggtggagacttcttcccattcccaccattgttcctccaccgtcccacactttagggggttggtatctcgtgctcttctccagagattacaaaaatgtagcttctcaggggaggcaggaagaaaggaaggaaggaaagaaggaagggaggacccaatctataggagcagtggactgcttgctggtcgcttacatcactttactccataagcgcttcagtggggttatcctagtggctcttgtggaagtgtgtcttagttacatcaagatgttgaaaatctacccaaaatgcagacagatactaaaaacttctgttcagtaagaatcatgtcttactgatctaaccctaaatccaactcatttatacttttatttttagttcagtttaaaatgttgataccttccctcccaggctccttaccttggtcttttccctgttcatctcccaacatgctgtgctccatagctggtaggagagggaaggcaaaatctttcttagttttctttgtcttggccattttgaattcatttagttactgggcataacttactgctttttacaaaagaaacaaacattgtctgtacaggtttcatgctagagctaatgggagatgtggccacactgacttccattttaagctttctaccttcttttcctccgaccgtccccttccctcacatgccatccagtgagaagacctgctcctcagtcttgtaaatgtatcttgagaggtaggagcagagccactatctccattgaagctgaaatggtagacctgtaattgtgggaaaactataaactctcttgttacagccccgccaccccttgctgtgtgtatatatataatactttgtccttcatatgtgaaagatccagtgttggaattctttggtgtaaataaacgtttggttttatttatcaa

SEQ ID NO: 10457 - DNA, 596 bp, Homo sapiens
gcctggaccctggagaaggaggccaggagccagccactggctggacagggaagaagaccccaggagccaagcccaccccttctttgtgtagggaccgggggaccatggcctgttccgggacactctgggcagggccctcgggacatctccacccgatcctggagagctgtgaggatccattcagcctgcccagctctggctggtcagagacaaggcagaacttttggaaaaacaaagactgttggtgacagggtgtgtgtgtatctgtgcgtgagtgtgagtgtgtgtgagagagaattggtgagtttaaaataaaagctatttttaaataaaagacgtcgttctgagctgaggagagtcccgtggacatcggaggtcagaggtgggccctcccctggacctagagagaggcacagatgttctgggggctgccctgagccctggaagggtgggggtggggcgggggaaggcaggcagagccccctctccgggcgccataaccaaactttcctcagtctgctgtttatcagatgttcttaacaactgttaggtgtctgatatggttggtaaagaaatcttaattttacttatttttg

SEQ ID NO: 10458 - DNA, 2088 bp, Homo sapiens
cagcctccttggcacctgctgccaccttcaagagcccagaagacacacctggcctccagcaggctgggccatgcagaagggatagcaggggtgcattctctttgcacctggcgagagggtctgactctgggcacccctctcaccagctacaaggccttggactcactgtacagtgtgggagccccagttcccacctctgtgacaataggatcatggccttacccttgaagcattaccgagaaggagaacagagatgggcttgaagagccacgtgctgccggctccaaattcccaaggacaaggatccctctgcatttttgtctatgtaacctcttatatggactacattcagctgcaaggaaaggaaaaccttgattgcagtggtttaaacaaacagaagattgtttttccacatagcatggattctggagatgggtggctaatggtattggttcaacaactccacgaaggtaggggtcacgtcttggatccttttgccttaatctcagtgctcgttacttcatggtcccaagatggctgctgtatccccaagaatcatgtctgcgttcaaggaaggaggggtggaggaagaggaagggccaaactagctggacccgtcaccttctatcagaaagtaaaacctcgtcagaagtctgtttcctgctctctccctctgcatatcttcacttagatgcccttggcccgagccagctaccattgcacctctagctgcaaacaaagctaagacagcagggaacagaattgtcatggctgaatagaccaatcgtgttccatctactgagactggcacactgcctcctgcaataaaactgggatcccattaccaagagagaaatgcagaattgtgtaccagttagcttttgctgtgtaacaaaccatccccaaacttggcagctagaaacaaaccctgtattttcccacaatcctatgggttggcaatttgggctgggctcaacagggcagttctgctgctcacacctgggatccctcatggagctaaggtcagctgttacctcagctgggcctggatggtctaggatagccttactcacttgcctggcaggtgacaggctgttggctggaattgcttggttctcctccatgtggcctctccagcaggctagctcaggcttattcacatgatggcttcaggattccaaagagagtgagagtagaagctgaaagacttcttgagttcttggcctggaactgggactaggacagtgtcacttctgctaagttcttttggtcagagcaaatcacaaggctttacccagattcaagggatgagaaacagactacatgtcttgatgaggggaaccacaaagagcttgtggccatttttcacctatcacaaataattttggatgggtatttatttggataaaggtatttccctcttccccctttctctctgtctcatggggcctcactctgccaagttggaaggcactaagacattgtcctggccctcagggtctaggggaagaggtgttggggcaggaagtgagtctctccatgggctggacccactgtagtaggagtgcctccttgtctgcactgctggtatggggttaggccaggtaggacattccagaggggcttctgaaaaccaagagtccctggggaaagggaacagagtaaggcaggccttgttctcactgccctctaagggaacttggtcactcggcacttttaagcctcagtttctccagttcaataataaggacaagagcttttcccatgcattctctttccccgggaaagttgactgaggtgaccagtaatagaattgaaaagggagagtgtcttcagtgcaatgtggcatcctggattgggtcttggaacaaaaacaggacattagtgggaaaattggaaatctgaaaaaagtctgaattttagttaatataccaatttcagtctcttggttttgacagatgtaccatggtgatgtaagatgttgaccttggggtaggctgggtgaagggtatacaggaactctttgtactatctctgcaacttctctgtaaatctagtatcattccaaaataaaagtttatttaattt

SEQ ID NO: 10459 - DNA, 2075 bp, Homo sapiens
gccttccgcctcgccctcgcgcccggaactcgctctccacgcgccccgggccccctacctgcgcccgcagcgccctcgcccagccccggctgcgtttccctgcccatgaccctctcgtggggacccccggcccggcccggaacttttctccccaacccccaaacccacgactcacttccacaccgtcttccccagcgtcccccgacccacttcatcctttccggccatccctcggaccttgacccccctgtccgcgccttcaaggctcccaactcaggcaccaggtccgcacctctcccgcgccccagagccggaaatttctccctcccagaccccgcgctgctcttctaacttctagatcttttctctcgcttctcagctgaatctctctgaccattcctctactggagcccccaatgaaagccgcaaacctatacccttgacgcccatacctgcctcagtttccccatccacacctggacgcaggccctgccgccctgagaccacagtccaaccccagaccatccctctggcctctgctgaatctcccagagtgtgtccatctggggatctaatcttcacccttcttgaagtctccgatctgtccctgatcccatccatgctcaggccttaggtctggccattcacacacacacacacccccacaccccactcccacacacagttcctactgtcttcagtccatggggatctcatcacccactcccagccccagctccagctgccctcacctctctagcagctctcacccctctgagtctacctaacctggagggggcttgaggggcacttcagggccctgccccctaatgtaacccctctctcaccccggcacaacctgggcttccacagtctggagctgccctacccccagattctctgagcactttcccccatccccagggccacagatccccttccttacttgttggggggaggtctggagcacctcgccaatgcccttcccccatccggctgggtccttccagttatttatttgtgtatttatttatttatctatttattattctatttaatctcttggcctcacccagggaccgtctggcttccccagctggactgggaggtcaggaagccaggcaaggagagggacagcacaggccacagagggctgcccccaccacacacacccccgcgtctcgggagaaacccaccctcttcagagcctgcactcgctaaggaaggggactcgagaatgggggggcagcttgctgaccctcaactgggggggtgagggagcatcaggaggtccaggcgtggggcaggtccccaccttcctgaaccttcccctgccactccaggcggcccggagagaggagcctcttcgatttgtttcctgtttattcttcttcccgagggaccccaggttccagggaccgactgagccccggacccgctggggcctctggcctgctccccgggaggggcgctctctcccggccatgtctatgcaactctcccggacagaggggccgggctgccagccacccgcccgttggccgccactacctcctccgctgcgcttttgcatgcccgggcgaggaccgaagcacacacctccacgcgcacgggccctggccccctccgctttaagcacacgcctctgccccattgctctgcagccagcttgggggcaggagtcctggactctcagatcctcctctcccctcctcttagccacaaaagaggggggagactggaggcacccctgcagcaggggcacttccctagggctccagaggggtgaatgggcctttgctcagctccaggcccagcgggaagggaggctgcagggatggtgggagggagaggggtagcagaagcaattatggaggcgttgaccctgtaaatagcaacttctgacagcaataattttccatgcatgctaagccttttggccatattttgtatgagcgcttggcgctcctcctccgtcctatcccaactcacccccaaacccccatcccttccccacctccagcagtattacttgtaacgcaattcagggatattaaagggactttggccactca

SEQ ID NO: 10460 - DNA, 945 bp, Homo sapiens
gcaggccgccgaccccgcccccatcgctcacggacggaactggggtccagagaggccaggtcacagagcaaggggcaggaacagagagacagagcctgagtaattgaatcatgaacgcaagtgcccactggggactgtggggaagatggcacctggaaatgcaaggtgcggctctatccccaactctgtgtcacactacctgtgacgaccagctcagatctcctttgctttgactctcaagagaggactgatttgcagcatctagctggaggcaggcccaagggtgttagaagggaaacagctgggacagccggctgtcccttcaggctgtgtgaccttgggaaagtcatttggcttctctgtgcctgtttcttcatgcatgcagtggggattccagtaagtaccaactacctcacaggcatggcacggaggcaaaaggaaaaagcagcccgcatcaagcaagccctcctgggccacctgctgatctgacagtccatcgtagtaacaagagtggcagtctgcacaacctagaagtggccagaagggttgagacacgcccctgccctctctcctttgcccctcagtctcacagaggggcttctacaagacaagcagataacgatagaatcttgggcatcttggctttcggattctcagtgtggagggacgtagtaccccacacaccccttcctgtcatccttcctggcccataaagcccactagttggagagtaagtaccctcctggaagccgggagagatgatttgctggtggggctggggaaggcccatccctgagcctctgaaagtgaactccccgaccaggttggggaccagacatgcagagcccctggaagtattctctcaaatggaggcaacagaggtgattgttattttgttttagtttctgtttttcatttttttaaataaaggcattccctgctttt

SEQ ID NO: 10461 - DNA, 304 bp, Homo sapiens
cgagcagctgtgccagaggctggaccacacaggagaagctcggacttggcactcctggacaacctggacccagatgcaagacactgtgccaccgccttccctgacaccctgggcttcctgagccagccctccttgacccagaagtccagaagggtcatctgccccccaactcccctccgtctgtgacatggagggtgttcggggcccatccctctgatgtagtcctcgcccctcttctctccctcccccttcaggggctccctgcctgagggtcacagtaccttgaatgggctgagaacagacc

SEQ ID NO: 10462 - DNA, 1902 bp, Homo sapiens
ccgccggctctcccgactctctggtcctagtcctcggcccctgcacacctcctcctgctccttctcctcctctcctcttactctttctcctctgtcttctccatttgtcctctctttctttccacccttctatcatttttctgtcagtctaccttccctttctttttcttttttatttcctttatttcttccacctccattctcctctcctttctccctccctccttcccttccttcctcttctttctcacttatcttttatctttccttttctttcttcctgtgtttcttcctgtccttcaccgcatccttctctctctccctcctcttgtctccctctcacacacactttaagagggaccatgagcctgtgccctcccctgcagctttctctatctacaacttaaagaaagcaaacatcttttcccaggcctttccctgaccccatctttgcagagaaagggtttccagagggcaaagctgggacacagcacaggtgaatcctgaaggccctgcttctgctctgggggaggctccaggaccctgagctgtgagcacctggttctctggacagtccccagaggccatttccacagccttcagccaccagccaccccgaggagctggctggacaaggctccagggcttccagaggcctggcttggacacctcccccagctggccgtggagggtcacaacctggcctctgggtgggcagccagccctggagggcatcctctgcaagctgcctgccaccctcatcggcactcccccacaggcctccctctcatgggttccatgcccctttttcccaagccggatcaggtgagctgtcactgctgggggatccacctgcccagcccagaagaggccactgaaacggaaaggaaagctgagattatccagcagctctgttccccacctcagcgcttcctgcccatgtggggaaacaggtctgagaaggaaggggcttgcccagggtcacacaggaagccttcaggctctgcttctgcctgatggctctgctcagcacattcacggtggagaggagaatttgggggtcacttgaggggggaaatgtagggaattgtgggtggggagcaagggaagatccgtgcactcgtccacacccaccaccacactcgctgacacccacccccacacgctgacacccacccccacacttgcccacacccatcaccgcactcgcccacacccaccaccacactgccccacacccaccaccacactcccccacacccaccaccacactcgcccacacccaccaccagtgacttgagcatctgtgcttcgctgtgacgcccctcgccctaggcaggaacgacgctgggaggagtctccaggtcagacccagcttggaagcaagtctgtcctcactgcctatccttctgccatcataacacccccttcctgctctgctccccggaatcctcagaaacgggatttgtatttgccgtgactggttggcctgaacacgtagggctccgtgactgggacaggaatgggcaggagaagcaagagtcggagctccaaggggcccaggggtggcctggggaaggaagatggtcagcaggctgggggagaggctctaggtgatgaaatattacattcccgaccccaagagagcacccaccctcagacctgccctccacctggcagctggggagccctggcctgaacccccccctcccagcaggcccaccctctctctgacttccctgctctcacctccccgagaacagctagagccccctcctccgcctggccaggccaccagcttctcttctgcaaacgtttgtgcctctgaaatgctccgttgttattgtttcaagaccctaacttttttttaaaactttcttaataaagggaaaagaaacttgt

SEQ ID NO: 10463 - DNA, 277 bp, Homo sapiens
gaactagcccaccttatctggctgctttagctccagtgctacaaggtccaccccctgctcccgcccacctgacccctgccaaggccctggggttttaaactgagctcacatagggccttgtggaagaagtactgggtgctggagggagagctcggggcccagcccatgccccacacgggcaagcagcccactgatctgttttgtagctgaggttttgcatacggttttgtttggaggatggcttctgctgctaaaaatacaaaagtttggaaaccgc

SEQ ID NO: 10464 - DNA, 464 bp, Homo sapiens
agccactgcagggcagggcaggcagggggggcttcccgccctcctgcagcaaagggcaaccaccctcggatgatgggttgcagccggcctgctgcttaaggtgggggctgccatgaggggggcgtgtccaggagggtgaccatgggatggcttatacacacaggcctccttggagcctcagactccaagctaggctgaggctcaggcagggcccacaggcagccgattctcttgtgctgatttaaatgctggacacggaggcaggctgtttaaacgctgcttaaagtcgcaactgggcccctttcaagaaattttgctctaccaggaaaacagttacacattttaagagaacagagctacgttctttgtgagagctttttccttgccttgacttgctctttgtcacagactgcataagttgtcagccttgactatcttttgaataaagatttgattttaaacaa

SEQ ID NO: 10465 - DNA, 1094 bp, Homo sapiens
atctgccatggagggatctggtgcctccagacatgtgcacatgaatccatatggagcttttcctgatgttccactccactttgtatagacatctgccctgactgaatgtgttctgtcactcagctttgcttccgacacctctgtttcctcttcccctttctcctcgtatgtgtgtttacctaaactatatgccataaacctcaagttattcattttattttgttttcattttggggtgaagattcagtttcagtcttttggatataggtttccaattaagtacatggtcaagtattaacagcacaagtggtaggttaacattagaataggaattggtgttggggggggggtttgcaagaatattttattttaattttttggatgaaatttttatctattatatattaaacattcttgctgctgcgctgcaaagccatagcagatttgaggcgctgttgaggactgaattactctccaagttgagagatgtctttgggttaaattaaaagccctacctaaaactgaggtggggatggggagagcctttgcctccaccattcccacccaccctccccttaaaccctctgcctttgaaagtagatcatgttcactgcaatgctggacactacaggtatctgtccctgggccagcagggacctctgaagccttctttgtggccttttttttttttcatcctgtggtttttctaatggactttcaggaattttgtaatctcataactttccaagctccaccacttcctaaatcttaagaactttaattgacagtttcaattgaaggtgctgtttgtagacttaacacccagtgaaagcccagccatcatgacaaatccttgaatgttctcttaagaaaatgatgctggtcatcgcagcttcagcatctcctgttttttgatgcttggctccctctgctgatctcagtttcctggcttttcctccctcagccccttctcacccctttgctgtcctgtgtagtgatttggtgagaaatcgttgctgcacccttcccccagcaccatttatgagtctcaagttttattattgcaataaaagtgctttatgccggcttttctc

SEQ ID NO: 10466 - DNA, 378 bp, Homo sapiens
caggaatggcctcctcccttagctccctgttcttgggtaaggaaatggaatactgaagggcccttcactgcctttgctcctcccatgttatgcccagcgtttgatgggtagcagagagaacaaaaaacaccacaaggctatttttccccctgcattctttctgtattgagtatcctttcagtgttattagtgtatgctttgaatgtaaaaattggtcaccctaaggaaaggaattggcatgtgtatgttcccagttcaactcatggagatggcagctgtttaaatgtttttctatgtagtttataaattaaaactgaattgaggactatggaaatgtaggccaaatttgtagtgccaacattttagttctttggaaat

SEQ ID NO: 10467 - DNA, 1581 bp, Homo sapiens
ccgcccagccagctgcctggcctccctcctgtgtttcccatggccagtggccatgccccatggggatcgcccctcctgcccccttgtgcacacccagcagtccagtgcaacgtctcctccatagctctgggttcttagatcttggttggacgtttgttttctccttagttgcatttcctgggtttttgtgatgatcaatggactttaatgaaaaaaaaaataaaaacaaccaaaaaaattgaaggaatatcaccagcatgttgtacggaaactctcccactgaagcaggctttaattgctttaaaattatatttatcttggggcctgtgggaggaaacttccttccatcttctctgcataaaaacttgtggcacacaatgcttattcactagtgtgtcccacccgccagccccacagatgactggaggaaggaggggaaatgtgtagaaagaggcttcgccaccacttgttcccacgagaatatgtcacttgcccagataaaactgggcggcagccagagttccctgaagtgggaagtcagagctccatgcacacagtgtcttcagaaggtgaaaataaatatttccctgtgctccttttactcaacccctggggtatctaatcttgccaggtcttggccagttgagattctgttccacctgcctgcctggccctttcctccattaccatccagactgctcgcctcctggggattctcaggggctccattatggcttgatttactccacgtgcagaagtcttgagtggacctaggaggtaggtgggatattttttttcactaggatacagctcatgccaacccatcctaagtgagttcagaatcagggtatcttgccctataagataaacagtcaaaatgccaccgagctgttcactagtgatgtgtggcaaatcaaatcaactgttgaagaaggggtgagttttctgtgctacaagcacctgtcactgttggtacttgcaggaggcttctgctgggtatgttttggaagtgagtgtcactacttggctttgcttagcaggttctgcttcacacttgttctttgacctgctgacttgtgacttgcagaaacataggcagtagtcctagcctggtaaagaccctccaccacccctataagtttgattgctatgcaggtttgggagaggaggcctattgggctcttggatggaaccctttcccgtattaaacaaaccagagacagaatcagtgctgactcaggatctcctggtttggaatcgtaatgtgcctcaatcctctttccaagcaggcctcaccagtctctttctctttcctgcttcacccctgcaatgagccaagaaccaacactacatccacctagaactgcagaagggcttgtggtttcaaccaagacccatcctgagcaagggacttggcttggtgcttttgatcccaaagttcccacaccggcagtggcctgctggggcaatggcatctgtcacggtgttttctccagcaggtggagattatggaacctacatatgggtctggaaaaactgtacactgttgtcaccttgaccattaaaaaccagaatgaggac

SEQ ID NO: 10468 - DNA, 172 bp, Homo sapiens
tccaaacagggaaggaacgtacaagtaaataacaaaagcccccatactcttctgactccctggagacagctactttttaggagtttcatttgccttcttcaagagagctttcttccactgacataaaatgccagcttgatcgtacaataaatctgtctatttacctgggtcc

SEQ ID NO: 10469 - DNA, 1115 bp, Homo sapiens
gaccctcagtctctgctgcctcctcctttcttgagaagctcagcctgagagaaggagctggcgagaaccttccccacactcagctccaaacgcctcctctcccaggtcatctgcctgcccacacgctcctgttccaccttcacaagaccatgatgccccaaagcagtgtctctattcacggtcctgagcaggggccatgggattgggctctgggcactgactcatggcacctccctagaaggtgagaaacactccaaatctaaacacaccaggacttctcccatccgtcgccttgggactggccataaaccacagactctctccaggctctcaagagttatcctgtcttctggattcctgcctaccccaactcccccagccttgttgaggttctctactgcctcctgaatacacatgaacccctataccaattttaagaaaaaaatgattctctttcctctttgtccaagcatcctatccctcaaacccaaaaagaaagaagctctcccttctctctctgtgatggagacagtatttcttctagtatcctgcagccttcccagtcctgctgcttgtggtagaaatgctgccacagcccaacattgaggagccctcgatgactgccctttacaactcatattcagttctgcctccaaaatgcatgtgtccacttacatgagatggtaaatgtttaacaatggactttctgaaagggaaaaaccaaaagctgttttgcagtgcttgccaatttctctagtgtaataactcccaacctgaccaatttcacactgccaacagttaaacaaccagattgcaagattcctgaaatttaacaattggttttcagggcccagtccaagcctgctgctggaaacctcagagttaaatccctattctccacacctctcacctccaccacccctccctgtcccagccagcatcatctctttggggaccactcctctggctttcatttttcagccacagtgattctttggaaaagtcaaatcatatcacttctctgcttcttccccaacacagctgcatggctcccgctctccctccttcaagtctctgctcaatgtcacttcattaaaggcaccttctataaacta

SEQ ID NO: 10470 - DNA, 485 bp, Homo sapiens
ctccttccttcctcccctgccacgtgggaccctcatctctgctgcctccttcctttcctgagaggctcagcttgagagaatgagccagtgagaagcttctctagacttggctccaaacatctcccctcccaagacatctgcctgcccacaggctcctgttgctccttcacacagacctggatgccccagagcaaggtcttcattcatggtcctgagcaggtgccatgggattgggctctgggcactgacttaacggcacctccctagaaggcgagaaacatgccaaatctaaacacaccaggactcccatccatcgccttgagactgaccgtaaaccacagacgctctccaggttctcaagagttatcctgccttccagattcctgcctatcccaactccccagccttgttgaggttctctattgcctcttgaatacaaatgcactcccaaagtggttttaagaaaataaaaagattatccttcc

SEQ ID NO: 10471 - DNA, 1566 bp, Homo sapiens
gcacctcttttcatggagtagagtcaggagaaacccctgacaccttttcaggttggagtgcattcattcatcctcttatatgtgccccttccccatgctcagctcagcattgtgtacaaaatatccaagcccagcctatctctcttctgcgtgggagtatgttatttctctggggtctgtgatggggaagggtggatgtcccttccccacaataggcttagtgcttggctcagacacctagactctaaaactatcagcagcggcagcagcagcagcagcagcagtttgtgatctgtccttccaacctgttcacgtgactcctcaattccagggaaccagagcgatgtgttctttgtacctgtaggtctatgatgtccaaacttaacagatcacatgcccctcttagaagaaatatgagcatgctccctcatgcagatagtatacacatcataaacaaagagtagaactttaaaagaaggtaaataatcatacacagaaatcctaacattatattcccaaatctcaaaagatctcctgtgcacctgactttggagacgatgctttaggtaaaaagcttaaacattgccttatattggatcaggaacccttacagtagagggtccagtcttctagtgggtttaatgtttagtcagtgtactctgagtcctcattgttcagaaaagcacctcttgaagaactgacttcctgaactcccagtcatgttggtaccctggacagtgcctaactccttacagaagggagtgaaaacctctttcggaaatgattgagagcagcctcttgaatgcttaaatgatcaaggagggagaaaggcaaaccaatttgttctgtgcaacaaactcaaaatgtggaccagttccctcagccctcattaaactaattaaactgatgggtatcatgcttctactccatggtgaactgaagcagagtcaagctgatgaagttaagcacaaccatgttcttgagcagctgaattggctgccaagagtccaagccatctggcccaacatacgcactgggcattgggtaagggactccagaagcagcagctagaaagagaaaaagccctcttcaatccccataatgcttctttcctcttaatgtctcaaaataaaaccagaaagaggaataaaatgattaagtgcttgaggccaaatgagttcccttgattcaaataaccctgaatcagaggcagagacctcctgatgtcttggtttccatcaaagccctccctgtctgtctgtctctcttttgctctctcattcccaggcactctcttttggtttgtgggtccaggagatgaggctggataggagaggaaaaggcttgagtctggataatttgtataagatgctgctgagcacatctcttcatgcgcagtccccaggtatctgatgatgttctgaaatggatagattgttttagagttattttgtgtcctttaaaaaaatcccatttatgcaatttacttggaatttgcttagcctttaataggcttgtgtaatttcctgctcctccagtacaataaataaaagaaagatgctgatg

SEQ ID NO: 10472 - DNA, 294 bp, Homo sapiens
cccttggccacagagtatggaagtagctccgcagaggcgtgggctcgattcctcagggccacgttaccacagacctgtttgtttcttatgctgttgttcgtggagtctcatgggattgtctggtttcccttacagggccccctcccccgggaatgcgcccaccaaggccctagactcatcttggccctcctcagctccctgcctgtttcccgtaaggctgtacatagtccttttatctccttgtggcctatgaaactggtttataataaactcttaagagaacattataattgc

SEQ ID NO: 10473 - DNA, 1340 bp, Homo sapiens
cgggagaaacctgtgtatgcaggggtcatgaacaagacctgagtgaccagtcaagcctcatgttaccccagagagacacatggggagtagaccctgtgtacacagattgtgagtgaagttccagagatgtgtcagcccttatcaggcatgggagggacacgttcaggagaggagccttatgagtatagagtacgggcaactgtagccatcagtcagccttgagcatgcacaaaaggacacacttaggagagaagtttatgtgtagggactgtgggaaggctttagcaataatcaacatttaccagacatccaatgacagcctcaggggaaagcacccttgtctggggagtgttggggagcatcagtaaaagaatggacactcaggcacagagtggccctcaggaaggaggtctttgtttgtaggatgtatgggcaaagcttttgtgatcacacaccacagggagaatctgcatgtggggacactgtggagctctgcccagatgaccttttcaggggtaacaccccagctgcttgagagaacagtgttgctgctggcagagatgcattccagagatgcactccgctctggaactcactctcagccacagggagctgcatgcaccacaggggcaatgcacctttgcaggggtaccttctggccccaacccttgactcaacggggacaactccagaaggtcattccagatccagagatccccatcgaactgaaggatcactgggttgcagacacattgcaggtcagcttcttcctctgcccagtcctgccctcactccccagtgaatcctcaattttctgtctcgttgtctgtccagataattgattctaagacatgttaggtatataaggagtgtagataaggcttcagccatgagtcaccccgcagtaagccccagagtatattgaatagaaattctgcatgtgtggggagaatggacaaggacttaggaaaaagtcctcatcaaagaacagcttttttgggacaagctttacatgggtggggagggaaaatgtgaaacacattagcaataagttaaacctcatcttgtactaaaggaggacacactcagggagaagacctctgtgggcagggcttgtgggtggagcttcatcccgatgtcactcctcaactgacttaggaggacagtcttgctaccccaagtcactacctcactcacctctgagggattttcaggaaatgtcttgactcccccatgtactctgtatgtgagcgaagatggcagtaactgttaaataagcattcttttctacttcttggaatcagatgaaataaaaaagcaggctttatttaagtaatcaa

SEQ ID NO: 10474 - DNA, 354 bp, Homo sapiens
agccctttatttcttccaaccttgcaaggaccacactccccatacccttcagtgcagtgtaccagggaagagaccttgtgcctctaagcagtggaccatggtcaccttgctgggtagagcctaggttgtccttgggccggcttccttaggggacagactgttgggtggtgatggggattgttaggatggagcccaggccacatggatgatgatgattctcccccacaggttcgaacctctgacatgggtggctatgctacttgccatgacttcactgaggctgtcattgctgccttgccccacccataggccctgtccatacccatgtaaggtgttcaataaagaacatgaacc

SEQ ID NO: 10475 - DNA, 120 bp, Homo sapiens
tacctgcggtttaagagccctagggcaggctggacctgtcaagacgggaaggggaagagtagagagggagggacaaagtgaggaaaaggtgctcattaaagctaccgggcaccttagctc

SEQ ID NO: 10476 - DNA, 137 bp, Homo sapiens
actggatcttgggctgggactggatgtgccaatggcccttcagggcctgcctggcacctcaggtactgggctagggtgtctgctatgcctggtattgttcttgtccattgctgtcaccaataaaggcatggaagaac

SEQ ID NO: 10477 - DNA, 73 bp, Homo sapiens
gccccgcgctcgccccaccggcgcgctcttcgcgcccgcccctgcagcacggacaataaacctccgccaatgc

SEQ ID NO: 10478 - DNA, 2532 bp, Homo sapiens
gtgactgacctccactggaggagacccattgctgggaggagctgagggggaacaggagcagggccacagcacccctgaggtctggccaggccccaggcacagagctgcctgctccctcccggggctcttcttcatcacctcacggtatagcacattgcttctgcgctggtggcaatagggcaacaaagccataggccagagggcggggggatgtccctgcctccctgccaccccccctgcctgagcccaggacccactggagccagccccaccctaggcaggaagacccctgctgagggcccccccgtgcagtccgcatacccccctgtccagcagggcactgtgggtggctcaccctagattgtggcccagatctcaggagtctctgccttcagggtcatccaaaagtggaccttgggagcagtgggggtgtctgtggagtgcatgactcagccccccgactcgcagccttaataaagcgatggttgacgtctgctgtgggtttcctcctggtggagtgcctgtctgtgtcacacactcctgtcgcccacctgcacccacacaagtggagctcacagggtagctgtgtgcagtcactgcagcttgccaggctgtcattcctgtcgatgacctgaaaggacacaaactggaattttcaggtctgtcccctgcatggggactcagaacccaggtttgcaggtgggcatacgtggtgggagggtggagggctccctctggccagtgccagctgtgctcagctggcttcagaaactgctccctgagggggagcgcagcgtttcctcatgcagttggtttcaggaaaaatacttgtttataggctgcatccttttttcagcccaacatttagctttatggagtgccaaagggaaaatatatccatatccctacaacttggtactctatcagattccagccactagaagaacctcagtgagaaaacacacccgcctttccctgttcccttctaagcacgtttgggaaggaacagcctaaagatgctttgtaaagctgtattttacccttgagcttagccgcgggtccctgtgaaccggcacattcctttcctttaggccgtccagagctctagtccacacccaatactttagagatctgggtttggggttagttgcttttttttttttttttttaattgagacagggttggtctctgttgcccaagcttgagggcagtggtgcaatcataactcattgcagcctcgaactcctgggcttaagggatccttctacctcagcctcccaggtagcaggaactataggcatgtgccaccatgcccagctaatttttttattttttgtagagacaaggtcttgctatgttgtccagactggtctcaaactcctgggctcaagcgatcctcccaaagtgcttggattgcaggcatgagccacttcgcctagccaagcctgcatttttttgagttcctacatcatttgtccacaaagatggcttcagagaggtggtcacatgctttgctctgcttcctcttggcactgaccttgatgcagccttcacatgagatttgagggtccgcatggatggcctgtgccgccctcgctggcgaggctcctgtgtgcccctggctttctgggtctgtgcctctccagaatcttgtcttaccctccggtgtgcttgtgttcttagaaaagccccagcatggccgggcatggtggctcatgcctattatcccagcactttgggaggccaaggtgggtggatcacttgaggtcaagagttcgagaccagcctggccaacatggcaaaaccccatctctactaaaaatacaaaaattagctgggcatggtggtgtgtgcctgtaatgccagctactcaggaggctgaggcatgagaatcgcttgaaccggggaggcagaggttgcagtgagccgagatctcaccactgtactccagcctgggcgacggagtgagactccctctcaaaaaaagaaaaaagccccagcatgtagcaaaagcatttcttggtgagtgtgggggctggtgattcccaccttcaccctgtcatggtctcagggaacagcctgcttcccaccagcagcttgacacccacagtgtgctctggctgctgggagcccatctctcggagaaaccctgtccacccaaccccgagagccctagcgtgcagtcagcgtcagcacggcgctcccagatgagggccggactgcctccccttaagcagctgtgttggaggtactgcccagaccgctgcaggtccctggggatctgcatttctaacaggctcctgcccccaagactgctctggtggaaaatccagcctgggagcccctggagtggcaggccctgtcctgggtacaggtggagccacccccaggagttgcgtgtgtttttcttaattgaaagacttcccccaaaaggaagtggtcttttcactacccttgccagaaacatgctaggcaccactgggctctgtttctgtcccctagaaaatgggaataaaatttcttttgctgtc

SEQ ID NO: 10479 - DNA, 255 bp, Homo sapiens
agggcatttaggggcatttctatggcaaagctataggtgtatactgtaccaggtgttgcaaaatgattataaaagccagaatgtaagtttggcgataaaatagtgtgttgaggagacttaattgtatccaaggcaggttagagctagtgtatgttactgtgaattgtaatgtagttggattgtacaaattactgcaaatgtatacatgttactcttagtaaataataaacatcttaatatgtcctacggtcaagt

SEQ ID NO: 10480 - DNA, 1827 bp, Homo sapiens
tcgacctgggcactcggcattttgacacatgtcctgtcaaaaggccagagtccccagtgtcccctcccctccatctctcttccccatagaccccataaccccagaccaaagaggttctctaagcagctgtgaccaggttcctccctccccacctgccctcctagctccagcactgcccccgtggcagcccacttggacccccctaaaaggagggaataggaggagggcagggtgagtgggggcaatcctaggtggtgggggagtcatgctccctttctcggcacccccttgttggagatggaggcagcagacgtgcagtgccataaggtgccccagtccttctggaggcctgggctgctactgttggccaccctgtgtctagtgatgctctctgtgctcacctcctaggccatggagcctgagggggcctgcaccaggtttgctgaaactgacagagcctgggctccagacctctctccctcctacagtgctctccctccctgggcagattggcaggacaagtgggagcagatggcctgcctttggctgagagggctacctgcccagcccctcccccaacaagatctcttggactcaggcctcagagcctggcctggttgtgagtgtgtgtccctgtgtgtgtgttgcgggaggggaggactggggctggaagtccagcacccagggaagatctgtcctcctgttcttgggaagcgttgcctgacggcttctcggctctaccctcacccttctggccaggatcccgcagggcaacagccccatctgcttggctgaccccacacccaggaccactgtccggctctaacacagctattaagtgctacctgcctctcaggcactctcctcgcccagtttctgaggtcagacgagtgtctgcgatgtcttcccgcactctattcccccagcctctttctgctttcatgctcagcacatcatcttcctaggcagtctcttccccaaagtctcaccttttcttccaatagaaaattccgcttgacctttggtgcactgcccacttcccagctccactggcccaagtctgagccggaggcccttgttttgggggcggggggagagttggatgtgattgcccttgaagaacaaggctgacctgagaggttcctggcgccctgaggtggctcagcacctgcccagggtaggcctggcatgaggggttaggtcagccaatgtcagctgcttctcttggggccctctcagagtctatctccccaagacaggaagggaaaagcaaatttctaattcaccagcaataaaaattggaggaggcttggccctcagcccttatatctctctctttttcactctcttcctcccacccccaagactgagttttggggggcaaggtggagagagctggcaactactgtgagcaagtcccctagcccctgaccagcctcctcccatgactggtgactgtttaatgagctgtgcatcccccacaaaaacatgagtgcccctctgtgtggcctctaaccctctgcacagcccttctgggtggtcctcaccaggtctctgagctgggtgggaggccatcctggcgaccactgcccattccattcacccctcactgtacctgccctagaacctgggcctaggccacaggggcagggagaagagaaggcattagtaagaaaaaaatagaaaaaaatatgaacagactcagctttgggacgtccaaccacaaaagaaattatatataaatatatataaatatatatctctaccatatgtgatggaaagactttttgttttcctttcccaaagaaataaaacggaaaaagcctc

SEQ ID NO: 10481 - DNA, 281 bp, Homo sapiens
ccccagtccttccctcttggactcagagttggtgtggcctacctggctatacatcttcatccctccccaccatcctggggaagtgatggtgtggccaggcagttatagattaaaggcctgtgagtactgctgagcttggtgtggcttggtgtggcagaaggcctggcctaggatcctagataagcaggtgaaatttaggcttcagaatatatccgagaggtggggagggtcccttggaagctggtgaagtcctgttcttattatgaatccattcattcaag

SEQ ID NO: 10482 - DNA, 369 bp, Homo sapiens
ctggcagaccctgcccacgccccattcgccagccctccacgtcctcccaggctggctctggagctgtgaggggaggtgtaggtgtgtgggtgactgctctgtgctgcgccttctcatggctgactcaggcctggggcatctgggcattgtaggggtgcagtggtatgtgcccacccctctcccattatcctttagctttaggccaagagcgttgctcagggcagcttctgcccagggtgggtgggactgagcaggatggattttcttttgataaaagagtcgatgcctgaaagagaaaccatttccttgattgtgtaaggaacttgctggacgcacattagagaataaagctcctgtttctaggctcct

SEQ ID NO: 10483 - DNA, 616 bp, Homo sapiens
ttaggacagcgacctcggatagcacagccagctactccaccctgcctgcctgggccgcctctgtggcctactggccccttgagaaggggctggcttaccccccaagccggccctggtgctttcactccgctgccctttgtaggtttggacaccctgtgtgccgtcccctggggcaagggatgtaggctggggcctgactgtaaagcccccgtctccctgtcaggaggcatcttggttgtaagtccctttattcacagaccttgagaccactggggtctcccacaaggtggggtcaggagagggtcacttttgtagctgagacctctctggagacccagatcccctagagcaggtcagagaccatccagaatcccagaattctaggaaattgtatcagcctcccaagcatataaccccctaaggaatccatcggacaagaccccgtctaacactgcatcctcccaactgggcattacccaccattgtagccacctgtgcgccatgaccatgctggcagagtctttcctgttccccatatgctgcttgaggggccccaccctgtgccctgcctggcattggccctgtggccatcttccccctggtttcctgcagctgt

SEQ ID NO: 10484 - DNA, 989 bp, Homo sapiens
gaggtagctcctaaaatgaacagatttaaagacaggtggccactgacagccactccaggaacttgaactgcaggggcagagccagtgaatcaccggacctccagcacctgcaggcagcttggaagtttcttccccgagtggagcttcgacccacccactccaggaacccagagccacattagaagttcctgagggctggagaacactgctgggcacactctccagctcaataaaccatcagtcccagaagcaaaggtcacacagcccctgacctccctcaccagtggaggctgggtagtgctggccatcccaaaagggctctgtcctgggagtctggtgtgtctcctacatgcaatttccacggacccagctctgtggagggcatgactgctggccagaagctagtggtcctggggccctatggttcgactgagtccacactcccctggagcctggctggcctctgcaaacaaacataattttggggaccttccttcctgtttcttcccaccctgtcttctcccctaggtggttcctgagcccccacccccaatcccagtgctacacctgaggttctggagctcagaatctgacagcctctcccccattctgtgtgtgtcggggggacagagggaaccatttaagaaaagataccaaagtagaagtcaaaagaaagacatgttggctataggcgtggtggctcatgcctataatcccagcactttgggaagccggggtaggaggatcaccagaggccagcaggtccacaccagcctgggcaacacagcaagacaccgcatctacagaaaaattttaaaattagctgggcgtggtggtgtgtacctgtaggcctagctgctcaggaggctgaagcaggaggatcacttgagcctgagttcaacactgcagtgagctatggtggcaccactgcactccagcctgggtgacagagcaagaccctgtctctaaaataaattttaaaaagacat

SEQ ID NO: 10485 - DNA, 1588 bp, Homo sapiens
ccagtggtgttgcctgccctccggaggagaaagtggccagaatctgtgatgactccagcctatgaatgtgaatgaggcagtgttgagtcctgcccgcctctacgaaaacagctctgtgacatctgactttttatgacctggccccaagcctcttgcccccccaaaaatgggtggtgagaggtctgcccaggagggtgttgaccctggaggacactgaagagcactgagctgatctcgctctctcttctctggatctcctcccttctctccatttctccctcaaaggaagccctgccctttcacatccttctcctcgaaagtcaccctggactttggttggattgcagcatcctgcatcctcagaggctcaccaaggcattctgtattcaacagagtatcagtcagcctgctctaacaagagaccaaatacagtgacttcaacatgatagaattttatttttctctcccacgctagtctggctgttacgatggtttatgatgttggggctcaggatccttctatcttccttttctctatccctaaaatgatgcctttgattgtgaggctcaccatggccccgctttgtccacatgccctccagccagaagaaggaagagtggaggtagaagcacacccatgcccatggtggacgcaactcagaagctgcacaggacttttccactcacttcccattggctggagtattgtcacatggctactgcaagctacaagggagactgggaaatgtagtttttattttgagtccagaggacatttggaattggacttccaaaggactcccaactgtgagctcatccctgagacttttgacattgttgggaatgccaccagcaggccatgttttgtctcagtgcccatctactgagggccagggtgtgcccctggccattctggttgtgggcttcctggaagaggtgatcactctcacactaagactgaggaaataaaaaaggtttggtgttttcctagggagagagcatgccaggcagtggagttgcctaagcagacatccttgtgccagatttggcccctgaaagaagagatgccctcattcccaccaccaccccccctacccccagggactgggtactaccttactggcccttacaagagtggagggcagacacagatgttgtcagcatccttattcctgctccagatgcatctctgttcatgactgtgtgagctcctgtccttttcctggagaccctgtgtcgggctgttaaagagaatgagttaccaagaaggaatgacgtgcccctgcgaatcagggaccaacaggagagagctcttgagtgggctagtgactccccctgcagcctggtggagatggtgtgaggagcgaagagccctctgctctaggatttgggttgaaaaacagagagagaagtggggagttgccacaggagctaacacgctgggaggcagttgggggcgggtgaactttgtgtagccgaggccgcaccctccctcattccaggctcattcattttcatgctccattgccagactcttgctgggagcccgtccagaatgtcctcccaataaaactccatcctatgacgc

SEQ ID NO: 10486 - DNA, 707 bp, Homo sapiens
gcggcggcccgggccgcgcggggacgcccgggtacccgccagagccccgacgccgcgccggacccacccaccgatggatagaccattgggagggcggagcccgctgctctcacgagcctgctggggcccgagtgccctccttccttgggatgggtgagcgtgggaggagatgggacaggaactctaggagcgcaggcccgggactgagccgcctcctaccactccggagatccgggtcaggagaatggaccgctttccagagcccagaagccacgtgcagagacctagcctgtcccccaaagcagtgtccaacaccttgggcccggccttgcatctcccggcgctgggccttggggggcggtcccttggctctgtccacacccccagaatcaggtccccgcccagctccgaggacggcggcgtctccatccaggctagttccccatgccctcagccatgggggaatctgtcccgggccgctgaggggctcccctgcccctcctgggagcttacctgggacccacctcggcgacggagaccgcagcagctggagaggaaggggtgaggcgtgggatcgccaggagtagggaggacatcgacgatgtgcccgtagcagtcgcccctccctcctcgcgcacggggtactgaggcggaaggtttgaaggttacggctcagggctgccccattaaagtcagtgttgtgttct

SEQ ID NO: 10487 - DNA, 831 bp, Homo sapiens
gtcactggacctagctgtgcccccaacctagattggcagcaccaccccagggcagaggactctctgggcacccgctgtgcatggagccagagtgcagagccccagatcctttagtaatgcttcccctggtcctgcaacaggcccggtcacctcggccgggcccggggctgaggtcagcctcactgcctgcttattgcctctttctcagaatcctctttcctccccatttggccctgggctcaggggaccaggtggggcgggtggggagctgtccggtgctaccacaccgtgccctcagtggactaaccacagcagcagccagggatgggccctggaggttcccggccggagagtgcctctcccctctgccatccacgtcaggtctttggtggggggaccccaaagccattctgggaagggctccagaagaaggtccagcctaggccccctgcaaggctggcagcccccacccccaccccccaggccgccttgagaagcacagtttaactcactgcgggctcctgagcctgcttctgcctgctttccacctccccagtccctttctctggccctgtccatgtgactttggcccttggttttctttccagattggaggtttccaagaggccccccaccgtggaagtaaccaagggcgcttccttgtgggcagctgcaggccccatgcctctcctccctctctggcagggccccatcctgggcagaggggcctggggctgggcccagagtccagccgtccagctgctcctttcccagtttgatttcaataaatctgtccactccccttttgtgggggtgaacgttttaacagcc

SEQ ID NO: 10488 - DNA, 980 bp, Homo sapiens
cttaccgcaaggatcagactgttgctggacacgacgtctgtgtggagccaggaggaacacatgtggtgtctgtatggctgctctctacctaggacaccagctgccacttcttttgcctcatgaagaactcttgggccagccaaactgggaacctaggtgtctgggtcttgtgacaaccaaagcactttgacactaccccctgccgagagaagaggagtggatgagcctgcgggtttgcctcaagaaacttcatgagggtctcttactaactccattacactctctctcctggagcctcatctccatgtcaagcaggagggtaaagaagggaactaagagcaggtctttcaagccacacccccacctgcggatggatgggtttctctgtaggccatgcaggcctttgtcgcagcaaaccttcccagcagcccttgagccaagtaaaaccagcacaaccagccaccagtggttggtgaggcagtgcccacaaggctcatgttgtatgcctttgataaggccatcttggctttgagtagcagtgttcctcgtcacccatttccccctcaggattacaacacctgctatcaaatcatctaagctgaaaacatgagatgcgcttggaaaggcctagtcagaagccatttcctcttatcatttccctctcctatgcaccagtaaggcccgtccagagccccagcagggagtgggccctgagtccacactgtccctgagtgatccaggaggctgcccacatccccacatgtgcactgtggttccagtgtagctgctgtgagcccactgccactgcctcagaagggagccactgtgaacctctcgagtggctccaaagagcagtggctttttgagaatggcccatacttctggcccggctggatgaagggaatgccgaccctttggcctctccccctccttccatctcttctctctcttgccctatctctctttctacttcagaaaaa

SEQ ID NO: 10489 - DNA, 892 bp, Homo sapiens
ggaccccagagctaggccgcggagtgtgctgggcttgggggtaagggggaccagagaggcgggctggtgttctaagagcccccgtgcaaatcggagacccggaaactgatcagggcagctgctctgtgacatccctgaggaactgggcagagcttgaggctggagcccttgaaaggtgaaaagtagtggggccccctgctggactcaggtgcccagaactcttttcttagaagggagaggctgcgggctccgtggggccttttgctcccaatccctatttgagaaacactgccccatcctccatgccctgaaccctgagtagacagccccaagcatggccaggaaggcctgcccctcctcttctgggaaataggcacagaagctttggccggctaccccagtgcctcccttagggaaaaagtcagtgggaccagggctcctcagtggacaaatttctccttcttactgccaactggaggaacccagtggacctaccaccacccacaagctttggtggcagattgtatagccgtcatacaagcctgctgtatttatccatgggcccgctgtccgccacccaggctcctccgtgcacaccccatcacctggcccctaccccttattacttcccctcaagggccttactgtttacactctgtacatagctcatcgtgcctgtgcccatcacttcttgctgggattccaagccaccaattggagagctttatttgtcattttgagacatatttattggtaagagtacttctattttgtccaagctgtgcaaactgtccctctttagcccataacccattaaaaaaaaaatactttttcccctaaagtctgtcaagaactaaaggcccgcaacagaatagattgggtctacatttgc

SEQ ID NO: 10490 - DNA, 1109 bp, Homo sapiens
ataatcctcaactccagtggcagctccatgtgccatttctcttccgctctggcctcggctcttcctgtgcctacctggggcttggctttcacctaggtgtctgcatggaagggagagcgacctggaggaccatcgccaatccatcaatagcctcccggttgagatgacttcagctctgatttggaagagctatgatattgtttataggagtgaattaatatgtgtaaaggttacaaagtaaacagttaaattaaattaattgtgctggagcaggtcaaacaggcttctgagagatgaacatacacatctctattaactccacattcagtgagtgtgggtaacttgaaattggctgggtcaccatttacatcatagaaattggcaaatagtacaaattagggctccctcacccctactcgggcatagagctggtacactagcacacctctggttatacatgcatgcgtgtgccaccagaacaaaacacctaacagcaggcacgttgcctctgttgcccaccattacagctcccgcacggagcagacagactcatggcaggaattgaatgcatgtttgtcgagtggaagcatgaacaaatccacaaaatgcccaagatgaggcaaagaaggacattggctcaaatgttaaacataagttaggagctgagataatgcccagaggaaaaatgttctgtaattctaagtaaaacccatctctaaggcaggatgctgcttatgagggctccacagacagatgggggaggcctgggtcctgcccttggaaagagtctgacagctcgacttctggaaacagccatctgcacaggtcaacatcttcttagctgacagggagcagatttgcagaccacatcacatttgaaattccagaagaaacttcttggagtctgctcttgtgcaaatgagcctagaaagcccgttaactttgggtggaggcttccactgtttggctatcccaagtgggcccaaagctaaggaaaacccaccagccctttgcttcctgcttcctctatttgtttgccccaggaaatcagaggtgatgacatgatttggcttgggcacgacaggaataaacgatatttaagagacgtc

SEQ ID NO: 10491 - DNA, 4249 bp, Homo sapiens
gccatgagaacgaggggatctgggcaccccaggaaccgccattgcccataagacccccaggaagctaggcactttctttccatggaaacatttagacacaaacctccccagctccggccaagccatcatttgctacctggagctggatgtagaagtcagcagacagctccctatccctggacccctgccctccttttttctgctcacaaggacttttgattttagttataaggaggacccaaaatgtgtgtgtgtacatgtgtgtgcacacatggtacgtgtccatgtgcctacctgatactttcacatgtaattaaattccaggcaaccagcacaagagccgtgagcttggcacatgtgctgctcgtgagcaggaaaatcagaggagccactgatctgagtggtatttaggttgaaggaaagatttctcctctcaagtgccagggagcagccacacgtctgtctgtgtttagagagggaagagggttctccaggttcaccatttgggttgtttatatgttggtagaaattctccctgtatgcctagaaggatcagtgaatgtaagagccttggaaattaacaaaataacagccacataaccttgcggcaagtctgatggaaagaaaaagataaaccatccgtggggtagatgcaataagcccacgtatttttacactggaaacgttgattgttttaaatgacaaagacatatgtgatgttctatgtggaaacctgtgaagagtggattctgcctccatctctgcctccatggctacctttaggagacagagaagatcctgtgtgtttctctgtacccagctgacagcctgtctctatggcgcttccttgagtggaaggaaatgtctcaagaaacaaagatctcgctggtgcgtacacagtgctgaccagctagtgtggccagggcctggtggcctggtggccaggaagtttcaggttgaagggaaatgtcgaggctacctgcagatatgacaggtgccttgaacgcagcccatcttcatgtcatcaaaggtcttcctgcacttgaagctggggcgatgtttgcagtcaagaccattctttccaacctctgggttcttgcaagttgccctcaccttgtgtgtggagatgcattccaagaatgaagcctcatcttgctactgagtgtggggttcagggaagctctttaggccacctggtgaaggtgcatggggaggatggagcttctcctcagctcctctgagcagccacctatgtgatctttaaatccaaccccaatgggagaaaagggcaagaacagtctgtgccctgggactcctatcaggaagcttgacaggcagctgggcatcagtgcagctgatatcgtttgaggagggagacagatgcttggacctgggtgcctggctatggagattgaccaagcaagatcaggagctcctgatagcaggcgtctttgagcctagctggggtagaggcactgcccatctcttctccaccttctctccacagaatgtttgcagagctgggcagttgaggaaaggacagcccctggttggtgcctccaaaggaaggtggacttttttggtggagacgtttctgccctgggcaccctcctgcccccgattcatacctatggcttcttgagaaggctcacagctgtggtcttaacgtagactgcagaaagatggcatgcggcccctggcatttcgccaagggttttatagcaagtctccttcctccatagggacagcagcaccagccctgtggggcatggagtggaagcccagaagggcttctgcaagctgcacagaactggggtaagaagacaaagagtagccaccgggagaggcttcctttgttacagctgggaaagaacagttctgtgaatgcaaacacctcctgagttttgcaattgagaaaatgatttggagaacttctcttctggtaatttttattttgaatgttcagggccttagttggccccagtaattctccttggaggacttgggagaagaatttccacaaagcaaactactaaccactagctcttactggacagcgatttctggcttataagagttctctttgatttgcactagcactacgatagtgttagatggggaaatactgcaacatgtccagttggccagatcactttccaagggagcgatactaaggcagactcagctttttaaagatgggaggtcaggaggtggaagtgagaggagatcccatctcacacaacacacttccacgtaatgcagaccacacttttccattttgtcctgccctcttgagaggtcatttctcacgtcctaagaacctgatcagaaattttggaagggttctttgaaatagcagcagttgaaacagagacactttgccacagtgtggagcagattttctcactggtatcacatggtcttgcagttttgaactcttcgaccgatttgtgggagtttatgtaattgcgtgcaatgaacctgaaattgtgtaaaggacaaaagaccagtttatagggttgggttttttttccaacttgtgaaaagcagtttagctgcatctgtctccccaccacccccaccccgggaggggcttatgttacaaggtgatcaagtgaaggaaaaacctgagcctatctggctgggatggtggaattaagcacaaggtcacattctctgtgatcacatgagagggaaggtgatgacttaaatggcagggggtggggattatcttggggagaggctgaaaagcacaaaagatagtcttccctgtacgtattggtgaagaacgtgcacaaggctggatggacttcaacttggagttgagttgaggcaagaggatttctggatattagtcacccatctgcaagaaaaatgctgaggcctcgggtcaagattttgatctgagacatgctgatgcttcaaggagaaatattttcacaatcctctcttccctcaccagaagagaacagtactctctcctagaaacctctaggtaaacacattttatcctaatatcggtagcatataatgccccccccaaaatatctgttttccatgcaaaaaagtctcaacaagaagtctgtggagttgagtggttacttcaaagtgtcaggagagtgaagaaattggccacagaagagcaagaagctctcttaagaaaagggaattctctttaaagaaaccaccaccaacaacaaaacaaccaaaaaccatgttttatgtcaaagctctgtagcacagagaatgtggtgtcacagatacatcgccgagagaggtttctttctttcttttttttttttttgagacagagtctggttctgtttcccaggctggagtgcagtggtgggatctcagctcactgcaacatccgcctctggggttcaagtgattctcctgtctcagcctcccaagtagctggaattacagggacccgccaccacgcccggctaatttttttgtgtggttttagtagaggtggggtttcaccatcttggccaggctggtcttgaactcctgacctcgtgatccacccgcctaggcctcccaaagtgttgggattacaggcgtgagccactgtgcccagccaaaagagaaatttctacatgaacaaggcaatttcagtgtcttacagcggccaaaccatgacgtgaagaatgagataggagacaggagatcaccataagcgtccctgatatagcagcacacattttcacgtttccacttaaatcgttttgcacaaagtcttgcttcgctcagatgagatgagatatgatttcctagagatgtaaaaataagaatgaatgtggcgcccccttcttccagatgtaatagaaagctctgccctatcacaaggggggtgttgaagcgccccttgtgttttaactgtatttaactgagcacaagatgcacaagctgtggtgggaaaccctcagtttacctttggagtcttccctgcagatcgcagacctgtttccaggctgatgtttctggtgtgtaattgctagcgtttctgaagggttttcccaattgttttagccttgtgaagtattcttaattataacttgcctttcagcgatggtacatgacttgattcaacgtttggttctgaacttacacactgatgcgtttactcatctaacataatctgacagggcctcagcaagggagccatacatttttgtaacattttgatatgttttaatgcatctgacttagatcttactgaaataaagcacttttcaaagag

SEQ ID NO: 10492 - DNA, 4616 bp, Homo sapiens
cctttgctgtgccctgtggcctggccgcagtgaggcatgtatctgtagttccttgctgagtaacaagaagtaaaatacatgtttgtatatctacatttacattctgcgccccagagctaagacagactgcgaatcacttttctgctgtgagggtgatggtgcctgatgcggtgtctcgcctatctccttatttaagcccttaactccttgccctttgagagtgtccattgctggccatggtcactaaatttgaagttccagtcctccctttggagtggacatttaaaatctgcagccattccttgcttcagttcccttccaccacccagggctggctttcctataagccacctccagggtccaggggctttctctctctctccgaagcccctggacctgtttccttgtcatttgaccctcgtctgtgcccgcggagacctcctctgaccaaggggcactagtatgccttgcgctatcatgactgactggcccagtatgattctgttgtcgctgatctcccggaggaggaggctgttgacctgaaaacagtggcgtggctcccctgtgcccagatctggccatgggtgaggcctgcacagatgttgaatgaacatctgtttggggcattggagggaaaaggaaaggaccctgaagccaatatctgattctcggctgcaccttctcttggccaccctggccctgaccgggccagcacgtgcacactggcctcttttcatttcactagtggccgagacaccctctctggcatttatcactgttggccggtgtgatgagtatagagtgccacccaaggcaccagtcacacaagctgatgggcgtcttggctctgccgtcatgtggatgttattgtcgcgcgcgtctataattacaaggttttattcctatttaatgttattgactatagcagattttggaaatcagtgttttccatgtgaccctctttccttgcatccctattccttgtcccccacccactcttccccccatcaagaaaagaaccagcatttgtaaagctgtggacaccatcagggaagcttgttgtaacggcttttgaaggccagtaaccattgttgtggttgtgttttgtattgcttgataccatgaaagtgtaaatactgtaatgcctaatctatttatcaaaactgactactggaccggagcccagaaaccatgggtcaagttacacgtgaatttgttttgtgaagaagggaagctggggcaggtaacacgcagagccgccacgtggaacggtctgtccgccggtctgtcccgcttgccgggcttctgttgcaagtcttggcttaaggagacttcctgtgggttgccatgtcgcacgtccgttagatcttgattttacaggtgagggtggttgccaaaggtgataagaaaagcagccaacaggctccctctcacttaagagagttctaattaataacactaaattcttcctgagaaatgactcctcttggtttggtttgaagtttttcagtgaaggaaaaggcctgagataggaagcagtgccctcgcttcatgaggtggcacatcttcggtggccgttggcctggtcgagctttggtcagctgcgtgggtgcctgtctcctgtctccagcggcagggcatggttcttggcagcctggtgtccacacggtgcattcctgtccccctcggccccaggctggctcagctctccagtgctgcggcgctgtctttgcagcattgccatgtcaccgtagcccccttcactcttggaagtttggggcttcaaggtttattctggcaagaacacctcggagccactgcattgttttgccaaaaacttactgcagattaagtaaagaacttagatgctaaattacatctaattttgtatgtttttttaaatgtgtctttgatgcatactttagaagcacactggctcgcggtttccatccctcttgccttgggacactcttgaggctggcagccctcctgcaatgagttgctctcagttccttctgtttggattttgctcaacatctccagtttctctgctctgaaaaatggggaaaactgctaaacatcccagagatttgcaatcttctagctctccaggtgagcagaaagaccaaatatccaaataaaagcctgaaagccattggtgatccaggggcaccttctcttcagcttgactgggcgtcttccgctgcataacactcaaggtgtctgctctagtcatccagaaacccactcccttctgaagcccctccttgggccgggttgtatcaggaggattcaaccccgctaacatgtggggtgccctctgtaggccttcacacagggaaggaagccctaccctttcaactcctgttggagtgagagtttcctgttctgattccactgtggccaacccaataattctgtccgaggaggggtaagggaataggaggtggggagcaaagagggcagcctgactagatgcccctgctgaatctggtactttctgcacagccttgagtgattggagtcccctaatgactaataaacttgaacatgtaacacacacacacacacacacacacaccattttaggaagtggttctcctactggaaaatatgctacagaatgaaagtttgtaattgaaagaaaaagaatgtattcatctgcttcttgggtttaagcacacacctgaaggggagatattgggggacacggtggccactcgcggtctgtgtcatgacacttcccattcacatcattggcctgcgttgctggggctttgaaccaccaccccgtactttgttttgcctgtagagtgttgtaaaatattttggatgtgaatgtccttgcaggccggttagtctccagtttccacagagaccacctacccaccaccttcccaggtcacctgcctggtccctgaaagaaagcatttgtgtgggcaatcccaacatgaaatgtagacagcgtgaatacggacaggaggtgatgccatattcacagtgggggatggagggcccccacccctgcttcacagaataatgggaagtgactctagtctttgtaagcaattttcattctcattaggaagttaaatgtagattcacagatacatttactttcagaatcctcaagaggatttcaaatgctaacttttagtttcttgggattgatcaaggcaagagaagtggctttaaccatgccagccagaatgaagcatcatgggtcctgatggtttcccgttttcatggtaacaaattcgcacagaggttttgctttatgctgtagaataccgactttcatgatgacaacttggtttatgcatgaatattgcagtatttccatatagcaaaataacatttctacccaggataatagtcacagttttccagggagggaatgatataattttcatgacaatgtcatgtgatgatagaatttctccattgatgaatctctagtatgtgtgtatactttatttacccatacgtatattttatgaccatgagctaagttgttatttctttcattcatatccctgctgaaatattggtactagcaacttaaagttggcaagtctcatcttcagtaatacggatgccatgggagtggccaggccagattgaaggtgaatatggagcagtagcagaagcctcattccagaacccatctggccagagaagcagcagcatcctgggggatggccgtgcatggggtgtacactcgctataggcataggcccggcatggctgtcgctggacgccagctgtgcacacccagccacacctgctgcacgccgcgttagtgtgcggctccgggcctgagcattcgcaaagctcgcttctccagggagcctcctcttggctttggaaaagagcccagggacttaacgtgctgcctgttgtactctgtcccctcatgactttttagacacagggactaggacatcgaccaccctctgcccctcctgcagtcagaacccgagtagtgcaagaacggccacccggttttgccagcgttcagcgtctgcccatggacccataaggcacattagcgttgggggtctcttttcagcagcctcacagacattcccgtcctttctggttggtgttgactgtgtttcagcatcactctaccctcccatgtccttagcattgctgtgcgtgtttccaggcacttaggacacccttccccacgttgccatcttactgacagttcaaatgactctccttttttgttcgttagtaacaatcttcatttgacaccttaatacatttctgactgttcttaaaacagtggggatgcctatattttccttgagtttttgtgactgactttggctatatatacctttctggggttttgtttgttttttatttttattttgattaccgagggtatttggggtggggttgttttttgagatgtgtaattcttttatggagtttttaaaaagaattttcatattgtttttctaacatggcttcattaaacgtttaagtattttaaaaatatgtaatatttggaccagatgttgtgaataatagtagagataaagctattttattctgtatttttaaaactgttccgtacaaataaaagctctcctggacacagt

SEQ ID NO: 10493 - DNA, 948 bp, Homo sapiens
cacccaccccatagctgaggaggagtcacagtggaactgtcccagctttaagatatctagcagaaactatagctgaggactaaggaattctgcagcttgcagatgtttaagaaaataatggccagattttttgggtccttcccaaagatgttaagtgaacctacagttagctaattaggacaagctctatttttcatccctgggccctgacaagtttttccacaggaatatgtatcatggaagaatagaggttattctgtaatggaaaagtgttgcctgccaccaccctctgtagagctgagcatttcttttaaatagtcttcattgccaatttgttcttgtagcaaatggaacaatgtggtatggctaatttcttattattaagtaatttattttaaaaatatctgagtatattatcctgtacacttatccctaccttcatgttccagtggaagaccttagtaaaatcaaagatcagtgagttcatctgtaatattttttttacttgctttcttactgacagcaaccaggaatttttttatcctgcagagcaagttttcaaaatgtaaatacttcctctgtttaacagtccttggaccattctgatccagttcaccagtaggttggacagcatataatttgcatcattttgtcccttgtaaatcaagatgttctgcagattattcctttaacggccggacttttggctgtttcctaatgaaacatgtagtggttattatttagagtttatagccgtattgctagcaccttgtagtatgtcatcattctgctcatgattccaaggatcagcctggatgcctagaggactagatcaccttagtttgattctattttttagcttgcaaaaagtgacttatattccaaagaaattaaaatgttgaaatccaaatcctagaaataaaatgagttaacttcaaacatttcaga

SEQ ID NO: 10494 - DNA, 329 bp, Homo sapiens
gcattcttaaaattcaagaaaataaaactaagctctttgagaactgcttctaagatgccagcatatactgaagtcttttctgtcaccaaatttgtacctctaagtacatatgtagatattgttttctgtaaataacctatttttttctctattctctgcaatttgtttaaagaataaagtccaaagtcagatctggtctagttaacctagaagtatttttgtctcttagaaatacttgtgatttttataatacaaaagggtcttgactctaaatgcagttttaagaattgtttttgaatttaaataaagttacttgaatttcaaacatc

SEQ ID NO: 10495 - DNA, 3227 bp, Homo sapiens
tttttattgcacagaggtcattttgggggcgtgcaccgctgttctgggtattcatttttcatcactgagcattgttgatctatgccttttgggcttctcagttcaatgaagcaataatgaagtatttaactctttcactacagttcttgcaagtatgctatttaaattacttggccaggtataattgccagtcagtctctttatagtgagaaaatttattggttagtaatataaatattttaaactaaatatataaatctataatgttaaacatatgttcattaaaagcatagcactttgaaattaactatataaatagctcatatttacacttacagcttttcatttgatcaggtctgaaatctttagcacttaaggaaaatgactatgcataattatacctgaccatgaaaaaaataagtacctcaaatgcatgcatttgcactggtgattccaactgcacaaatctttgtgccatcttgtatataggtattttttacatgggttgacatgcacacaacaccattttcattcagtatgaaccttgaggctgctgccatttttccacttaaccaaaccagcctgaaggtgaacctcgaaacttgtttcataaatctttcaaaagttgttttacatcaatgttaaaatttcaaaatgctgcagggtaatttaatgtataaaatattagtaagaaaaagtatgtattgcatacttagtagaatagatcacaacatacaaattcaattcagtgcatgctttaggtgttaagcatgagattgtacatgtttactgttaggtccttgcatctgtggtgctaggtgagtatgagaagatgtcaaggactggacgtattttgttgcctaaaaaaaaaaggctgtttgtaggcgttttaaatatgcttattttgtgtgtctctcactacctattacacactgttgctttgtgggtttgttttgtatgtgcgtgtgttatacagtagttaaatttccatgcagaaaaataaatgtcctgaattttcatattagtattctttattgtatatcatgcatgtaatttatttagaaatgtaggtcttactaaatgtatatgcatgtatttcagattatactaggatttcttggattagaagcagattgtgttaactgtaacttaaagaatgaatgttaaataaaatgatacagatttattttcttcattacaaaatgaaatttcaagaaggtgttacttttgtagaatggttttataatatgacaagaaattttaatatagtgtctaccctaaagggatggcttatttgcatctaccttttactgcatgtttttcacaaggcagtttattcatatattgacatattttggtagtagctgagaacctaagacttgaaattatacattgtgtagtattttttaagctaagcaatgcaattttggtcagatcttatttgtgtgaagataggctctgaaatcctatggtattgcgtttgtaacgttgatattaatgcaaaatagtttaggaaatggagtcttctgcaagggttctgtatacttttcccacattgtatgagattttccaaaattttggtgtgaattgggcacttttggaaaactcctgaaaaagaattagtttccttcatctgcagacctttgtccaatacggttaccatttctttatagtaactcgattagccatatatgtttgtttctagtcctgctcctttgctcctctcctatgccttcccagtgctggctccattttgaagactcaaggacagaggggaagcagatcataaagagaaaaaggagacagaagaaaggatgaaggaaggaggtcatggggagtgtggcttctgagcagtttagttgctggggagagcagacagtcactgcctacaatacagacagaaccttcctgctcactttctgtcctatctcttcctgaccttatgaaccagtgttagtagatgattaaaacatgacaagcaatggctccttattttcacaggactaagtccgggccttcgtatcactagctgttgccttttacaccctgcttcagccaccctgtccctgtcattggccctggacttcctctctgtgcccgtgtgtcctctgcctgggagccctctcctcccatagtcactttctctctgccaaactcatttcttcttgtgcccaagacctctctcctgagcccttgtggaaacttcaggaaggatgaatccgtctttgtgctccacggctcgtaccttgatcaggctgtgcatcacagtaattctgttctaggtaggcagagttgatctttgtctcatctgccaggctgcaggctcttcaagggcagggaccttgtcatagtcatttttattttcacagtgcttggaacatggtggaaaatgaatgttggaattattggagtaatataatttgtatcaaatgtccttttgaattaagagatttagttatgtttactaagaatgtaaactttgaattggtttgcattttaacaattaggatggtttattgatgtgaattttgaaatgtagaggtataatgttaaattattttatactttatggaaatcaagtgaaatgtttgaaaaaatgccgccattatcctctggtattttctactctctggaattatgtgctgtaaatgatcggctgtaaatgtgaggcacaccacccacccctgtgtggaaagtgttgtggcgcttcctgccacccacccacctctctgccgttgctccttgtgacacttgtctgtcgtctcccatccaaactccaagcttacagctacctcagtactgctttgcttgtctgaaacacctcctttgccttccttcagtgtcccgctcaggtgcagcctcctccctaaagctcatctcagcttttgatctgaatgatgatggaaacatgcagacagcctctcagtcttactatttaatgttgtagctgggaaaaaacccagagaggttaactgatatactgggttgggactaggatgtgggttttgtgactctgaatcccatgttctcaaactacgctgccttccgaagtctggcatttgttagctcatgcttccttgtagtccagcttcttatgtgcctgttatattctccagtaagattgtaagccccttaagggcagggacgtctttgcatctctagcactgctatagtgttctatccttagttatgaactagataaataaatggtggtggcaacaatccta

SEQ ID NO: 10496 - DNA, 695 bp, Homo sapiens
cccttttgagaattgctctgaattttgttctcaggcattatacagttagtaattaaactttaaatgccattactacttgttttttcatatcccaagaataagaacatgtctatgtacccgtttctaggaaggaggagtatatgccttttgtctatttctgacacagatgcatttggtctgtcaaaactgcaaccatggggtatgtagtatgaccaactgcatttaacaaaactcctctaagtacttctaaatattctgtgcaaatatcttgagaacttcaacatcctaaaaatgtgtttctacaagactttatattttaagctaagtggaataatacaacgtaactaaaacatggcgggtaccgaaaggagggcaattcatggaagaaatttcctctgttcattccgttctcttcaacctaagcaatatggatgtgtgagtgtgtgatttattatggtaccaaaaatgtccaccttctttcctgcagcggaataagcttttttgaaatgctgaggttttattttaatagttgacaacctgggaaagttctgagtatttattttactgctcttttttgtgcatagaaaggtttagtagggtacttttttgcattaatttgccaatactcttattctttgttctaaataaagtgactagaatttttgtgtactattcaattaaaggaaacaaatgtc

SEQ ID NO: 10497 - DNA, 243 bp, Homo sapiens
cccagcttctgggataacgcgtctcatcgaactggatctgagcgcaaaaaggaagacacagacggtcaaaaacgaccccatccgctcctagggtttctaattcccgtgaagccagaatgccttgagcacacatggaacttgccacactgagtgtctgggtccaaggaactgctgccctcccttccttctacttaactctgttcccagaaacctgatggtcaatgccagatcgctccccactgc

SEQ ID NO: 10498 - DNA, 2327 bp, Homo sapiens
aacaagcacgcgtgctcggctcacaccaacaaggcaagccaaaggcgcccctccccagagggatccctaacgtgcccagcatgtagattctggactaacagacaacatacattcaccgctggtcacccagatcctcattcaaacccactgctggcacatccctttccttactttgccctgtgctaccagccacggaaggagcctctcttgttttttctataaaatgggtaggcaggagaaaagcaggtgccctaagattgctctaaggcccagcatgtggttacagttctctgacttgcagaacctgccaggtgtatggctacaagttatcctcgtgctgatctgtctcattactaagtcaatggagaagacagaaaggtaaaaatcacgtgtagcaagaacaactcttatttcacaaactcaggtatgaaacgaaacgcctgtccttcatggaactgcttttagctcctgtcttttcaaaatggcagagggagttcctacacacactttttccctggaggccaaggtctaggggtagaaaggggaggggtggggctaccaggtagcagttgacaacccaaggtcagaggagtggccctcagtgtcatctgtccacagtgatacctgccaagatgaccactgacccacatctggtcttagtcattggtctcctcagatttctggggccacctgcaagccccattccattcctacagatctctcagccacctgtaagtcctttgtgaagatgtgggtgacacagggggacaggaaaacccatttctcaacccagatccatgtctccactgcttctactctgggttgggattcaggaagacaggcacagtcctctctgttcatagaaacacctgccagtgtcaaggattccagtcaggtgtctatcccaactggtcagggagagaagggcagacccattctcaaagaccaccatgtccaaggtctgacagctccccactggctgcccccacaggggctttaggctggtctgggtcatggggaagcgtccctcttatcgctggtctgtgttctcctggatttggtatctatgttggtacgactcctggccttttatctaaaggactttggcttttgtaaatcacaagccaataatagacttttttctccccctctgttttttgctgtgtcatctctgccttgagactgccttgagacagtgcttgccttgagagagtgagccaattaacagctgcctgaattgtcattttccattttggtttgttagaggtgggaggggtgggttttgagaaggtcaaaagcaataccagaagtaaagggaaatatcagacaatattttattattttttcatagatgttctgccacacaaagaacttggggtgtaaggataaggcaaaagctccaatcccatttttcagttctcctaggatgcacccctcagggagcctggccagagttccgaggcccgtgagcgtcagctgttgctttattttccatcaaagccctctgagaagtgagacctcagcaattccgggagccacatagagacagacttggcaagggaccccctggttctgagccagtagctgccatctggaaattcctcttttagcctctccttagaggtgaatgtgaatgaagcctcccaggcacccgctgaatttctgaggccttgcttaaagctcagaagtggtttaggcatttggaaaatctggttcacatcataaagaacttgatttgaaatgttttctatagaaacaagtgctaagtgtaccgtatatacttgatgttggtcatttctcagtcctatttctcagttctattattttagaacctagtcagttctttaagattataactggtcctacattaaaataatgcttctcgatgtcagattttacctgtttgctgctgagaacatctctgcctaatttaccaaagccagaccttcagttcaacatgcttccttagcttttcatagttgtctgacatttccatgaaaacaaaggaaccaactttgttttaaccaaactttgtttggttacagttttcaggggagcgtttcttccatgacacacagcaacatcccaaagaaataaacaagtgtgacaaaaaaaaaaaaaaacaaacctaaatgctactgttccaaagagcaacttgatggttttttttaatactgagtgcaaaaggtcacccaaattcctatgatgaaattttaaattaatgggcacctttcaacatcatttgcttccttatctacagttgattcagaaatctgcattttttattcttttatatgacttttaagtaaaagatttatatggatttg

SEQ ID NO: 10499 - DNA, 609 bp, Homo sapiens
cagtgcacaatattttcccatctgtattattttttttcagcatgtattacttgacaaagagacactgtgcagagggtgaccacagtctgtaattccccacttcaatacaaagggtgtcgttcttttccaacaaaatagcaatcccttttatttcattgcttttgacttttcaatgggtgtcctaggaaccttttagaaagaaatggactttcatcctggaaatatattaactgttaaaaagaaaacattgaaaatgtgtttagacaacgtcatcccctggcaggctaaagtgctgtatcctttagtaaaattggaggtagcaaacactaaggtgaaaagataatgatctcattgtttattaacctgtattctgtttacatgtctttaaaacagtggttcttaaattgtaagctcaggttcaaagtgttggtaatgcctgattcacaactttgagaaggtagcactggagagaattggaatgggtggcggtaattggtgatacttctttgaatgtagatttccaatcacatctttagtgtctgaatatatccaaatgttttaggatgtatgttacttcttagagagaaataaagcatttttgggaagaat

SEQ ID NO: 10500 - DNA, 1182 bp, Homo sapiens
atttaatgatgcgttttcaagaatacacaccaaaacaatatgtcagcttccctttggcctgcagtttgtaccaaatccttaatttttcctgaatgagcaagcttctcttaaaagatgctctctagtcatttggtctcatggcagtaagcctcatgtatactaaggagagtcttccaggtgtgacaatcaggatatagaaaaacaaacgtagtgttgggatctgtttggagactgggatgggaacaagttcatttacttaggggtcagagagtctcgaccagaggaggccattcccagtcctaatcagcaccttccagagacaaggctgcaggccctgtgaaatgaaagccaagcaggagccttggctcctgagcatccccaaagtgtaacgtagaagccttgcatccttttcttgtgtaaagtatttatttttgtcaaattgcaggaaacatcaggcaccacagtgcatgaaaaatctttcacagctagaaattgaaagggccttgggtatagagagcagctcagaagtcatcccagccctctgaatctcctgtgctatgttttatttcttacctttaatttttccagcatttccaccatgggcattcaggctctccacactcttcactattatctcttggtcagaggactccaataacagccaggtttacatgaactgtgtttgttcattctgacctaaggggtttagataatcagtaaccataacccctgaagctgtgactgccaaacatctcaaatgaaatgttgtggccatcagagactcaaaaggaagtaaggattttacaagacagattaaaaaaaaattgttttgtccaaaatatagttgttgttgatttttttttaagttttctaagcaatatttttcaagccagaagtcctctaagtcttgccagtacaaggtagtcttgtgaagaaaagttgaatactgttttgttttcatctcaaggggttccctgggtcttgaactactttaataataactaaaaaaccacttctgattttccttcagtgatgtgcttttggtgaaagaattaatgaactccagtacctgaaagtgaaagatttgattttgtttccatcttctgtaatcttccaaagaattatatctttgtaaatctctcaatactcaatctactgtaagtacccagggaggctaatttc

SEQ ID NO: 10501 - DNA, 2072 bp, Homo sapiens
gcagaggattcgtgtaggtggcaaagctagatgaggacatgagaataattcaggagaacaaaaggaaacacagaacatgcaaaaggcctgtgcattctagaccagccaattggtgggacagcgtgatgaccggcagggttcaacagaccagggcatcttcttgtgtcttaaacaggcatctctccactgacagccggtgtggtcacttggagcacggctttaataagtcattattatatttttcagcccttcatccagcaaatcagaaggactcagtacaaactccgttatgatatatcctagccacatgcagggtaacatgtaggattttctatattgaaagaatacttttctggcaaaaaaaaaaaaaaaagaaagaaaggaaaacaaaaagcacttttttcttaatggtagcagtataatgtattttgcaacgaatttgtaatttttctgtacgatagttttgataatttatagtactttgatgtcatgtagccattgtatcagttgaagtaatacttgtttactagaggagtttgaacaaagcctttcctacttttttatccctttaagagaaccaatgattctttaggaactttgaatactgaatgactctcaatcaccgtcagctttagtaaaatctctttcttatcctaacaagtgtcttatttggtggaagaagaattaagagtgatggtgatggtgtgcacgtttcattaatccaaccaaaaataatgaaataaaatttgagccacagtataccactccttgggataaagttaaatatttttaaagatcacattttccatgaacgcctctagtagcaaaccattcttttgcacaccacaatgtttccctcagtgccctttctcaaatgggtacaatgttcccttgtggccaaatttccctcccagggagcaatttcagtgctaggatcattggattcagttcccaaaatagaatgtttcagtgagaccatgagaattccaggctcacaaagggagaggagagaacagggcaagacgtttggtttcatttgtcaccatttttaaaactctgtatgctagcacaccaaactcttgtctatatttacctttgtaccacagtattaatcgctattgttcatgtatcgtgctggaagtctgaactgactctagaggatgaattagcaagagggtattttaccaggtatgatctgacttcagttgtgcccatgttataatgtgtttccgacataggagagtcgtgctgctgtctagatcttcttgaatgttgataaaaatgaatgactactacaatacattttgtgttgcttgttggatgaatttgcatgttaactgtaggccaatatagatttgcctttaaaactctggaagagctacatagtcatcattagtttctattaattatgcatcagacaaaagccatttgttaccaaactgggaaaacagaggcttttcttaactatttcacatactgtaacaaatatgaatttaaatttgtgatagcgctctggttgctctaagcataattaagaatttttgtaattaataggttgctaattatttatcactgctaaaaaggaaaaaaggcataaaatgaccttctactgattagattttcagttttctttcaaactggaaatgcctccataaatatgatctatgattttgcttcataaaacagcaaatcaatgttttatgtaaaatattaaagcattaatataaatatgtgagaataaaaacaatctaaatccagaaaatggcagtcctaaatgttcatgagacagattgtattaatttaaccaggactatgtagaagtagaaagaaaagaaaaagaaaatcttttttaaaccagaataaacattaaaaactattgcagaaaatagtggattttggattccaaacattttcgacagtgtaatggaaatttttctgtaattttcttaccatcgggtattttttaaagtattcattgagtttaccaaaagttactgtagcttaaaaggttttgtgagcactaactattggcagaaactgcatttgcaaataaaaataaatgtttgcctttt

SEQ ID NO: 10502 - DNA, 62 bp, Homo sapiens
gagaatagcatgttcgtattacaagagaaacaaataaactagtctgttggcaattgagaaaa

SEQ ID NO: 10503 - DNA, 1812 bp, Homo sapiens
cagaccgcgggcactgccgccgctaggtagagtctgagggcttgtagttctttaaactgtcgtgtcatactcgagtctgaggccgttgctgacttagaatccctgtgttaatttaagttttgacaagctggcttacactggcaatggtagtttctgtggttggctgggaaatcgagtgccgcatctcacagctatgcaaaaagctagtcaacagtaccctggttgtgtgtccccttgcagccgacacggtctcggatcaggctcccaggagcctgcccagccccctggtctttgagctcccacttctgccagatgtcctaatggtgatgcagtcttagatcatagttttatttatatttattgactcttgagttgtttttgtatattggttttatgatgacgtacaagtagttctgtatttgaaagtgcctttgcagctcagaaccacagcaacgatcacaaatgactttattatttattttttttaattgtatttttgttgttgggggaggggagactttgatgtcagcagttgctggtaaaatgaagaatttaaagaaaaaaatgtcaaaagtagaactttgtatagttatgtaaataattcttttttattaatcactgtgtatatttgatttattaacttaataatcaagagccttaaaacatcattcctttttatttatatgtatgtgtttagaattgaaggtttttgatagcattgtaagcgtatggctttatttttttgaactcttctcattacttgttgcctataagccaaaattaaggtgtttgaaaatagtttattttaaaacaataggatgggcttctgtgcccagaatactgatggaatttttttgtacgacgtcagatgtttaaaacaccttctatagcatcacttaaaacacgttttaaggactgactgaggcagtttgaggattagtttagaacaggtttttttgtttgtttgttttttgtttttctgctttagacttgaaaagagacaggcaggtgatctgctgcagagcagtaagggaacaagttgagctatgacttaacatagccaaaatgtgagtggttgaatatgattaaaaatatcaaattaattgtgtgaacttggaagcacaccaatcttactttgtaaattctgatttcttttcaccattcgtacataatactgaaccacttgtagatttgatttttttttttaatctactgcatttagggagtattctaataagctagttgaatacttgaaccataaaatgtccagtaagatcactgtttagatttgccatagagtacactgcctgccttaagtgaggaaatcaaagtgctattacgaagttcaagatcaaaaaggcttataaaacagagtaatcttgttggttcaccattgagaccgtgaagatactttgtattgtcctattagtgttatatgaacatacaaatgcatctttgatgtgttgttcttggcaataaattttgaaaagtaatatttattaaatttttttgtatgaaaacatggaacagtgtggcctcttctgagcttacgtagttctaccggctttgccatgtgcttctgccaccctgctgagtctgttctggtaatcggggtataataggctctgcctgacagagggatggaggaagaactgaaaggcttttcaaccacaaaactcatctggagttctcaaagacctggggctgctgtgaagctggaactgcgggagccccatctaggggagccttgattcccttgttattcaacagcaagtgtgaatactgcttgaataaacaccactggattaatgg

SEQ ID NO: 10504 - DNA, 970 bp, Homo sapiens
cccttcaggctgagtgtgaagcgtctcagaggcatttcagaacctgagcttttgggggtttttaactgaagttggttgttttatctttcttgttttataattcctattgcaacctcgtgcactgctcgagacacaagtgctgctgtagttagcgcttagtgacacgcgggcctttggtgggtgagcgggactgtgtgtgagtgtgtgcgcgtatgtgcgcacatatgtgtatgtgtggagtatgtgtgtttgcttctccgtggatgaaatagaaactcctcattgtgtgaccaggaatggttaaatcatctttacaaaatgtgtgctttaactgtttacaagtaaaacctaaagttgcaggaaacattttttatttcgtaaagaggtaccaactgtcgctgatgtgatatgtcagaactgaagagtaaatctacttgtttaaatgacttgacagtggtagtgctccatttaataacagtaataagtaataaagtgtttttatttgttaaccagtttaagtggatcctgtggtaacttaaactgttgttctcatcccttatatggggcatttttctttaacaaagaatggtttcagtgaaacaatctagcagagaattaatgtcagaacctttttaaataatagtctgattgatacagtttgtacttatttcatcaagcttttctaagcttaaatattgcatagcttcgagctgtatggactatattatgaaagaatatgtaaagagaacatacagtaatgcacagtccttaatttgtgtataatggaaagttatttacaatataacactgtaaataagaaagcaaagtttatgggaaaattcaatattatctttgtttttgtttaaatatatttttaagataaaggcacaaaaataaaagaagcgtattactgggtatagtatgtgactcctcttctcagactaataaattatcttttgaatccttggtt

SEQ ID NO: 10505 - DNA, 551 bp, Homo sapiens
ctggatgttacttatttttgaactgaatacatcttttcctaaaatgtacaaaaataataggagggaatatttattgggaacaaagctatctttcaagaacatgaataaaatctttttctggacatagtaaaatttttctccataaataattgtacttaattgtggatgactgacaaatttttattgtatattcctacagatcagtcataattaaattacctgcattatagggtttataaaatttttatattttacaatgttcagttctaactagtggaaagttactctagctttttaaaaggctgtttacaattctgtgtaaaaatagagcagtatctactcaagtttgtgtaaatgttagggataatttgaaaaatatatatatttaatacattaatttctctggaagcaggaggcatgtttaaataactattaaaataatttatttttctagccataaaggatggaagtcaagaactttttgttgtttagtcatgttaagtatagtttatgaaattaacttgtaaataaaagtgtaaaatattttcatt

SEQ ID NO: 10506 - DNA, 1560 bp, Homo sapiens
tgctgaaggactcacagcagacttgtgttttgggttttttaaacctaagggaggtgatggtaggaaccctgttctactgcaaaacactggaaaaagagactgaaaaaaagcaatgtactgtacatttgccatataatttatatttaagaactttttattaaaagtttcaaatttcaggttactgctgcgattgatgtagtggagatgcctgaacacaattctatattttagtattttttagtaatttgtactgtattttccttgcaaatattggagttataaaccatttactttgtgttctactgagtaagatgacttgttgactgtgaaagtgaattttcttgctgtgtcgaacaatcaggactgcattcatatgagatccttgtagtataagcacaggccatttttcactttggtattaataaaatgtaaaaaaaaaaaactggctgaatggctgaatgagataaaatttaattttaaaaaatggttatgaaataatgttccaattattaaatttgtattatcccagtggtattcaataaatcaaaatgtgtgaagtaatgggcaatatcaaacttcctgcatatctccatttttgctctaggcaaattaattatccttaaaaaagttaagcatatcttctgaactgaatacatcagctggcataaaaggagcatgaagtctgttaaagccattgtcagcaaagctttgaaaataaaggacttcacaaaaacggtaatgtaaatgtgcttccaagttggggggaaaatgtgtacttaggaaaacatggaaacttagacttgtatagtgtaatgaacacaaataccaaaactgcattttggttttgcctataccatcctgatttttgaaaagtgaattataaacacaaaattgttagtgtttatgatgtttttatcataaaggatgtcagagaaactttatgcatattaaaaatgtaatgtaattataagcgattcccctcaacaatccagagaaagtagttctttaaataagagataatttaaagaaaaataaatactagacatcaaatttagatctggtttatgtcaaaggttttaacactgtacataaatgttcaatttacttttacaaagatcaagaatactgcccattactgtcacaattttccagatattatataatgaactcgtaatgtaacatttccttctagcttcctactgaattgtgagctgttacttgttgaaaaaccatatcacttttctgttgccatgattttttttttttcaacaaaaaaccaaagtgcattgtacgccctttggccagtcttgtatgtgccttgatccaacgctacatgtattcagcttttaaaactccacaaatttttcatactccttaaatatgaaaaattatggtcttattgctgaataaaacttttaaaaagtacagaataattgtgcttgctttttcaggattgtgttactatcactaagtagcaaattgcccagcacattagtcctaaacgtcccatgtatttttctaggcataaaaataaaagttggctaaaaattttaaaaaatc

SEQ ID NO: 10507 - DNA, 1149 bp, Homo sapiens
agccaggggtgatggaggaaccaccacagcagtgccttctcgtcgaagcgggctccgatgcagggcagctcccccatgcgaggatccgggtctgcctcctcctgctgaagacagacatgcagcagcgggcccgggccacctcacgtttccatacctagtgcctgagtttggggatgggatgctctgcctgctgatgtggccctgacaggcagccgttaccgttccattgcggttgaacgtggccttttcccacagtgcttccttctcactgcgcagcaaagttcgtcccctgtggcaagatagatgtggttgggccatcgtgggttccctgagcccagccagcctgggacctcccaaagtgggtggcttaccagaccacccttaaatgactttcatctggtttcctctttcaccaaaatatactcgtattttttatatttcttccatgtggctggctatattccaagaaaagcattttaaattatttcattgtatttttttctttttttccctcatttgaatcagaacttttatataaaacccaaacactgatgtttacacagaatttcatattctgcaaaagggattttttgatccaatcatgactgtagtcttccatgcttgacaaattggatgtagacaacattacttaaaacttctataaatccctacaattaggatatttatttaaccttgaatattcaagaacattctcccaaatctaaatggctactgtgcattcttgagctttttctgctaagcacaaaatgaacgcaaagctaaatgcatatttttaagtattattcacattttttgttacagaatctattggatctttggctggaaaactagaatttatagcagtttattaatgataccttaaattactcaggacttaatgtagcattgcacttctgtgtacagtaaaactgctttgttttactaaagagaaaaatgtgagtggaaaaaatatgtatgtggtatatactcaaatgtatataattctatctatagatttatatatgtatacattctgtacagtagttccatcaaaatatgtaataattcacaccaattttattaaatgtatttgctttttcaaaatttaaattgagctgctatcaatattaaatgaagttatggcatcta

SEQ ID NO: 10508 - DNA, 168 bp, Homo sapiens
aatgcccaggcttgatgggataaaatgtatttggggccactgtaggggtaatgctttgatattttagagcaaatgataaaagggtgagggttcctgtttggattagaccatagttgacccatctggcattgccaacgaagccttcattaaaatgttttctttgcttgc

SEQ ID NO: 10509 - DNA, 504 bp, Homo sapiens
gtttcctctttggaaaaagaagttactgttcaacttaccaaaatgccttacacattccttacaaataaaccaaccaacctacacagcgttatccaggcccaacttccggtagctccgagagaagccatgagagacaagtctcttagagccacagaagtagaccttccagagccccagtttgtaaatgaacctgtgtcacatttgataaacactatcctgggcgcagccccgggccaccgccgagtgacgccaaagccctggttgactctgacagccccgtgggtgtgtgggaggccgggcgctctggggtctgtctgtcagtgcaatcgtttagtgttttttcagtggggcggggcgggaagcgggtgggaccgggcagccagttctcaaaggctgtggggccgactggaggccacagcccctcacccctagacgttgccaaccagaactgacgtgtgacctcctgggtgttgatgccattaaaaccaacgttggtgcccggtg

SEQ ID NO: 10510 - DNA, 755 bp, Homo sapiens
tatgccttcactcagaagaaaagaaatgaatgtgaaagaaagccaagcatcacttgcacttaaatcattaccacggaagatatattagcttcaactttagtttaaaattatgtgaataaatattttgatttctacaaatcttaacatttaaccatgttggtttaaaaatattattgcttgctacttggacataactaatttttccttgtgcatttaatacctctgggcagaatccaaatactgggttctcccgtagttcgtctttagttactaagaaagggtgtaggacacattagccttctggaaacaagtagaagccatcacctggcccatgtccctacaaacccatgattgtcagggaggtgccagttacagcaggtgattcagctacttgaggtcggtaacagaccttccattcctcactgaaggtggggtttgtgtttttgttttgccctgttactccactggtagtcatctggtgtttgtactataacaacagcaagaaaatctcatttatctttatatactctttgcacctcctttttttagtcgagatataaatatttgaggggagagaaatatctacaggtatatatggaaacaaataatgtggtctgctttataagatggccagatctacattaggaaaagtataagccccctccctaatggccgctggggggtgagggcggtgtgttgtatgtctttgggtgtttgtttttttataaagcatataataaaataatcgtgctact

SEQ ID NO: 10511 - DNA, 484 bp, Homo sapiens
ggagaaggaaggggaggacagacgttcacactgccacgtatgtctacgtggatttttggttttcagcttcccccaccccactggctcttcttaattagaagtgaccagttcacctctgtgtccttttgaaacatcagcagtagggtccattccaagattgtcagttgccgttagtgacgtcaggccctgtaacctgtgtcctgtctggcgcagttgctcacattcaccaaagtttgttttcatgatcctgatggccaagaacaccgtgtgggatttttttttcccccaaggattttcacacacggaaggagaggtatttcttagagagatcatcattttatggtgccttgaaataaaaatacttctacttgaaatgctgtttaagcaaggcaagtgaattttgttattctgaaagagtttacagaaactattttaataaatgaaatgttcttgtgaagcttttaaaagcaaaatggaacattga

SEQ ID NO: 10512 - DNA, 3218 bp, Homo sapiens
actgtatgatttctgctattttgcatcccaatataggagtagaataatatctactatcagctgattactagacacatagaacatccagttaagttccgtaagtgcctgaaaaacaaacacaagtttcaacattcaatctaagttacaaatagcacttccattttccatagactctaaaactccccaaattgctatgaactaccacagtattttcctcatttgataagaaacataaggacagcttaactacccttctctatccgaagtgagtcagaaacagaacccaggtttcttgattcccactcctgagtaaaattaaataggttttatgtatgttgcaggtattgcacacttttcctctttgaaatcaaacttttctatttcactggggaaagaaaacatgactgaaagtccagagtgttagcttagagctcaaaatactagctgctgtttcaagctggccccagacattaaactcagactagggccttcacctctgacacttgcccctaagtccttcagacatgttgagagagactgagacaggagtcttccggagtcaggcaggaaggagaagcacagcaatatacattcataatatacgtacaactgactagatttgtttgagacaagagtggtgggatcagagccatgtggagagctcatggcctgtctaaattgttgccatgtggaaatggggcagagtgttgccaattttctgattttttgtgtggaaaaaaatctccaaattgtagtttttaaatttggggaatgcaaatatatatatatatacacacacacacacacacatacacatacaatccatatacatatggagtatgtaagttggcaataacagtatacatcaaaaaatttacaaacactgcaagacaaataaaatccaagccatccatttgtgaccacagtcataagcattcacttagccaggggcttttagataattgtctgtgaagtctgagaaaagactaagataaccaagatgaacataatgtcaaaggacgaaatcatggggacaatttggattttgttccaaaagacaagtgtttttaaaaagaacctttccatacttcgtgttctgttctatagagttaaaccttttaacttccatggccctttagatctctttcaagcacattccattttcttctgatcatacttcctcagaaaacctttttttggctgggtgtggtggctcatgcctgtaatcccagcactgtgggaggctgaggtggttgtattgcttgaggccaggtgtttgaggccagccagggcaacacagcaagaccccatctctacaaaatattaaaacattagctaggcatggtggtgcacacctgtagtcctagcttcttgggaggctgaggcaggattgcttgagcccaggagtttgagccttcagtgagctatgatcgcgccactgtactccatcctgggtgatggagcgaagaacctgtctcttaaaaaaaaaaatttttttttaattaaaaaaacccaccctttttcatttcccaacattttttggctattatgatcgctatgtgttccttcaaataatttccagtgaatccacacttgatgttgcaaagcctaagtttgctgcagaaatacaatttcctacacttcatacctaaaggagattcagagctatcgctcaaaaccaaaagtcttggtttttaaatgtgcttagacaaaaaaaatcaggaaaggtaccctaatcgttcaacagcaatcatctttggggaatgggcattttggtaggtaaagtgtggtggacgtccttattattatttttgagacagtgtcttgctctgtctcccaggctggaggtcagtggcacaaatctcagctcactctaacctgcacctcccgggttcaagtgattctcatctcagcctcccaagtagtgtgaactaaaggcatgtgccaccacgcctggctaatttttgtatttttagtagagacagggtttcaccatgttggccaggctggtctcgaactcctggcctcaagtgatccacccacctcagccgcccaaagtgttgggattacaggcatgagccaccatgcccggccccttattttactttatcctcctgattatttgaatttgttacactaagcatgtattttataatcaaaaataattaagatttaaaacaatgtatttgactactaaaaagcaaattatataaatcagttgaataataatgttgttaaagaggctgtttagcactaatttgaccaaatctatagtcaaagtttgattctacttgaattttttggaaatttgctgttgtattacttattctttgccttgttctctgtgaagtcctttcctaaaaaagaaacttatacaatttagttcacaaaactttgttgacctctttctctgtagaaatgaaaactaaatatatataattgagaaataattctgatactcttcattcctataaaagtaattaagatagacctataggattgttgaactttgctgccaaatatagtaaccagtaaccacagctagctgtaaaattgaaaattcagttcagtcaaactagccatatttcaagtgctcaacagccactggtggctattggttaccttactgaccagccaatataggctatttccgtcattatagaaagctctattggacaacattggtctaggacatatattttgtattttcccctcacccaccatccaataatgagtaatagcacaaagtaaaagtgacttaatttgaaattacttctgtttggctagtttgcttagctgatcaccaccaacatcataggtctataaatcacccaactaagatcaggggtgtttcatgggaaaatctacacaaactattcattaaaaaccatagagccatggactgtcatttctgatttctgtttgattctttgtggtcatcattgaatatacaggggcctctatacactctggggagtatctattctcaggtgagcaaaataccgaatactgaatggaaatcaactgtaagtattaggacttcatatgcaacttgaatttttggtgctgtccggagtctagagccccacaatctgttttggttacagtttatccctgtaggataaatgatccatttaactattcatcagaggtgctgtaattttaaattgtctcttgtctccttcagttaattttcagaattaaaaacataccatggg

SEQ ID NO: 10513 - DNA, 1827 bp, Homo sapiens
tctttttttcatagacaaatgttttgttatttttataaattaattgtttggaactcttgtgactcctggaagttcttatatatttcaccagtaagaaattgattggtatctttgatggctactttttaagttattttttaaatgctcttgggttagctaggggtagggattgcaagtaaaggacttttttaactgctggatttgtttttccaactgagtccaaacttttctaatgtctgtccacatcatgcattaggaaatgtaattaaggtaacattctacagttacttttcatgtcatacccataaagatagtttatgcattcatctgaaatgtgtaactttttcatgtcttcagagtcacagacttgagttcatttcccagctctgccactcatgattatataacttaattttcattttcctcattcacaaaatgggccaatagtttgacagctcattttgaagattacattataaaaggaatatacctggtgggtgcatagtaagtgctcagtaaattgtttgttctaagccacttttaaaaatggtttcattccttgtagaattgaatgcgagtggattaataatttaccttactttcttactagtgtccagttatattgttttttagaacaacacttggaaaataatttgcagtgattatatttctgaacaaggttcagaaaacattgtttactaagaatttagtctaataatttcagttaggcgctcatcagttctccagagtggttgagtttgtaataccttgtttaaagaataatggcttgttcacgtgtgtgctatgaaaaatgatgtcccatgttcacataaatttgggaaattctggactaagacttaagtctcgttaatcaaatctctttatagttaggcttctgtacattatgtatctccagtagcaatgttgccatattatttatttcccaaacttagtggacaatggagtcatttctacctagagtaccagtaaacatctcccagtgtgctatagtagaaaatgtctactcctcactgctgacatgttaaacttactcttggtttagagcatgtgtagaaacacctaaggtagctctatgctaaataatgaagagtagcacaagaatgaatgtatttgctgatacgttgctcacattctcaagcaaaaattcaactgcattaaccgatctgagagttttcctttaacctggactgtgtttctcaagcacattttttctttgttcactgcccaaggactagaactgtatttttaaggttgttttcccctaaaaggacctttagtaagcaaatttattattaaatgtgcacatcttattcacccaagggaataaaagctacttcgtaatgttgttactaaattttatcttgaaaataaataacagtgtttgaggacagaagaaactaggactgttgttgagataaaatctgttttcagcctgactgctttagtcactggacgagcatcagctactgcggtgtcagatcacttctcgagtagaggtctgcctagtgagtgagcaggagaacatcatcttaatagcctttggctcacccagagtcagggagagatgaaaataataggtcagaatgcaagtgacttaatcacagtcttcctagaattatctgtttatgttgcatgaatgcataagaaaaaaattctgtcatgttcccaaggtagaattgtaataagcatgtgccagtgtgaaagctggaaggaaaaaagctattctctaacaggagaacataaagattcatttctctcccaccctcaactccaccaaagtaaatcctttcgatagtaaaagtttaa

SEQ ID NO: 10514 - DNA, 897 bp, Homo sapiens
gcgccgccccaacgagactcgcggccccaggcccaggccccaccccggcggcggtggcggcgaggaggcctcggtccttatggtggttattattattattataattattattatggagtcgagttgactctcggctccactagggaggcgccgggaggttgcctgcgtctccttggagtggcagattccacccacccagctctgcccatgcctctccttctgaaccttgggagagggctgaactctacgccgtgtttacagaatgtttgcgcagcttcgcttctttgcctctccccggggggaccaaaccgtcccagcgttaatgtcgtcacttgaaaacgagaaaaagaccgaccccccacccctgctttcgtgcattttgtaaaatatgtttgtgtgagtagcgatattgtcagccgtcttctaaagcaagtggagaacactttaaaaatacagagaatttcttcctttttttaaaaaaaaataagaaaatgctaaatatttatggccatgtaaacgttctgacaactggtggcagatttcgcttttcgttgtaaatatcggtggtgattgttgccaaaatgaccttcaggaccggcctgtttcccgtctgggtccaactcctttctttgtggcttgtttgggtttgttttttgttttgtttttgtttttgcgttttcccctgctttcttcctttctctttttattttattgtgcaaacatttctcaaatatggaaaagaaaaccctgtaggcagggagccctctgccctgtcctccgggccttcagccccgaacttggagctcagctattcggcgcggttccccaacagcgccgggcgcagaaagctttcgattttttaaataagaattttaataaaaatcctgtgtttaaaaa

SEQ ID NO: 10515 - DNA, 665 bp, Homo sapiens
gaagacgacggcttcaggcccggctaactctggcaccccggatcgaggacaagtgagagagcaagtgggggtcgagactttggggagacggtgttgcagagacgcaagggagaagaaatccataacacccccaccccaacacccccaagacagcagtcttcttcacccgctgcagccgttccgtcccaaacagagggccacacagataccccacgttctatataaggaggaaaacgggaaagaatataaagttaaaaaaaagcctccggtttccactactgtgtagactcctgcttcttcaagcacctgcagattctgatttttttgttgttgttgttctcctccattgctgttgttgcagggaagtcttacttaaaaaaaaaaaaaaattttgtgagtgactcggtgtaaaaccatgtagttttaacagaaccagagggttgtactattgtttaaaaacaggaaaaaaaataatgtaagggtctgttgtaaatgaccaagaaaaagaaaaaaaaagcattcccaatcttgacacggtgaaatccaggtctcgggtccgattaatttatggtttctgcgtgctttatttatggcttataaatgtgtattctggctgcaagggccagagttccacaaatctatattaaagtgttatacccggtttt

SEQ ID NO: 10516 - DNA, 4593 bp, Homo sapiens
aagtgaggtggccctagagacactagagtcaccagccaccatcctcagagctttgaactccccattccaaaggggcacccacatttttttgaaagactggactggaatcttagcaaacaattgtaagtctcctccttaaaggccccttggaacatgcaggtattttctacgggtgtttgatgttcctgaagtggaagctgtgtgttggcgtgccacggtggggatttcgtgactctataatgattgttactccccctcccttttcaaattccaatgtgaccaattccggatcagggtgtgaggaggccggggctaaggggctcccctgaatatcttctctgctcacttccaccatctaagaggaaaaggtgagttgctcatgctgattaggattgaaatgatttgtttctcttcctaggatgaaaactaaatcaattaattattcaattaggtaagaagatctggttttttggtcaaagggaacatgttcggactggaaacatttctttacatttgcattcctccatttcgccagcacaagtcttgctaaatgtgatactgttgacatcctccagaatggccagaagtgcaattaacctcttaggtggcaaggaggcaggaagtgcctctttagttcttacatttctaatagccttgggtttatttgcaaaggaagcttgaaaaatatgagaaaagttgcttgaagtgcattacaggtgtttgtgaagtcacataatctacggggctagggcgagagaggccagggatttgttcacagatacttgaattaattcatccaaatgtactgaggttaccacacacttgactacggatgtgatcaacactaacaaggaaacaaattcaaggacaacctgtctttgagccagggcaggcctcagacaccctgcctgtggccccgcctccacttcatcctgcccggaatgccagtgctccgagctcagacagaggaagccctgcagaaagttccatcaggctgtttcctaaaggatgtgtgaacgggagatgatgcactgtgttttgaaagttgtcattttaaagcattttagcacagttcatagtccacagttgatgcagcatcctgagattttaaatcctgaagtgtgggtggcgcacacaccaagtagggagctagtcaggcagtttgcttaaggaacttttgttctctgtctcttttccttaaaattgggggtaaggagggaaggaagagggaaagagatgactaactaaaatcatttttacagcaaaaactgctcaaagccatttaaattatatcctcattttaaaagttacatttgcaaatatttctccctatgataatgtagtcgatagtgtgcactctttctctctctctctctctctcacacacacacacacacacacacacacacacacagagacacggcaccattctgcctggggcactggaacacattcctgggggtcaccgatggtcagagtcactagaagttacctgagtatctctgggaggcctcatgtctcctgtgggctttttaccaccactgtgcaggagaacagacagaggaaatgtgtctccctccaaggccccaaagcctcagagaaagggtgtttctggttttgccttagcaatgcatcggtctctgaggtgacactctggagtggttgaagggccacaaggtgcagggttaatactcttgccagttttgaaatatagatgctatggttcagattgtttttaatagaaaactaaaggggcaggggaagtgaaaggaaagatggaggttttgtgcggctcgatggggcatttggaacttctttttaaagtcatctcatggtctccagttttcagttggaactctggtgtttaacacttaagggagacaaaggctgtgtccatttggcaaaacttccttggccacgagactctaggtgatgtgtgaagctgggcagtctgtggtgtggagagcagccatctgtctggccattcagaggattctaaagacatggctggatgcgctgctgaccaacatcagcacttaaataaatgcaaatgcaacatttctccctctgggccttgaaaatccttgcccttatcatttggggtgaaggagacatttctgtccttggcttcccacagccccaacgcagtctgtgtatgattcctgggatccaacgagccctcctattttcacagtgttctgattgctctcacagcccaggcccatcgtctgttctctgaatgcagccctgttctcaacaacagggaggtcatggaacccctctgtggaacccacaaggggagaaatgggtgataaagaatccagttcctcaaaaccttccctggcaggctgggtccctctcctgctgggtggtgctttctcttgcacaccactcccaccacggggggagagccagcaacccaaccagacagctcaggttgtgcatctgatggaaaccactgggctcaaacacgtgctttattctcctgtttatttttgctgttactttgaagcatggaaattcttgtttgggggatcttggggctacagtagtgggtaaacaaatgcccaccggccaagaggccattaacaaatcgtccttgtcctgaggggccccagcttgctcgggcgtggcacagtggggaatccaagggtcacagtatggggagaggtgcaccctgccacctgctaacttctcgctagacacagtgtttctgcccaggtgacctgttcagcagcagaacaagccagggccatggggacgggggaagttttcacttggagatggacaccaagacaatgaagatttgttgtccaaataggtcaataattctgggagactcttggaaaaaactgaatatattcaggaccaactctctccctcccctcatcccacatctcaaagcagacaatgtaaagagagaacatctcacacacccagctcgccatgcctactcattcctgaatttcaggtgccatcactgctctttctttcttctttgtcatttgagaaaggatgcaggaggacaattcccacagataatctgaggaatgcagaaaaaccagggcaggacagttatcgacaatgcattagaacttggtgagcatcctctgtagagggactccacccctgctcaacagcttggcttccaggcaagaccaaccacatctggtctctgccttcggtggcccacacacctaagcgtcatcgtcattgccatagcatcatgatgcaacacatctacgtgtagcactacgacgttatgtttgggtaatgtggggatgaactgcatgaggctctgattaaggatgtggggaagtgggctgcggtcactgtcggccttgcaaggccacctggaggcctgtctgttagccagtggtggaggagcaaggcttcaggaagggccagccacatgccatcttccctgcgatcaggcaaaaaagtggaattaaaaagtcaaacctttatatgcatgtgttatgtccattttgcaggatgaactgagtttaaaagaatttttttttctcttcaagttgctttgtcttttccatcctcatcacaagcccttgtttgagtgtcttatccctgagcaatctttcgatggatggagatgatcattaggtacttttgtttcaacctttattcctgtaaatatttctgtgaaaactaggagaacagagatgagatttgacaaaaaaaaattgaattaaaaataacacagtctttttaaaactaacataggaaagcctttcctattatttctcttcttagcttctccattgtctaaatcaggaaaacaggaaaacacagctttctagcagctgcaaaatggtttaatgccccctacatatttccatcaccttgaacaatagctttagcttgggaatctgagatatgatcccagaaaacatctgtctctacttcggctgcaaaacccatggtttaaatctatatggtttgtgcattttctcaactaaaaatagagatgataatccgaattctccatatattcactaatcaaagacactattttcatactagattcctgagacaaatactcactgaagggcttgtttaaaaataaattgtgttttggtctgttcttgtagataatgcccttctattttaggtagaagctctggaatccctttattgtgctgttgctcttatctgcaaggtggcaagcagttcttttcagcagattttgcccactattcctctgagctgaagttctttgcatagatttggcttaagcttgaattagatccctgcaaaggcttgctctgtgatgtcagatgtaattgtaaatgtcagtaatcacttcatgaatgctaaatgagaatgtaagtatttttaaatgtgtgtatttcaaatttgtttgactaattctggaattacaagatttctatgcaggatttaccttcatcctgtgcatgtttcccaaactgtgaggagggaaggctcagagatcgagcttctcctctgagttctaacaaaatggtgctttgagggtcagcctttaggaaggtgcagctttgttgtcctttgagctttctgttatgtgcctatcctaataaactcttaaacacattg

SEQ ID NO: 10517 - DNA, 2143 bp, Homo sapiens
gcggcctccgtccaggagcctggctccgtccaggagcctgtgcctcctcacccccagctttgctaccaaagcaccttagctggcattacagctggagaagaccctccccgcaccccccaagctgttttcttctattccatggctaactggcgagggggtgattagagggaggagaatgagcctcggcctcttccgtgacgtcactggaccactgggcaatgatggcaattttgtaacgaagacacagactgcgatttgtcccaggtcctcactaccgggcgcaggagggtgagcgttattggtcggcagccttctgggcagaccttgacctcgtgggctagggatgactaaaatatttattttttttaagtatttaggtttttgtttgtttcctttgttcttacctgtatgtctccagtatccactttgcacagctctccggtctctctctctctacaaactcccacttgtcatgtgacaggtaaactatcttggtgaatttttttttcctagccctctcacatttatgaagcaagccccacttattccccattcttcctagttttctcctcccaggaactgggccaactcacctgagtcaccctacctgtgcctgaccctacttcttttgctcttagctgtctgctcagacagaacccctacatgaaacagaaacaaaaacactaaaaataaaaatggccatttgctttttcaccagatttgctaatttatcctgaaatttcagattcccagagcaaaataattttaaacaaaggttgagatgtaaaaggtattaaattgatgttgctggactgtcatagaaattacacccaaagaggtatttatctttacttttaaacagtgagcctgaattttgttgctgttttgatttgtactgaaaaatggtaattgttgctaatcttcttatgcaatttccttttttgttattattacttatttttgacagtgttgaaaatgttcagaaggttgctctagattgagagaagagacaaacacctcccaggagacagttcaagaaagcttcaaactgcatgattcatgccaattagcaattgactgtcactgttccttgtcactggtagaccaaaataaaaccagctctactggtcttgtggaattgggagcttgggaatggatcctggaggatgcccaattagggcctagccttaatcaggtcctcagagaatttctaccatttcagagaggccttttggaatgtggcccctgaacaagaattggaagctgccctgcccatgggagctggttagaaatgcagaatcctaggctccaccccatccagttcatgagaatctatatttaacaagatctgcagggggtgtgtctgctcagtaatttgaggacaaccattccagactgcttccaattttctggaatacatgaaatatagatcagttataagtagcaggccaagtcaggcccttattttcaagaaactgaggaattttctttgtgtagctttgctctttggtagaaaaggctaggtacacagctctagacactgccacacagggtctgcaaggtctttggttcagctaagctaggaatgaaatcctgcttcagtgtatggaaataaatgtatcatagaaatgtaacttttgtaagacaaaggttttcctcttctattttgtaaactcaaaatatttgtacatagttatttatttattggagataatctagaacacaggcaaaatccttgcttatgacatcacttgtacaaaataaacaaataacaatgtgctctcgggttgtgtgtctgttcacttttcctccctcagtgccctcattttatgtcattaaatggggctcacaaaccatgcaaatgctatgagatgcatggagggctgccctgtaccccagcacttgtgttgtctggtggtggcaccatctctgattttcaaagctttttccagaggctattattttcactgtagaatgatttcatgctatctctgtgtgcacaaatatttattttctttctgtaaccataacaacttcatatatgaggacttgtgtctctgtgcttttaaatgcataaatgcattataggatcatttgttggaatgaattaaataaacccttcctggggcatctggcgaatccc

SEQ ID NO: 10518 - DNA, 259 bp, Homo sapiens
gggtctgtaccgggctggcctgtgcctatcacctcttatgcacacctcccaccccctgtattcccacccctggactggtggcccctgccttggggaaggtctccccatgtgcctgcaccaggagacagacagagaaggcagcaggcggcctttgttgctcagcaaggggctctgccctccctccttccttcttgcttctcatagccccggtgtgcggtgcatacacccccacctcctgcaataaaatagtagcatcggc

SEQ ID NO: 10519 - DNA, 254 bp, Homo sapiens
gggtctgtgccaggccagtcacaccgaccaccacccactcccacccactgtagtgctcccacccctggactggtggcccccaccctgcgggaggcctccccatgtgcctgtgccaagagacagacagagaaggctgcaggagtcctttgttgctcagcagggcgctctgccctccctccttccttcttgcttctaatagacctggtacatggtacacacacccccacctcctgcaattaaacagtagcatcgcc

SEQ ID NO: 10520 - DNA, 262 bp, Homo sapiens
ggatctgtgccaggccattcgcaccagccaccacccactcccaccccctgtagtgctcccacccctggactggtggcccccaccctgcgggaggcctccccatgtgcctgcgccaagagacagacagagaaggctgcaggagtcctttgttgctcagcagggcgctctgccctccctccttccttcttgcttctaatagccctggtacatggtacacacccccccacctcctgcaattaaacagtagcatcgcctccctctg

SEQ ID NO: 10521 - DNA, 253 bp, Homo sapiens
ggatctgtgccagggagtcacactgaccacctcctactcccaccccttgtagtgctcccacccctggactggtggcccccaccctgtgggaggtctccccatgcacctgcagcaggagaagacagagaaggctgcaggaggcctttgttgctcagcaggggactctgccctccctccttccttttgcttctcatagccctggtacatggtacacacacccccacctcctgcaattaaacagtagcatcacctc

SEQ ID NO: 10522 - DNA, 2847 bp, Homo sapiens
aatgtttttgtctttgtggcatgcagctaactcctctttagttttgtcttagggtcaagtgatctttatgggatgcctatttaatggcttaattttgttgcatatgagccagacggcctgtgtattgtttaagctcgccaagtctgtgttgctgtgaaatgaatgaaggagaggctcctgttcatcttgtggtaatgatgggttgtttcatgcttatcagaacccccagcgttttctgagaagtacttcagaatctcattcctcatatttcattggtatttgtggagcctatgtttaatgttgccacgtgtttttatgtcctttttgttggacttgagtactcagcccagttgttctcatagatgctttgcattttctctgtgctttggcatctgaatatgttctttaaatgtgtgtttagtttaggacagttactaggaatgagtttataacttcattagaaatcatttctatttttgttatcctgtgattattttgatggtgctagtgactagtttctttgctttttgtgttgttccgtatgctaacatgtgcatggcaaaaatttagaatagccagggtctgtaggcatcacattgtgaggaagggagctttctggaagtacttgcttcatgtatggatgagtgtcaaagtgaatttgatttgtacttagacacacgcgtttacacacacacacatatcacaagatctgttagaaatggaatttttctctttttctggagatagttttcacttttagttggagtggaaatccctttatatttacattgaagtattttaattggcatagcctgctcattattttcatgtttatacactttcccacgttgaggtggtgtgttctgtgctgtgactatagaaatcttggtcagggctggatagattatctaagtcaagcttgagaatgaatgtatgtaattttcctgtttattgtacatgatgggttaggtggggtgaatgtggtacaggaatgtcctgtatgcccaagtgggcaagaaccccaacttgtttctcaggggacttgattgttctcttagctggtggaatatgttggcttatgtgtttgaactctgtcgtgtttaattggtttatataatatatgtatgctatcttgattcatgaacttgatcctattaatttatatgctgatattgtactttagacatacgcttgtctcctgaatgtcctctgaatatttatagttaaatgatttatatttgaaatgtgttgccagacttaacccagcagacactctgacatcacggagcttcactgatgacaggtaacgaaacttcctatgttatgtcaggtagtagtaagtagtattggaatgatgttttcatttttggtggctctcaactggaattggtagtgtttccaggccaagggtcgactgcaggttgtttgagaaatgatgagtaggtcagtctaggaagaaagagaaagtagcaggaaaggaagtgggaagggccagccaaggacagactgtagaggatccacatcaggtggccacgaggacttgcaggctatagttatggtggtgacatgcatgaggtgggctggtagagcaggaagctctgtgatgtcagagcatctactgggactacaggtgcactgtagtccccactactgggggtggcaatgaagacactctgtctgttgggccctagaatttaatgtggatttcctccttccttccaagttctgagattcttaaatgagagctggctgtcttctagaggtaagacctggaatggagtccagttggtactttttcactccctcttagaatctcttatgaaaaaatgatcagagagaaaagtggggttttgtttccccacctaataatatatcctacaaccagccaaatgcacttttgtgaaaatggggtgtgaggagtggttctgcagcttgagtcctctggttttaagtagtttgtttctacttgtttaaagaatcttctggtctgaccacttaaagtaaaaactacatgatttattttcgggcaattatgtttagctttcatcattatactccaacagacccgtctgaaggggtatttttttttaacaataatgtttgtaacattttgttgtgtcaattagagggtcacttgtttgtattgcaataaacactgggaccagttccggggttaagaattaatttttgtttttaatatttcacatgaaaagaatcaaagtaattgtaatggctagaagagacctgccagaagattaaaaaaaagaatgagagaaaagcccagttagtggtgtgcaaacttacttcctttaaatgtcccatggatgtaggacagtgccatgtttcaagatgcctgtgagctaggtcttcaagatttatagaatgttacttatgaacaaaatataattatttatggtacaattcttgtactttagcaaatctggagttagttcatagtcaaagtcagttaatatttcttagaggaaagttttgctttttgtggcaacatttttatagcttgtgtgagttcttttttatttaatgatttgaaagcagtatttttgcacagtcgtgaccgtgtgtggtggcgtcactgtaaccaaagtatatgcaccagcccttgtgcatttattgtttctcctgattttgtggatttaaatgtccaaatgcaaacctttgtgacttcctttggaggacttggcagcacagcatgcccccgtgacctgcctgctgtggtatgagctatgaccaagagcaggcttcctgctccatggagtcctgagttgctctggggcaggggattacgttatgaaaactaaccatgtgtaacaataaatctaccttagc

SEQ ID NO: 10523 - DNA, 102 bp, Homo sapiens
gtgtcctggagtgtacaactgcggccactgcatgtgagagaatcctgcaatgggcaataatccttaatataggcaataaatgtttgtcaacatattctctta

SEQ ID NO: 10524 - DNA, 213 bp, Homo sapiens
gtgaaacccactcacaggcttgtccatgtgctgctcccacattccgtggacatcagcactactctcctgaggactcttcagtggctgagcagctttggacttgtttgttatcctattttgcatgtgtttgagatctcagatcagtgttttagaaaatccacacatcttgagcctaatcatgtagtgtagatcattaaacatcagcattttaag

SEQ ID NO: 10525 - DNA, 1098 bp, Homo sapiens
gcccacagcaggctgtaccaggctgccctgcttgtgccttagtgggaagcccagtgaggcattaagcccaggggttcactttcaggcccctggccaatctgagtttcctgattctgccctctgacaccattgcagctgcctgcacctgggccacatggccttcagaaccttctctctggtcttcctccccacttcttccctgccttctagagaaagagcctggagacaatggtgacaatgtctgtgggtacttttctcagggtttccctaccctgccctagacccaaaagtggtggaggctgagaagaagccccactgccctcgctcctaggccctgctgagctgcagcacctgctctaggggacgagctccaagcaaagcctggctctgggaaaacttcccattcttagtcaacccccttattgtaagattaacaaataggtaactaattgcctaagtctgggaactgcttccactgggacaaaacattctcctgctgctcttggatgcagggatcacaccaggacagcctggggttcccctgaggggcacgggctggaggaggaggcatggcacaagtgaccctggctaaggagggagggagcctcaaatcacgttgtagttcaggattggcctcaggctcaggctagacctgaaggccagagccacgtggcacaattgctggccccaggaatgggcaaggtggagatggaacctgtgttgagggcagatgccacaagattcccgaacctccccaaaccccgccctactgtctcttcctgtttgttccctcggaccttcagctgcttcttcactgttgaaaccatgccctggaagacatattttgaactcctgaacaagacctgctcagaggggctctcctgagtggaagccactcacatgcctggccacatgctgccccctcccccgtggacaccagctgttcccaggagttgacatatcagtggctgagcagctccgtgcatatttgttctcttattttgcaagtgtctgaggttttatgacttggcattttagaaaatcctcactgtccaggttcctcaagtagaataggtcattaaacatcagcatttgcag

SEQ ID NO: 10526 - DNA, 253 bp, Homo sapiens
gggtctgtgcaaggcctgtcacactgaccacctcctactcccaccccctgtagtgctcccacccctggactggtggcccccaccctgggggaggtctcctcatgcgcctgcaccaggagacagacacagaaggtggcaggaggcctttgttgctcagcaggaggctctgcccttgctccttccttcttgcttctcatagccccagtgtgcagtgcacactctcccacctcctgcaattaaacagtagcattgc

SEQ ID NO: 10527 - DNA, 166 bp, Homo sapiens
ttgctccaggcggacaaggctgacaagcaatccaggaacaaaatactcaccaggacgaggaagaggactttgggggacaggcttctcctgtgagcagcagagcagcacaataaatgaggccactgtgccaggctccaggtggcctccctggcctgtctccccactc

SEQ ID NO: 10528 - DNA, 868 bp, Homo sapiens
ccctcccagatagctgcccctgccacgcaggccaggagtcttcacactcaggcaccaggcctggtccaggaggagctgtggacacagtcgtggttcaagtgtccacatgcacctgttagtccctgagaggtggtgggaatggctgcttcattcctcgaggatgcccgggccccacctgggcttgtctttctgtttagagggaagtgtaacatatctgccatgaggaacataaattcatgtaaagccattttctcttaaacaaaacaaaactttctaagtacagtcattctctaggatttgggaagctccttgcacttggaacagggctcaggtgggtggagcagtaaggcactacccagagagcttgctgctgcggccctgtcctgcggcctcaaagttcttctttactatatataacgtgcggtcatacctttcttcgttgtggtggggatggaagagcagagggagcatggcccaggggtgttgaggccagcggtgagagccgtgttagccaagacatggaactgtgttctcaagggttatgtggggcgtgggctctccatagtgtgtatgaaaagcttgttgactctagcggctcagagaggactttgctgggtttctttctgtgaatatctccgtgctgaccatgctggaattggatgattctgcaattcgggacctactgcaggggtccgtttagtaacgtcttgtctgtgatctttgttcttgacctctagaccccaagatgtgaacagtgcacgtgttaatgtcatctttgctcatgtgttataagccccaagttgctgtatattttcacaagtatgtctacacactggtcatgattttgataataaataacgataaatcg

SEQ ID NO: 10529 - DNA, 1524 bp, Homo sapiens
gctggcaccttgtggggctcttgggatgggcgggcacccaagccctggcttgtccttcccagaaggtacccctgaggttggcgtcttcctacgtcccagaagcagcccccaccccacacatgacccacaccgccctcacgtgaagctgggctgagagccctttctcccatccattggaggtcccaggagtgtcacccatggagaggctatgcgacatggctagggctggttctgccatctgagtttggtttcctggaatgaaaaggcattgccatctccattcctctgccctcttgagccagcacaggaaggtgaggccctgggatagcgcgcctgctcagataacacagagctagttagctagtagcaaccgtgttttctccagatctgtctagatacaaaggtcagaaatcttatttttatacttttatattgtggaagaacagcatgcaacactcacatgtagtgtgtggatttacttgaacatgttctttttaacatgtagttatgaaaatctccttttttgcctctactggtgaggaaacatgaggatcagaggccacatttttaattattgttagtgtatttggaagtctgaattggagatgtttgtacctctgtctaaacagttcccttgagaacttccaagcctccggcatcttttcctggtgagtgtttctcctgtgcttggttgtgtataatggagctaactcctaagcggtggggtgaatgtggccgccttagttctgaagctactccagttatgttctgtttcttcaagctgtgatccagaaagatttttgtgcccccagatgcctcttgataggagaggcaacatactccaaatagttgggttcttcagggaagctattagaaactcaggtgacttgttagagcactaacttggtcagagccaaatcctggcaaacgctgcctgaccttcactctgtggttggggcggtgagaaccactgaggtccaatgatgagacttggaggtctggatccagtctctctttgttttaatgtgacttaggtgctgtcaacattagcaagataatggaaatcacgacgccagtgggtgcttacctccctgctaggcatgcaggggctggcggttggcaggggaaggaggcccagtgagccgggtcccttaggggagggagagtttgtcctctttgccccacagtctacccttcagggccttgtggcagtgccagtgttcggggggtgtctgggccactgagtacccactcggtcgtggttgtgctggcctcttgggtgagtgaacctgtgaagcccaggaggtggtgttggctgcagggtacacaaatactgagtggtggtcttttgttacaggcttagcaacaaagctgtgccctgggcatggggggctgtagtgtagctacagttgtgcgtttgtgaaatggcttagctttccatgttgctgagaggaacctggacatggtcccgggcatctgaatgatctgtaggggagggagttcaaataaagctttattttgttc

SEQ ID NO: 10530 - DNA, 797 bp, Homo sapiens
gacccacaggtcccactgtcaaaggctgaaaatgtgcatattcctcactggcattttccaaaagacaaaaattgtccaagacatatactctcagtttgattttcttctgacaatgtcaagataaaatgcaatgccacttgctttaagaggacagatgagtgacctagggaaaattctatttcattctagaatggaaacggttccttaatggcactttaaccagttaacttggtgcaaaacttttgattctcttttgtagcttgagcagggaggatccgaagttcaaaaatgatttcactgctgggcatcatttgagatgtgtggttcaatgtactgtatagatgaataggttaggtctgatgtcctcattctcaattaggaaatataaaattgtttaatatccagaagaatctgatatcatcatagtgaagactccatacagacacatgaatgaattatattgtctttaccttgaacttggccttggatatttcaattttcttgttagggagtaattttgtgttttcttgagtgtcacttgataggctatgcatattggaattcaaagaaacccatactctagtcgtttctgcatttcctttaaaaatagcatgggatcatatttaaacaattgttggatagctggaaacagtgtttttaggtcagaccaggcttttggtctttcaaaatttgtgattgaaagcactttagtgacttggattttgtaaatctttcctttcctgcgtttcctttgccatttatttattctttaaaaataaacattttgtggtgtgttt

SEQ ID NO: 10531 - DNA, 177 bp, Homo sapiens
ccaacacgctccctttgcatagaaactgagggtcccttagctgaaggcaccacaagagcttgcccctatgaccctcatgccttttttcattttattattatttagtatcaaatcattctttaaaatcacatgataatgtgtgctgcaactagaaactataaagatatgtcaatgaaa

SEQ ID NO: 10532 - DNA, 229 bp, Homo sapiens
ctgaagccaacaggtgacacggtcatcgaagagcagcagacaaaactaaaactaacccaaaggcagctgaaagtggagggcaggtgaattcccagccctcgccggattcaacttttgccaacggtgaagaactgccctgagctgcaaaccttacaaagtctgtaactctagataaaccataccatgtgctaactgcactgaaataaaacactaactacattataatgtc

SEQ ID NO: 10533 - DNA, 749 bp, Homo sapiens
agacagattattttctaggattcattcgaaagcacatcttttaaattaagccactgtgctgccttagattccgtgggtcatgagccatgagtcctgggacatctgaggattgggattctttgttcaccccgcagatagttaatgaatggtctgccctgggcaagatggaggtgggggctgggggaatatgcatgttgcagaagccggcgtttttattagcggtcctgagtaatttcccttggcaaaattcccagttttgccactctctggagccagatcctgggagctgtcagcaaggagcaggtaagtgagcagttatggacagcactttccatgtggtgcttccgaccctggctgtcagagtgaaatgtaaagtcagggctctgtacagttttgccatttcactgttctgctttaagcttagcttattagaactcttggtggagggtgcgtacacacattccagaaaaggcttcactcgctgggaacgtcaacccagcgagaaaggaggggaagccccttctccggggaccttatctgtggactcaggaatgatggtgtttattgcaaatgcacaatctttttcccattgaaatgtcatcacactggaaattgtactatatgtaaaaaaaaaaaaaagtatagttttatatttgaaatgtatgcaaattatggccatatggctgattggaatgtactactgtaatataaaaagtcactgtatttgcaataaattcttttctattaaa

SEQ ID NO: 10534 - DNA, 1559 bp, Homo sapiens
agcacataaaagggcatgattatgaatgttagaatcaatttgctgagtatgaaataagaaaagttagggcactccacttatgataatccagctctaagaataattttacttatgatttaatggccaatattttgaaggtcttcccaaccctattgcttctaagttgtaacaaccaaccattgagtggtacttatatctgaaaattcagattgcatgaattcaggtcagtagtatagcccagaaaatttaaggaaatatattatttgttagtctgtatctggagctttttaaaattatgttattaatcttttagtatcttggctgcataatgccaagcaggattgctttacacatggatgcacaaatgtaaggtttatcttctggcttaaaaatagatatttttaaaaaatagattttctaaaacacagatttatgaaagcaagtgaatctggttaatatgaaataagtactaagtcacatgcaaatcaaggtattatatagtgaaattattttgcatattttgaaaacataaaccatagtttttgcctactttggatgtatactttcttttatgaacctgatttttctgtatgacatttttttttttttcagagggcagggagcaatttttctatggcatgtgacagattcctccagttagaaaaagctgttaaaatcaacacatggtgctcctttaccgtgacattttctcacctgtgcacagtgagccggtagcttccttttagtcttcacctctcaaggaaatgtttttactgtcttttcccagacacacagtggggttgagggagctaggctgttttgctagagataattgcaaggcacgtggcactaaaagtcatttttcttctgtggatccataagaggaacatttcctcagtgtagcctaacaatgcagcccccaatctgttcctttttttttttgaaatgggatctctgtcgcccaggttggagtgccatggcaccatctcggctcactgcaacctctgcctcctgagctcaagtgatcctcccacctcagcctcccaagggtgtgtgtgactacaagtacacactaccacgcccagctaatgtgtgtttttgtagagatgggattttgccatgttgcccaggctggtctcgaattcctggattcaagtgatcctcccacctcagcctcctaaagtcctaggattataggcatgagccactgtgcctggccccctcatctgatagaaaattagattttgctatgagccatttcctgagggccaatttaatactcgtgtgactcttcttagagttaccatctgccttaaatttcctctgtttttcacattcttggaaatatatcattgttttgcaaatttctatatctaattcagggtttaccaggagcttaataattaatggctacatagcaaggcatcgtcttggaaccggagaattttctctagactattaggctagacagtctcatgattatactaaccaaacctggagtaaagtggttgaaaaaaaagaaagtataaaggggcttattaaagtggttaataaatatg

SEQ ID NO: 10535 - DNA, 816 bp, Homo sapiens
agttatatctcaccatccatcagaggacacactcaggagagtaactttgctttgttacaagctttagttgaggctgcataacttgttcgtgaagatataacagaggcagacagaatccagagggctacagagaacctgaattcaacccatgtgtccccaagagattcagagaaaagaggtcaatgtttagggaacagagatgccagttgaggggagggcattacctgggctattggggaaatgtggtctctttcctactgagcacatattcttgttgtatttgtgccaggctgtgctttctaaggactgctcttagccagtgactgcagagcagggataccaaggcaggcctgttacactctccccaacctccttggactgcaaacaatctaggacacctccaccaaacctcctcttgcactttccctctggcttccctcccagccttccttggtttggatgttttgtcccctccttaatttatgttgaaactctacataaactgtttactgttgaaacagtgtaagtattaggaggtgggacctttgggaagtgattaagtcaagtcacgaagatagagctttgcgaatgggatcaggtgcccttatgaaaaggcttgatagagggagtttgtcctgtggcccttctattttctgctctgtgaggacacaatgctcctcccttccaaaagatgcagcatgaaggcatcatcttggaaacagacatgagccctcaacagacaactgcacctactgatgttttgatgttgaacttcccagcctccagaactctgggaaaataaagtcctctttatac

SEQ ID NO: 10536 - DNA, 244 bp, Homo sapiens
cagtggaatttgtagggcctcttgcaaaaagaacgaacagccctacctctattgcagaaattgtcagtcctgctgcctccagtcctacatgaggataagcatttctggcaaagaggaaaataccgactggtcttatgagaagcagtggccaagactaccttgagtgctggtgattaccattctcaagctctctgggcacagagacctgctgtcaacccccctcattaaaattcatgtgcctgct

SEQ ID NO: 10537 - DNA, 57 bp, Homo sapiens
aaatgactttgtttcaggttgcttagggtccacatttcattaaaactcacaaatttg

SEQ ID NO: 10538 - DNA, 16 bp, Homo sapiens
cacctctcttccaacc

SEQ ID NO: 10539 - DNA, 1489 bp, Homo sapiens
ccagacactgaccatccactctaccctcccacccccttctctgctccaccacatcctccgtccagccgccattgccaccaggagaaccactacatgcagcccatgcccacctgcccatcacagggttgggcccagatctggtcccttgcagctagttttctagaatttatcacacttctgtgagacccccacacctcagttcccttggcctcagaattcacaaaatttccacaaaatctgtccaaaggaggctggcaggtatggaagggtttgtggctgggggcaggagggccctacctgattggtgcaacccttaccccttagcctccctgaaaatgtttttctgccagggagcttgaaagttttcagaacctcttccccagaaaggagactagattgcctttgttttgatgtttgtggcctcagaattgatcattttccccccactctccccacactaacctgggttccctttccttccatccctaccccctaagagccatttaggggccacttttgactagggattcaggctgcttgggataaagatgcaaggaccaggactccctcctcacctctggactggctagagtcctcactcccagtccaaatgtcctccagaagcctctggctagaggccagccccacccaggagggagggggctatagctacaggaagcaccccatgccaaagctagggtggcccttgcagttcagcaccaccctagtcccttcccctccctggctcccatgaccatactgagggaccaactgggcccaagacagatgccccagagctgtttatggcctcagctgcctcacttcctacaagagcagcctgtggcatctttgccttgggctgctcctcatggtgggttcaggggactcagccctgaggtgaaagggagctatcaggaacagctatgggagccccagggtcttccctacctcaggcaggaagggcaggaaggagagcctgctgcatggggtggggtagggctgactagaagggccagtcctgcctggccaggcagatctgtgccccatgcctgtccagcctgggcagccaggctgccaaggccagagtggcctggccaggagctcttcaggcctccctctctcttctgctccacccttggcctgtctcatccccaggggtcccagccaccccgggctctctgctgtacatatttgagactagtttttattccttgtgaagatgatatactatttttgttaagcgtgtctgtatttatgtgtgaggagctgctggcttgcagtgcgcgtgcacgtggagagctggtgcccggagattggacggcctgatgctccctcccctgccctggtccagggaagctggccgagggtcctggctcctgaggggcatctgcccctcccccaacccccaccccacacttgttccagctctttgaaatagtctgtgtgaaggtgaaagtgcagttcagtaataaactgtgtttactcagtg

SEQ ID NO: 10540 - DNA, 250 bp, Homo sapiens
aggcagcctcacctcgggcagtccctgcaggtccctcaccctccgggctgagcctggctctaggacctgaagaactctcgaaggacccagccctggtgagccaaggacaaccacacagaaagccaggattgaagcggtgctcagccaggcccctggggcctccggacaaacttgggggtgaggggaagcagggcctcttgggatttactctgtggctctcagggccaataaagccatgtgatgatgaggg

SEQ ID NO: 10541 - DNA, 336 bp, Homo sapiens
ggatgcagtccagccgtggctccccacttccgactggctcccttcgggggctgtctgcgccttccacgccccccaggacgggcccagaggctgggggagccccgcggcggcctgaaccctgcctcccgcgcccgccctgctcgtccgcgtctgcagtcagcgtccccaacctgtgcgtctctgtgtccgggccggcctgctgcagccacctggtgccttagtccttgggctgggggagggggcccacccttaaaggcggcgggaggggagggagggagagtggagggtttgacgggcctggagggtattaaagagacacagaagaagctgcctgtc

SEQ ID NO: 10542 - DNA, 851 bp, Homo sapiens
gactcaagaaccaagatgggggaccagcaaccccccagggtcatggaggacccaggaccctccaaccttgacacctgtaaggacaggatctgccctgtaaggggccagccgtcaggaatctggccatgaaaacctctttgtagtgcttggctactctgtgatggcaggagggaaccttcagcctgtctggctgctggacctggacaccagggctcggtggacacaagatctattgacgggccttggtagccaccagtgggtgtgtggggcagtggctgtgggggtgtaagaatgactgcaacaggcacttcccaacaatggcctgctgttcacatggaccctgagcaaggaaggagggagggaggggcagagtggagtgtcattccagcattcctctcagaagggagagaggttttcaggctggtgccatgcgattggaataaagcaggaggctcatgggtggttgctgaatgaagaacagaatcttggtgctttgtggctcaccacagccatctgtggggcaggcacacacacctcccgccagctccaattttgcactttttccctgcttgattccaagagtaggtgctgcctagcagcccttcgtggccactctttactcaggagggccttgcagagtcctgcaccaggcctgggtgagtggatgcgcctcttaccatatgacacgtgtcaagatgcccttccgccccctctgaaagtggggcccggccagcactgctcgttactgtctgccttcagtggtctgaggtcccagtatgaactgccgtgaagtcaaaactcttatgtgttcattaagggctcaataaatgttagctgaatgaatgaatagc

SEQ ID NO: 10543 - DNA, 3948 bp, Homo sapiens
cccccacagaggccctcagctcagtttttggctctgttatggagccttagtacccaccccgtctgtgtcccccatgaaggcagctgagctttcagagctgggttcaaaaaaaaaaattccagtgtctgtatacaggagcacttggtttgggggttcaggctctaggatcgattccagaaggagccttgagccccaaccccgtgaaaagatctcataccgtaggacttcaggtattatttacttttatttttttgacctgaatcgggagccacacttggccctcttcctctccaaagcgccagaacctccttctctttggagaatggggaggcctcttggagacacagagggtttcaccttggatgacctctagagaaattgcccaagaagcccaccttctggtcccaacctgcagaccccacagcagtcagttggtcaggccctgctgtagaaggtcacttggctccattgcctgcttccaaccaatgggcaggagagaaggcctttatttctcgcccacccattcctcctgtaccagcacctccgttttcagtcagtgttgtccagcaacggtaccgtttacacagtcacctcagacacaccatttcacctcccttgccaagctgttagccttagagtgattgcagtgaacactgtttacacaccgtgaatccattcccatcagtccattccagttggcaccagcctgaaccatttggtacctggtgttaactggagtcctgtttacaaggtggagtcggggcttgctgacttctcttcatttgaggtcacatttttcccccgtggggaaataaactgactttggactgcttcagtctctgccatcttccatgactgcatttgttcctgcctgcctcggcggtatccacagaagacaggcaagaggattggagcagttttctcacaggtctgcaattctgtttttctccaagtacattatgaccccctcatccttctcttgaactggagaggggaagaaatgaaaggcatgcccacgtccgtcacctccccatcccctagtccccaccttgaacatcatgagctgttgttattagtcttggaagcagagtctgggttggtgtggatagcaaaggaggaagtctgagcccctcattggtcttcctcccacctgtcccttttccgggaagttgtggaattgttggaagaagagtttgcagaaggttaggaatgggtagatagctaagtcctaatctatgggtacattgttgtgtcccaaaccaaaattttccttatccacaatgtcccttctgtctcttccactttacagtggactcggccactgtgcataggcttctctgctctccatcaaatcacttccactttcctgtgcccccacccccgcctccagttttccgctagtatccggcaaggtttcttgcaacaaatgattagttcttttcttctgactcgtggggctccctgctgcagagagcacagcccttgcctggagcccaggaaccccatccttgcttcatctcagttcttcatgggcttcactcttcccactcacggaagggaggtagctcagggacctccactgtgggacccttgagacgcttccactctgattcagaaacacacttctacctctttactgttaactcttaacagatgcagtcagcagtttctgggcacttctctcagtaggtgcctcatgctgacttctccagtagggtttcaggacaaactaccaaggaattgcctcagcctcctaccagtcctccctcacccaccttctgtctaggttcacttggtttgtcatcaggaactgagcaggtccaggactcagctttctgcttcagcctaagccagtactccttgtttgaggtaaaagccttaaaatttagctccctagctcttgattagaagcaatttggagtaagtgtgttttgatttaggcagggtagcttgggatacctttttaaaaacaccagatattaaaatgtctggcaaggttagaatcagactagatgatttgcttctaaaaattagtttcagtgagtcccagggactaattaaggtttattttaaaaagtgtctaccttggtacgcagccacctcctgcatgctgtgcatgttattgggacttgtattataggtgatggtatgtgagaatccagttgggactcgctgttgccatcctctttgttgtatctggttttcatcactagactcagcaacccttctcaccttaactgccaccttccctacactctcagtttacagaggccactgggcctctggctgcagaatacaaagtcccgggctgttagaggagtcctttcctctctgcctgccctttcctgtccctccctcgaattctctctccccgtaagtgatgctggaaaagtcataggactggcaaagcaactgtttaaaccctttgtaaccggggccttgcccccacctcctgtcttttctccttgccttccccactcctgtgtcctcccatctatcctgtctttcctttcctcctctcagtgtcctcagcacccacaaggaattttcctatcactgtgaactttgctggtacagaggaataatatctgccttcacctttttttttttggaccatagctagccagtcatttcttaaacctcccttcctaaaatctggggggtcggggggaaagaaaaaaaaagccttagtggcctggttgttcaaaggataagaatagctttatcctgcactcagtacccgaactcacttcagtatgcttactgaggccatgagaacctgaggggcatctgcccaggacaggagccatggcatatgacaaagaccaatgagggaccaggaaaaaaagtgatgtcccctttccctgccacctccagcctctgccagcaatgagctgtccccctcccaccctacacagtagctggtcagggctgagtacagtcctgggggtaaggggatgacatgcccaggtgtcagctcaaaggatctctgcatcatcttgaggtgggaggcagggaaaggagcgccaatgaggttccctgcaacccccgccctccagcccaccgcccaaccttttacaaatggcattttcttaattgaaaatccgggaagcaggtgtgattacttttttgctcgtagatattgtcctaagttggaattctcccactgccctaaaactttccctagtagtcctttaaactcccccctccctttttggtagctgttttctccgtcctctctccacctgccctcttatctaggagctgtttgtaagcacgatttttttaacaggttatattgtacaggatcaatattttgctttttaacaaggatatttatgtaataagaaactttgccttaggcaggtgttggccagaaaagtccagattcctctgggatcccaccctggcctctcctggaactctgaacctgctgtggaaggaattggccatgaccttcacctctggagagtagggtctatggcgagggaaaagggtgttcaccatgataacctagtgcctccatagaggggtttggaaaaattccagtccgatttctttgtgtgtcagctgacttccttagctgattgttcccacttgcacctctccacctttggcactagaactcctgagacaccacttctcatgcttctccctccctaccagcggtcaaggctttggagccactcttttgtaactccagattatttaaagagaaaagtacaagacagaaatcttctagcactttgtaaacacagtgaataacctcttggagtatttttggctttatataaaacaaggtttttaattgtaaagtataagtgccattagaaaatgcacagggcatatctttgttaaagtagatttttcaatgttttacagaattacattttcaaaaaaaggtttttataatgaagttgtttattaaaaacttctgaatgatgtgtt

SEQ ID NO: 10544 - DNA, 730 bp, Homo sapiens
ccccaccggcacctggagcgcactgccctagggaaggaggctgtcccagcctggacctggcttcctgcctcaccagttggtacattttgtttttgaaagaggtgggatccaaaagagctgtttctagccacactccaagcacctgagactttgggcacaaggacacttttttttttttttttttttttttttggaatctcaccacacgggtgctctgacctgcttggaagaggccaacggggcagctctggaagggttgggggctcccctgacaaggcgctggggctgcagctctgtttagaatcaccttcgtggaccctgatgttagaatcccacccccagataattacctttcaagtcttaggtgagcagaattgcatatttattgagaaaagcaaagtggaccctttcttcctctccccttagtaatttatttttctgaaaatggattcttttgtgtttgtacagattgctagtctgtgtctgtctgatcagaaggatgtatccccatacctaacattccatatcactacactgatgtgggctggggccagtaggggcaggacaggtgccaggctggctgttcctctgcatgcctggtgcaccctgtggccgctagcccttggccaggccatcctgttgcagatcccagtgctgccacagggacaccaccaggcacctccctaggcaacgccaagcaggaggacctcacccacacccatggcaaagc

SEQ ID NO: 10545 - DNA, 691 bp, Homo sapiens
tttctgtccctgcatctcccctggccccgttccctgccctcctcccttccctgggtgactgctctgagaggcacttcactcacaggcctgtgggatgctccatggggccctgctggctccatggggcccaggtgcaaagggtttctgaaaaacagcaggattaagtactgaaagagcccaacacaattaccctgtaaactctctgttagggcaaccaccaccacctgtcttccaggacacatttttagatactctgacaggccactgcatctcagattcaggggagaaaataagttgtcacctccccttcaaagttccagagtaaacaaatggtgccatcattcaagataacatgctgatcaccctcctcccaaaaagcaagagcttgtttatggctgaggaatcggcggattgtctgaatgacacatatacagagcccccacggatttctgcacactctgggtctgtgctggtggaacattgccaatcagttcttaatgaggcacctgtgtgtaaatacatgcttggtcttctctgcagagaactgaggctaaactctgtccctacttctggttttgccctgtcatgtcgtaacgaggtgggccttttgaggccattttagtttgagttcgagccaaccacctctgttggttagatgatgaataaaaaggttctgaagaaaaggtctgga

SEQ ID NO: 10546 - DNA, 18 bp, Homo sapiens
aatttattctttaccccc

SEQ ID NO: 10547 - DNA, 204 bp, Homo sapiens
cctgagaggatggcctcagagctgacttgggcaatcctccccaacaggaaggggagacattgcctgccactgaggaaacaggtcatgaaggtggagataagctgcaaggggcgaagcaactttatgtcagtggaaaacgtgtctctttaaagctgctatgtgaacagcttttacagtcattaaatttacctaaactaaggttaa

SEQ ID NO: 10548 - DNA, 550 bp, Homo sapiens
aagtcgccggatgcactagccctgaagaggggtgtccatgacatggcctgagctgggcctccaccgactgcctgctcacccctgggctgagggaagggagaggagaggaacaagggcctccgaaaccccaaccctgagggagactggattggtcttggggcccaggacccagacgcaggacagagtggactctgcctgtgatggggtggccttcctgctgcccccctccaccagtgccttttgcagagagatattttgtgtacacagaagccattccgagtctgggacctgcccctgtgcggatcctgaccccagccaacagctgagctgccgggcctcctcgaggcccctaagccacccccagaggtcccatctgaagctggagtaccctggggtcagcagcaagagaaagaagaggagattttctgtttgtttttcccctcagccctgccaccgtggggagtctggtttttctcttcatcctgtctctctcctccttactcttggataaataaacagcctgtgagcacacaggcagcccggcccagtg

SEQ ID NO: 10549 - DNA, 742 bp, Homo sapiens
gccagacctgcacacgccgagggccccgggaccctgcctgcctccctctggagccttctggactggccagcccagcgcaaagaccaggacttgtctcctcctggacttgggcctggtggaagggctctcagcccagggatcagggactgggctgcttgctttctatttattattgatttatttatccctgtattttattgtttgtcacttcagcctccaagctactttggcttctgcctggctcaggagacctggattctggtccctgctgtccctgcctggctgagcgacccagggcaggtcccgtccctgtctgggtgggcctcaggccatctggccgcctagcgagggtcctgctttcttcctgctgtcttgggaccaggcttctgctcctcctcagccagcggcagaagcagggctgatgctcagggaccccccaaccctcaaaccttgcctccgaggctgggcctgagctgggtgccccgtcgccctcccaggccactaggctctgactcttccagcacccatggatgtgccagaggcctctgggttggtttgcatgtcatttgcatatcgtttgcatgccctcatcccacccattctcagggcagtatgggaagccccaaggtgacctggccaagtagcaataatttgggtccagggtcacctattgcccccagaggcctctgaaccccaggctgggaccccagcacagaggcaataaaggcagtggtcccttcca

SEQ ID NO: 10550 - DNA, 5185 bp, Homo sapiens
gccgcctggctgtagagaagggctacatccctgaacccaggtgggacccgttcccgctgctcactgcggtggtgtgggggctggtgctgtggctctttgagtatcaccgatccaccctgcagccctcgctgcagtcctccatgacctacctctatgaggacagcaatgtatggcacgacatctcagacttcctcgtctataacaagagccgtccctccaattaatgcagccctgaggtgtctggctgtggctcaagatttggccccatgcagaccctcccaaaggatactgccttctcaagatcataggcctcagactccaactggtgttatcccagggttccgtttgctgaagtaaaaacactgattttaaaatcccagtgggtacctttgtatggtggcacaagtggccgaatcaggctgaggaatctacggcttggttccagctgtgcagctgacttctgtgagactggggccagccacactactctctaggcctcaggggtcaaggagctcagaggagggccctgaggtctctttccggtgggtatgttcattcttcaactgttcttatgtcacagagggctccttgctggtgggcagtgggttgtaaatactttttaaaaaacactaagttccttatctcagatgctgttctactggagaagttctagattcccactgtccaatagaaacacgtgagccatatatgtaattaaaatgtttctagtagctgcattacaaaaaagaagcctgggcactgtggctcactcctgtaatctcagaactttgggaggctgaggcaggtggatcacttgagctcaggagcttgagaccagcctgggcaacatggtgaaacccagtttctacaaaaaatacaaaaaattagccgggttccatcacctgtggttccagctgaggtgggaggatcacttgagcctatgaggtcgaggctacagtgagcaaagatcacgccactgcactccagcctgggcgacagtgagaccctgtctcaccaaagaaaaaaaaaaggtgagattaatcttcactatatattttaacacaaatttctaaaagttatttcaacatataattaacatcattagatattttgtactcttttttgtattaagtattcaaaattgggtgtatattttgccacccacattttcaggacccagtagccacatgtggctagtggctgctgtgacgggcaacacagatatggaacacttgtatcctcacagattattctagtggacagtgcagatctagagctagaggacatgggtttgagtccccactcccccactgtgtaaccttggggaaggttctggacctctcagagcctcaatttatcataaaatgaggataatcataatgccgtggtcctcactggacttgtgcaactaccactgatgtgctactaattactttcatttagtgcattcatacttccacttgggtgttttccacatattattattattttttttttttaagtagcgacagggtctcgctctgtcactagggctagtctcgacctcctagcctcaagcaatcttcctgcctcagtctcccaaagtgccatgattacaggcatgagccactgcccctagcctgcacatattatttttaaaccatacagtggccttgcaaatgtgtgttttcgtccccattttacagatgtagaaactgagggtcaggccaggtgcagtggctcacgcctgtaatcccagcactttgggaggctgaggcaggcagataacctgagatcaggagttcttgaccagcctggccaacatggtaaaaccccatctctactaaaaatacaaaaattagccaggcatggtggcacgtccctgtaatcccagctactggggaggctgaggcaggagaatcgcttgaacctgggaggcagaggctgcagtgagctgagatcgcacgactgcactccagcctgggccacagagcgagactgtgtctaaaaaaaaaataaaaaaagaaaagaaaagaaactgagaatcagagaggagagtaacttgcccaaggtaatacagctagtataacagccgaatcaagatttgaactcagattcgtctgatttcaaagcccatgttttttccagtgccttgtttcaaatttagaaacctaagccatgctatgcaaatgttagctcattataggatatgggccagaaaggggtacacattcaaatgcccataggggcctacaatgacatagtgctatgcgatgaggagtgatggggacatagggaactggagacttgtgtaccagtctgattttttcttttttttttttttttgagacagagtcttgctctctcgcccaggctggagtgcagtggcgcgatcttggctcactgcaagctctgcctcccaggtttacttacaccattctcctgcctcagcctccggagtagctgggcctacaggtgcccgccaccacacccggctaattttttgtatttttagtagagatggggtttcaccgtgttagccaggatggtctcaatctcctgacctcatgatccacccaccttggcctcccaaaatgctgggattacaggtgtgagccaccatgcctggccaagtctgcttttttcgaaaccacgatcctagaccaggcacggtggcttgcacctgtaatcccagcactttgggaggccgaggcgggtggatcacctgaggtcaggagttcgagaccagcctggccaacatggcgaaatcctgtctctactaaaaatacaaaaattagctggacatggtggcaggcacctgtaattccagctacttgggaggctgaggtgggagaatctcttgaacctggggggctgctgtgagccgagatagttccattacacttcagcctgggtgacagagtaagactctgtctcaaaaaaaaaaaaaaaaaaaaaaacacaatcctggacaaatcaaacaagtctccaggaaaatctggtccatgggctaccaatttgagaccattggtctggtagatacactttcattaatatacttactccatcactctttctatattttagaagttactagtagaaatgtatgcaggagtcactggagaccttattaaaatgcagcttctgattcagtgagctggggtggggcctgagagtctgcatttctcccaggctccctggtgctgccagtggtgctgctctgagtaacaagggggtggggaatgatatggagccgtccattattatcccatctgacaaatgagtcacagagcccttaggtaattgaggtgggatcagtctgattctgtaagctgtgttttcagccacaacatttactgcaaacttggagtaggtaattatgaagttcctttaacttgctgtggaggttgaatgagctctagagtaaggggtccgcaaccccggtaccggtccatggcctgttcggaaccaggccacgcagcaggagttgaaaggtgggtgagctagcgaagcttcatctgtatgtacagccactccccactgctcacattaccacctgagctctgccttctgtcagatcagtggtggcattagatgctcgtaggaatgcaaaccctattgtgaactgcgcatgcaagggatctaggttgcatgctccttatgagaatctaatgcctgatgatctgtcactgtctcccgtcacgccttgatgggactgtctagttgctggaaaacaaactcagggctcccactgattctacattatggtgtgttgtacaattatttcattatatattacaaggtaataataatagaaataaaatccacagtaaatgcaatgtgcttgaatcatcctgaaaccacgtcccctccccagtggtccgtggaaaaattatcttccccaaaactggtccctggtgccaaaaaggttggggactgctgctctaggggttggggagggcagagggcttgggccatcaccaggcaggttttatagcagatggtgggggtgccctgcctatagctcctctaaataacgactctggtgcacactagccagctttgccagtggccgcccctctgtctttctgcctgaggactctagcttgtcactggtgcctcctttgccagcctctggcaggcctgaagggctggagaatgaacacatccttggagcaaccttcaaccaatgactgataaatacccccactcccacagcccgcatccctcacccctcgggtgggataactcagaggtgcgtgctccacactgactcccagggccgcccagcagggctgagcctcaaacaccctccccatctcccttcctcatgcccctaccagtgcttcctgggaccacttcccatatgaaccacttgcactcaaacccttgtcttagagtctgctattgggggaacccaaactaaaactggcctctgtacagcaggttgagaggcaatatagcatggtggtcagggacataggctttggagccagagtgcctgggctcaagccctggccccacagtttccttgggcaagtgactgagccattctgtgcctctatttcctcattgataaagtaggcgttgtcgtagcacacacctcatcgagtggtgtggagggttaaagaatatgacacagttaaagtgagtccccaataaatgctgttatttctaagagcatccaaatgtagaggaagtgtgcccctgaggactgagcacaccctgcttttagcctgtcctgcccccagctgaaggtgaaaccttggccgcctgccctcctgaagtcccgccactgctgctgggggttggccaactccgctaccgactgtctctgctctctaagaataggtttccctcacagatggcatctctctggatgctgctagagcatctggtgcttccaactgcacactccagggaggaaggcagtgtggtctgtgccggggagcagggctctgccttccagcagatctgagaggagtcccatttggctccttcctagctgccctccattctctaagacctgtaaaacagggatggccagagggctcttgttgcacagtaagtgctatgcttcctaaatgctagttcctgaaatagaatggtttaacctctacttactaaacacctgctacaatcctgttaattcttttgacatgtaagactaaaataaataaataaataaataaatatatatgtgtat

SEQ ID NO: 10551 - DNA, 1049 bp, Homo sapiens
cagggcttggagggaccagggtttccagagatgctcaccttgtctctgcagccctggagccccctgtccctggccgtcctcccagcctgtttggaaacatttaatttatacccctctcctctgtctccagaagcttctagctctggggtctggctaccgctaggaggctgagcaagccaggaagggaaggagtctgtgtggtgtgtatgtgcatgcagcctacacccacacgtgtgtaccgggggtgaatgtgtgtgagcatgtgtgtgtgcatgtaccggggaatgaaggtgaacatacacctctgtgtgtgcactgcagacacgccccagtgtgtccacatgtgtgtgcatgagtccatgtgtgcgcgtgggggggctctaactgcactttcggcccttttgctctgggggtcccacaaggcccagggcagtgcctgctcccagaatctggtgctctgaccaggccaggtggggaggctttggctggctgggcgtgtaggacggtgagagcacttctgtcttaaaggttttttctgattgaagctttaatggagcgttatttatttatcgaggcctctttggtgagcctggggaatcagcaaaggggaggaggggtgtggggttgataccccaactccctctacccttgagcaagggcaggggtccctgagctgttcttctgccccatactgaaggaactgaggcctgggtgatttatttattgggaaagtgagggagggagacagactgactgacagccatgggtggtcagatggtggggtgggccctctccagggggccagttcagggccccagctgccccccaggatggatatgagatgggagaggtgagtgggggaccttcactgatgtgggcaggaggggtggtgaaggcctcccccagcccagaccctgtggtccctcctgcagtgtctgaagcgcctgcctccccactgctctgccccaccctccaatctgcactttgatttgcttcctaacagctctgttccctcctgctttggttttaataaatattttgatgacgtt

SEQ ID NO: 10552 - DNA, 1419 bp, Homo sapiens
tttgctaatcactgattttgcaaagcttgttgtggagatgtggctggacaggtttgccatcagagtggatataccgttgtattaaaaacaagataaaaaagctgccaagatttttggcgagtggttggtctgaagtccttgcaagacgctgatgctcaagctgttgacatactcattgcctactttaacacctgtcagagaaacgtgatatggggtaaggaggtgcttttttaaaatcgttcatagacttctgtaaaatgcaagataaattaaagttattataacagtgattctttcaatttggtttgtccttcagttttcttttctataaatgtgcttggtgaaatcagcaagaaaccaaccatataaaacagtgtgtgccgggctctgactgagaaactgaacaatggcaggcgcttcatctgggcagccatttttcttctctgcttctcttgagatacatagttaaagtagacacggcctcccacgcgagtgtggtgggaccttgagacttaggaggattgcctgttttcagtgtccagggaatgactccatagatttgaattcttttccgtatgtggggatggttgctactacctcaccgccaagtcctcccccagctgttaccacatgagggaatacaaggtgctaggtaccctccttcctcgttggccactaagaggtcttagaaacatagcctgtaaatgtgtcttgtaactggcacactaaaaaagatcctagttgagcatctctcttggtgaggaagcgatgtgtgtgcggttcaggaaactcctccaagaggaggaggagtccaaacagggatgccagaggaagctttccgttttcctagccaacttgtgttctgggtttgaaaaagacccaccacaaatgctttttctattttctgatttaaaagtcgcttttgaatatgaccatgagaaaccaagaaatgctgcttgtgtggtgctctgcttcctgaggatttggctggaaggggattctccgctggcacatgggagaaggccatcttctgtgtcggtgctgtgatctgccttgttctcacttgctgaggataagggcatacacgctgctcctcgctttcttgttgcccgacttcgtactaagcagctcaggagcagtcactcagacccaaatgtcttgactgtgttgtttttaatcactgtgacccttaaagtacaggccaagtgttgtcaaacaccttggctaaaacagtggagggtgatgggtaaagcagtagagggccctcaacccacacactggctgaaactgccaccaactgccacgatgaacccaactgctgtttatgcccccattttcctttttttgtatctacacccacacgattcccaatgttggatatttctacatgaataaagcaaggatcagtgcctcttatgt

SEQ ID NO: 10553 - DNA, 764 bp, Homo sapiens
gagccaggtctgcgtttcaccctccagctgctgtccttgcccaggccccacctctcctccctaagagctaatggcaccaactttgtgattggtttgtcagtgtcccccatcgactctctggggctgatcacttagtttttggcctctgctgcagccgtcatactgttccaaatgtggcagcgggaacagagtaccctcttcaagccccggtcatgatggaggtcccagccacagggaaccatgagctcagtggtcttggaacagctcactaagtcagtccttccttagcctggaagtcagtagtggagtcacaaagcccatgtgttttgccatctaggccttcacctggtctgtggacttatacctgtgtgcttggtttacaggtccagtggttcttcagcccatgacagatgagaaggggctatattgaagggcaaagaggaactgttgtttgaattttcctgagagcctggcttagtgctgggccttctcttaaacctcattacaatgaggttagtacttttagtccctgttttacaggggttagaatagactgttaaggggcaactgagaaagaacagagaagtgacagctaggggttgagaggggccagaaaaacatgaatgcaggcagatttcgtgaaatctgccaccactttataaccagatggttcctttcacaaccctgggtcaaaaagagaataatttggcctataatgttaaaagaaagcaggaaggtgggtaaataaaaatcttggtgcctgg

SEQ ID NO: 10554 - DNA, 323 bp, Homo sapiens
gcctggctggcacagggctgcatggacctcagggggctgtggggccagaagctgggccaagccctccagccagagttgccagcaggcgagtgcttgggcagaagaggttcgagtccagggtcacaagtctctggtaccaaaagggacccatggctgactgacagcaaggcctatggggaagaactgggagctccccaacttggacccccaccttgtggctctgcacaccaaggagccccctcccagacaggaaggagaagaggcaggtgagcagggcttgttagattgtggctacttaataaatgttttttgttatgaagtct

SEQ ID NO: 10555 - DNA, 547 bp, Homo sapiens
acaagcaggactgcgacttgatacttggaaatgtgtgtgacttttacaaagagcaattttgagctgtgacttttttaaatcaatttctgtacagttagtaattttaataatgtggcccttttcctagtccctgcaacctgtttcataaagtgcaatggggaaagcaggactgttgagcccttttggtgttgcgagttgaagttcaaggtttctaaaatgttgtcttgtattgaaaggagctaatgccattataaatgttactagttttcacatttcctaagcagcctagagtacagggtgagcatttttagatctcctaatgatgtattgtgccgtggaagtactgtgtgtgaatagcagtagtgggggcaaaagcaatcttctcatttggaaatgttgtaaataattttattatatagtgttttggatgtatttgttgtagaaatggaccagtgaataaagagaatctaaggatttgtacaatgtgaaataacgtgttaaataaatgtcattgtcatagaacataaagttatgttattggtaaggg

SEQ ID NO: 10556 - DNA, 606 bp, Homo sapiens
agcagcggggtggggcggggtctctgctcccccactttgcatgttcccagagtccctccttctcccaggtttggtctcagggggaccccagggatgccccagatcaggggccagaggggatgcttagcaaacccaatcccagagtaactggaaaattctccatcaggaggcctgtggtggtggtggtggtggtggtggtggtggtggtggtggtgagtgtcagcatctacagtacagccaggcaggcaggaccttgaggaatcagactatctgtctgtgtgtcacctctcctccttcagccatgctggccccgagcttagggatgtgcttgcaaacccttctcaagggtctcacaaccccaacatcttcagactggcctgacctgggccttgtcttccagttcctttctcccattcccagcctcatttcttaaatgactaggaattttttaatggaccatcatagggagggggtgctcctcttttcccaccaggttgaggtgggggccttgcatcgggggtccccagggtatggggtaggggtgggggtgggcaccagctcaggggcttccatttgcaaagggaaattaaagaaagaatgttgctt

SEQ ID NO: 10557 - DNA, 394 bp, Homo sapiens
gggcacaaccaggccacgggaccttctatcctctgtatttgtcattcctctcctagccctcctgaggggtatcctcctaaagacctccaaagtttttatggaagggtaaatactggtaccttcccccagctttccatctgaggaccagaaaagttgtgtctcccttagatgagatctagacgcccccaaatccttgagatgtgggtatagctcagggtaagctgctctgaggtaaaggtccatgaaccctgccccactcctgtcagcccctcatcagccttttcagcaggttccagtgcctgacttgggataggactgagtggtaggaggagggggagtggaggggcatagcctttccctaattctgccttaaataaaactgcattgctgattc

SEQ ID NO: 10558 - DNA, 734 bp, Homo sapiens
ccttgggccaggcctcgggaggctgctgggccagtgtgggtgagcgtgggtacgatgccacacgccctgccctgttcccgttcctccctgctgctctctgcctgccccaggtctttgggtacaggcttggtgggagggaagtcctagaagcccttggtccccctgggtctgagggccctaggtcatggagagcctcagtccccataatgaggacagggtaccatgcccacctttccttcagaaccctggggcccagggccacccagaggtaagaggacatttagcattagctctgtgtgagctcctgccggtttcttggctgtcagtcagtcccagagtggggaggaagatatgggtgacccccaccccccatctgtgagccaagcctcccttgtccctggcctttggacccaggcaaaggcttctgagccctgggcaggggtggtgggtaccagagaatgctgccttcccccaagcctgcccctctgcctcattttcctgtagctcctctggttctgtttgctcattggccgctgtgttcatccaagggggttctcccagaagtgaggggcctttccctccatcccttggggcacggggcagctgtgcctgccctgcctctgcctgaggcagccgctcctgcctgagcctggacatggggcccttccttgtgttgccaatttattaacagcaaataaaccaattaaatggagactattaaataactttatttt

SEQ ID NO: 10559 - DNA, 66 bp, Homo sapiens
ccactggataatttttttatttttatttttttgaggctaaactataataaattgcttttggctatc

SEQ ID NO: 10560 - DNA, 275 bp, Homo sapiens
gtcaccttccaagttgttccatgggctcctggctctggactgtggccaaccttctccacattccgcccaatctgtaccggatgctggcagggaggtggcagagagctcactgggactgaggggctgggcacccaacccttttccacctgtgcttatcgcctggatctatcattactgcaaaaacctgctctgttgtgctggctggcaggccctgtggctgctggctgagggttctgctgtcctgtgccaccccattaaagtgcagttccctccgg

SEQ ID NO: 10561 - DNA, 802 bp, Homo sapiens
ccaaaggactggcatcgggggtgcactggcaagggcaggcccctcctctgtccaccgagactctggacttgctcaggtcccagactggggaagggaggtgtctagaaacccaggtcagacacactctctgggctcaagattcttgtgtacacacacacacacacacacacacacacacaccctaactagtatcttcttgaatctaggctgtgtttccagccctgtgctgggcctgtagagctgacaggtgggtcacactcagacctggggacagaggtgaaatgcacaagctgctggagaaggggtcagagccatatcaagttaaaggttaaccagttacagagggtgttagaaaacaaagggcagagagtcctggagaaggtggagtagtcagaaaactttcttagaggagatggaggtggcctttgagccaggccctgaaggatggggaggttttggacagagggaggagagagttagaaaaatttttggtagagagaatcaggtgaaagagatgccctaaagaggactgagtgggtctgaggtgaatgagtgaggaagagcagagtatgtggatacccggaaacacacacacacacacatcatcattatcatcatcatcattgtcgtcgtcatcatcttgctgagtcatcatcatcatcatcatcattgtcgtcgtcatcatcttgctgagtgtctcttgaagtacaggctgtgacaggttgtgggccattttcctgaactcaccacttacccgggatagtaaacatgatacacatcaataaaggcagactttattgtg

SEQ ID NO: 10562 - DNA, 1355 bp, Homo sapiens
tgggctgggccctccgcacggcccgccagctggcttcgaggaacctccaggagagaagtgcctgttggtccaggaccctgcagaaagtggcctgaactgacctctgaacagcatctgtcaaatacctggccccatttgtgttgagtttcctcttagtgtgcccaggagtctgatctgctggggtacagggctgggagaacccctagctctcccggggtgtcctctcccttaggggaagccccgagtgagagtcccccagcacacactccccaaccccctccagcaactacatgtgactgatagcttttcccaaaggccaaggaagggatggtgtaggttcaaaagggaaaccccccagggcctgctgtggcctaggagcagattgtaatgctgccgagtccggtcggtgaccacgcgttgtccctcggctttcagccatggggttgagttggccattaaaagaaacagagacttctctctgccatggcccttctttattccagggacttagaaacttgcctgagatggtggacgcagtaatgagggcaccgcgcagctcagttagagacggagaaagggaagaggctgggatggtctctgctgctcttgcctctagttcatggagatgtgtctctgttcaggccaagatacagccagccaggcctgtcgtctgggacccaggaggcctctgatgaccaagggctttcacatcctaagtcatttggaaggaggccttgagaacaaagtcacctttgtcactcccagtgaactgaatgaggaacatgctgtctcctgtcttggcctcccctttcatgagatactggggagaagagaacattcctcctggcttagttgtagcagacccagacctgtgcccagctttggtcccccttcccaacttctgaagcacgtgctgcagagccaccttggtctgagcacctgaggaccagcccctcctccctcagtgcgggtcatctcttgggggattttcttaaagtgaagaaagggggtggggaaccatattgcccctccctcccccatcaaacttccttcatttaacttgctataaaatgagtcatataaagaaactctatatgggtgaggtatatcccacttctgtgaaaacattacaaatcaaaccgcttctctcagtttatttaagatgcttttgttgcgagcggagctctagagtgaagcctcctgtgtgtgtgtgagataataacaccttgtaactcattacagctgggcactatttacataaaccagagctgagccaggcaggaatttgctgattaatttatttttaatggagtgaagtataccatgcaccaaaataaactttactgtgtgtacct

SEQ ID NO: 10563 - DNA, 558 bp, Homo sapiens
cagcactggccctctgtcttcctgggtggcacatcccaagagccccttcctgcactcctggaatcacagaggggtcaggaagctgtggcaggagcatctacacagcttgggtgaaaggggattccaataagcttgctcgctctctgagtgtgacttgggctaaaggcccccttttatccacaagttcccctggctgaggattgctgcccgtctgctgatgtgaccagtggcaggcacaggtccagggagacagactctgaatgggactgagtcccaggaaacagtgctttccgatgagactcagcccaccatttctcctcacctgggccttctcagcctctggactctcctaagcacctctcaggagagccacaggtgccactgcctcctcaaatcacatttgtgcctggtgacttcctgtccctgggacagttgagaagctgactgggcaagagtgggagagaagaggagagggcttggatagagttgaggagtgtgaggctgttagactgttagatttaaatgtatattgatgagataaaaagcaaaactgtgcct

SEQ ID NO: 10564 - DNA, 3563 bp, Homo sapiens
ccattcacatcattttttatagggtagatcttcatattgctgtgattaatgcatccagattgttttcctagtatttccaggttagaacctgtggattgtttcaattgcatatagcttggtttccataacatagagcattggttgactgtttacagaagactcactcaccaggataaacattgctgtatgttacagtaaagctatctggagagaacacataaatgattttggcataccattagagaaaccatttgtaaaactcaaatgaccacataaagcttatcaaggagtctagattggttttgttttataccatatgggatgaagaaaatagaaatgtcagtagaactcattgagggtgctcttgccagctgctgaaaatagaagttggctactctcagaatttggtttaaagctggacagatttgctttgttatagggtaaagctttgtctaaagtcctcattttcttttaaaattgaataaaatttctgtatacagattcattgtatgtacctttattgcttcttaagggtccttgctgtatagacagtcctgcttcagaagttgctgctttgtttgtctaattgactcatttgtaaatgagcagaactgttttgttggtttttttccctaaatataaaagtccacacttcgtttgtgctataacctcaaactttgatttctaatgtcacacttaaaactgtgtggaataagacttttgccataaaaataaactatggagtcctttatctaccagagcctttttggtttgaccgccacgatttaggttagtcagtttaaaaattgttcatgttgtttggatggtatcgaaaaccagaaaccacttttaataatgtgtttaagatacttgatttgaagtccttttcatatggactaattgtagtatcaatttcctcctgtcccgattatgtgaaattttggcctttaaacaaagaggggcccattcataagaaagtgttatatctaggtttttaaaactgaagttgaaattatctttgttagcagtagtagtatagaataaaagatccgtatgctggttcgtagattgatacgtgttagtcctgttatttggaggctttttggcatagttgttcgatcaggagcctgtttactaaaagtcttcatacagagtacaagtgcagccgccagaggagaaaattgagattcttgaccctttcatactcttttctttggtattcaggacactaaggcaggaggaccacatgagttctggttggtaagtgtccttgtcatgaaaacacttgccttacaaggctctaattatgatttccctagtcagtgctctgaagatgtgtcacattatattataaacaatacggaaggggagataggtgagatgatatgaaaaacaaattttctcactgtcataaaaggctctaattatggttactttccttgtgatgaaaaacttggccttacagggctctagttatggttactttccctagtcaatgctctgaaaatgtgtcacattataaacaatacagaaggagagatagatgagagatcatgaaaaccaaattttatcttttacatggcccctttgtcttcgtttgaaacatccccaacatttcctacaaatcagcgtagttacaaaggggtcagtcttttaaaataagtatttcctattaaactatatatatatacagtgcctttttggtgttgtgagtcagtggaacactgaaatacagcggttgtgtaatttaagagtggcaacagtttcatttgataagatttgaaaaggctttttatcactacaatcttagaggattgacagtacaggatttttgtttaagagaaggattgtttagactcaagaggtgactatgttgtgggtcttttgataattcatgaatacagatttgctttgaccgatcactagatactgcctcctcaatttcaaaagcaatataacgtttgtatatgctgtttaatttaagttaatgttaagtaatcatttctcattccaaagacaatgcaaaaaacttcagcactgcttgagagttgtatttcagccacagatattttctccattggaaagctattttcattttagaaaaatgggttgtttgaagatgaaagtcttttatcttttttcacaatttattttggttatatgttcgtacattcttattaaatatttcatacactttattgcaactactttgttatttctacatcttagataaatgctgaaaaggaaaacgatttcattgttcatctaattaaataaattaaaagagcggtttgtgtagaaattggagagaactatgttttatatgaatcacaacagtgctcgttgtggactgtaattaaatgctttgccctctggaacttgatttttgtgtatctgagatttattaacagtgctaactgctaaggatactgtttatcttgttctgggcattggagtttcagtttttaaaaaattcttgaaaatgtattctgtgaaactactcatacctctcttcctgcgaattttctcctaagaactaggtttggggtagaaatgaattgacattattttctcatttgctttgtatggtatgaaggatttgtaaagctttgctcaaagttgtgtgcatttgtaaacactatcatgatattttcaattttatgtgtaaattttattgtctgtttttggtgactctgacattaatggaagagaatattttccattagatttaattttttttcctctcccttctgattttttttttattggtgttcatttttcttttgatttaaaggattagagaaatctacaaatgtatgtcataaataagcaaatttgtaaacttttctgaactttagtgaaacatttagttcacaagcataatttggaggtgtgttctgtgtttacacagtagtttggatgtacaattattattagtggctttttaaaaaatgaaacagtgttaagtgaaatgtagttcctagctttgtactccaagttgtcaaagcatcaacaatgaaaattcgattaggaaactttatttaaaatttcaggtagtaatattcagtgtagttaaggccagtcttaacccactggatgaaaatctaggactgtatggaagtaagcaaacattacatttttaggtggaaatagtcagccttgcataaaaacaaggatgcgtgaaagccttaaattccagctcccttttactggagtctgtggttgtgtacaggtatgggccaagtgtaaaatctcatcaattttaagaacactcgggaaatgagtaaagaaaatgtaaaattgctgctagtcaaatcttttggaaagaatttctggaagtggtcactttaaaaattattttccacccttgcaaaattgccacatttaaattgttttactggcagttctatagtagtccagactttagaaaccaaacacaacaaaatggcttgttgccaatatggccacaacattgccagcaaatactgccttggcatcactcagcagaggtttttgtttataaagatgaagtcttgaatactgttcaataaacttgtcaaaaa

SEQ ID NO: 10565 - DNA, 195 bp, Homo sapiens
gttcccttggaggctgtggcaagtcctcaatcctgtgtcccagaggtccctctgggccacaacccaacccttctcactctcctcagtgctagcactttgtattttttgatacttttatacttgtttctgcttttgctgctcttgatcccacctttgctcctgacaaccctcattcaataaagaccagtgaagacc

SEQ ID NO: 10566 - DNA, 933 bp, Homo sapiens
aagaatagggccctgactttgtgctggtctggcccctcctgcctcaccaacccgtgcacaaccagacaccttgttacacctagtggatgctctagattggtatagaccagttgacttcagcatcagtccacctctatgacagaaacacaagaaaactgtctttccctagcttcagttccttgggtgtggagcactccccatttcttctcgggtcttaaagtgtgtggacattttcatcccgaagccatagagacatttgctgtcatattgctgctgggcacatctgtgctcttggtgaggagagcaagaggaaccagaagaagtctctttggtcagggaccatgatgctctacatggacatttgagtcttcgtcttctgctgctgctcggctggaccagcttctttaacagcaagcataatccacttcaatgtaatattttctgtagctccaaaggctatctcttcatattgactgcagacagactgaatggacagtttcttagagggcttgtctcctttctacccttgtcctctttcctttcctttgacctaatggagctagaaatatgtctgtgactccaccagttattctaataatttgttttcttgaaaattgttaatttcaagactggagaaataaactcaccttctatttactctgtgactttatgagaggttgagggaaaagtggaagctgtacttgggaattgtggagaagaccgccactccatctgatttgcataaatgactcagtgggcttttgtatctcttcatttaagaattatttgaatgcctgccaggagccagatttgttctgggtattaggaatacactggttaacaggaccaaaaaagaccctgccctcactgagttttaaattttagtggagagatggaaaataattaaacaaataaacaatgttatagattgtg

SEQ ID NO: 10567 - DNA, 872 bp, Homo sapiens
aggaagatatagtcccttatgtatatagctttttttctttcttgagaattcatcttgagttatcttttatttagataaaaataaagaggcaaggatctactgtcatttgtatgcaatttcctgttaccttgaaaaaataaaaatgttaacaggaatgcagtgtgctcattctccctaaatagtaaatcccactgtatacaaaactgttctcttgttctgccttttaaaatgttcatgtagaaaattaatgaactataggaatagctctaggagaacaaatgtgctttctgtaaaaaggcagaccagggatgtaatgtttttaatgtttcagaagcctaactttttacacagtggttacatttcacatttcactaatgttgatatttggctgatggttgagcagtttctgaaatacacatttagtgtatggaaatacaagacagctaaagggctgtttggttagcatctcatcttgcattctgatcaattggcaagaaagggagatttcaaaattatatttcttgatggtatcttttcaattaatgtatctgtaaaagtttctttgtaaatactatgtgttctggtgtgtcttaaaattccaaacaaaatgatccctgcatttcctgaagatgtttaaacgtgagagtctggtaggcaaagcagtctgagaaagaaataggaaatgcagaaataggttttgtctggttgcatataatctttgctctttttaagctctgtgagctctgaaatatatttttgggttacttcagtgtgtttgacaagacagcttgatatttctatcaaacaaatgactttcatattgcaacaatctttgtaagaaccactcaaataaaagtctcttaaaaaggcca

SEQ ID NO: 10568 - DNA, 121 bp, Homo sapiens
gcggtggagctgcgggcggccagggccgggcgctctgtgcggactggggccatgatcgggcccgggggcctgagcctgggaccccaccccgtgttaatgaaaaatgagttttggcagcgcc

SEQ ID NO: 10569 - DNA, 1450 bp, Homo sapiens
agctgccacaggggaggagtctcttctcagtgagggtctccgggagtccctcagcttctacatcagcctgaatgacgaggctgtctctttggatgatgcctaggcccaaaggagaggccaaaagggaaaccaaggctgcacacctagaaccccaattcagcctcctgggcaccccagaggcaaggctgtgcactcagggagggagggtgggacacagaggtgcatctagggtcccacctgtacccttgctctttcctctcttagcccttagaagtcacctacttccttccagtgccatgatcccacctgcgacctctagtgcgagtgcagagaaggtgggaccagggccagggttccaaaaagagaataagcctcctggggggtctgacctagttagttcttgagtttggggtttccagtaccatctggatgccctgcctgttgagccccattctacatccccaccattaaccaggccccacccacaaggtagaaacaacccctagagtcaacgagaaagtcattttcagaaaatctacaagtctcgttgagaccaccaccatacctcagaaggtaggactgtggcctagaagggaaaggaaagctgagatgatgtcttaccgtagcagcagatcttggatggtccaggctctatgtgacctccagagcaaagagaaagacttcggacagtctaggtcctcaaatgtcccccattgaggacaacagccccagctctttttcttttttttgagacggagtcttgccctgttgcccatgctggagtgcaatggcacgatctcagctcactgcaacctccatctcctggattcaaacaattctcctgcctcagcctccagaatagctgggattacaggcgtacaccaccatgcctggctaatttttttgtatttttagtagacatggggtttcaccacattggccaggctggtgtcgaactcctgacctcaggtgatccacccaccttggcctcccaaagtgctgggattacaggtgtgagccacggcacccagcctagctctcagatctctatttcattttgtggcttaccattccctagcacactggccttgccatcttgtggccgaataaaaaataacacctcttaagtctagcacactgcagtgaggccaggcacctcagtgctgggcaggggcatcagaaggtgctaagccctctctccacaatgccaagacggagaccacagcctacaccaaatccagcccttgatttccctgctgcctccataaacagaaagaggtctgctggatccgctaagggatcagggagaggaagaaagagggatggggtgggaggcaccccctccagtgctcctactggttcccaagctacaggtggggtgggaaaggctttatcaggtatcatcaacaggttctcaattaaagatttgatttattcaagtatgtgaaaa

SEQ ID NO: 10570 - DNA, 1753 bp, Homo sapiens
gcagatgctcctcccctggaccattgcaagtccatccttcaaatgaccactccataatataacatttcatccagtaaactggcctctactatctttaactcatgcatggccactgaacctctctctagtagcctggatttatcattctctctgcctgcccacccccttttttgtatagcccaagaaccacttccatgccatactgtaacattccaacatctttagctgatcagatctctccatatcctctcttgccagctttttcccgtgctcccccaactatgtatcagataagattctttgatcccgactctgtgtgtgcgagcacgcgtgtctgtgtttgtgtgtgcatagttctgtggttttagacacgctttcttgtagtgcttctgcaaaaaacaaaaaagggacttattttgcattctcaatggtgtttttaagggaattaggcagaacagatttctaggttgggtaggccactgcattctcttttgtttgcaaattggtcaacaaaatttgcaaagtgatttcaggagagagcagctttgaggaatgtggaaaatcataattgccgtctggaccattgattgattgtgaccagtagcagaagggtgcctgttacatagagaggctccttctgtccaaatgaatttctgtatactcttctataaataaaagggaggaatatattctgctggaagcccatgaaccatcgctgaggttctgatacaacatagagttttttccaaggagtgaatgtggtttaattactggactctcttagcacaggaaggtggaaacaaaatgccaggcctctgctctgaagagcaaaactgctgtcgctgcagtatctgataccagacatccacatatccacaagaagtgcctcttaggtctgtgacagagagtgtgtctccattcctcagttcccagaaaggggagaggtttggcctaaaaagcatgtagatgggggagaaatgggtggggggagaggaacagccattaacacagtatcatgtttaacaagtatagccttgatttcagtagatgtaatggaagccaaattaaattgatacagaacccatttctcagagtctttttttttttttgagacagagtctcgctgttacccaggctggagtgcaatggcgcaaacttggctcactgcaacctctgccccctgggttcaagcgattctcctgcctcagcctcccgagtagctgagactacaggcacctgccaccatacccagctaagttatgtatttttagtagagatggagtttcaccatgttggccaggctggtctcaaactcctgacctcaggtgatccacctgcctcagcctcccaaagtgctgggattacaggcatgagtcattgctcccagccattagaaagattgttaatcctatgaactcccttttgtaggagagaaagggccaatctgtaggggtagccctgtccaggtaaagttgttttcagcctcatgtctactgttaggtgagggagtcacagccagacagagagtattgctggagggtgagagaattgtggagaccaactaccacatagcaagagcccagctcttgggagcattgagatgtaagctcagggttacacagttccaaatcttgggaaggggcttttcagacagactgtttgctttctgctgagataaggaatgcatcactctgccagagtatgactttttacagattattaaataaagctgcatatgtctcattgttacctg

SEQ ID NO: 10571 - DNA, 743 bp, Homo sapiens
ctttatgagagtttctgccacaaggtgcccaagaggagaggaatgggaagagtgccccagcacgtggtgactgcgtgatttctgctcgttgcctttgaagataactggcaggactgactgtagaacactttgacttttttcaaaaagtgatggaatttgtacatccaaatgaatattgtatagacaattttcccaggaatgtgcaaaatgcttgaaagttcaaacttcttttttgaaatgatcttcagatccagtggcccattcttttatctttatcctgtgaaggtgtttttcaggttttgaaacaatccaaaaatcatttaggaccaagtctaaggaaacattttagtggccaagttggattccgattgtaaaggaatgatactaattttctagcatggctctgaaggtgattttaggtagaagagttttgaggctgggcgcaatggctcacgcctgtaatcctagcattttgggtgactgaggcgggtggattgcttgagcccagaagttgaagaccagcctgagaaataaggtgaaaccctgtctacaaaaaatacaaaaagttagctgggtgtggtggcgtgtgcctgtagtgctagctactcagaaggctgaggtgggaggattgtttgagcccaggaggttgaggctgcagtgagttctaattgcgccactgcactccagcctgagcgacagagtgagacactgtcttaaaaaaaattaaaaattgtaaaaaaatg

SEQ ID NO: 10572 - DNA, 332 bp, Homo sapiens
acccccttcccactcagcctggtttcctggtgagggtcctgcagtcatgggccctgggggacccccagggcaaggcccatgggagggaagggaccaagggcatccttgggccaactgtccacctctcttgtccactattctctcctttccacttctgtcttcaaaaggctccttcctaggatggatcgggtgctaggacaactgcagtccaatccaccagctctccctgcccctgtgtcttatttcagacatgagaataactgtacagtgtaaacttataaagcgtttttaatggttgtagattggaaataaagtatgtcatatgaacagct

SEQ ID NO: 10573 - DNA, 690 bp, Homo sapiens
atgtctgtagtcagttgtttacaaactccctctcctgcacaattcatttagaggcttcaatcatagaattctgcaaattaatgacaactcatgctttaattttgtattttgaatgtacacgcatgctgaagctaagtaacttttaatcaaagaaataagatggtattaggcaaatcttactatactatgaaaagcattaccttgcctatttttaatattattaaagcctttctccttcagtagtctattttcttagaataacaactcttttatctattctgaactctattttttttcttttttaagagacaaggttttgctctgttgcccagcttggactcgaactttcctgggctcaagcgaccctcctgcctcagccccccaagtagctgggactaaagtcatgtgccaccacacccagcttactctgaacttttatgacagatgattgttttttgtttttaatgtagaaatgagacaagggtacaaattggaactagaaattgacattgtcattgacaaacatggctaaaaacaaaacatcaaatcctgcccccgtgaagagttccctgtcacctcaagtttgaggatagtcctctaagagtgacctaagcataagtgaaagacacctcccctcacccttctagccccctacaaggtgccaggttggggtaaagagttggagatgat

SEQ ID NO: 10574 - DNA, 983 bp, Homo sapiens
tgttgttcttgtttctatgataaaagcactttcagattgttctgcagaaagttggagctctgtccttcaaaccttttagccctatagatgataaatatcactgggttataagaaaaaattgcacaaaaattatgtgctttttaaaatatttatccaaaatgtagttgacagagatgtattttgagttggattggaaaggaatattttaagtgccttttaaaaatactaatagtccggccaggcgctgtggctcacgcctgtaatcccaggactttgggaggccaaggcgggcagatcaccggaggtcaggagttcgagaccagcctgaccaacatggagaaaccccatctctactaaaaatacaaaattagccgggtgtggtggcgcatgcctgtaatcccagctacttgggaggctgaggcagaattgcttgaacccaggaagcggaggttgtggtgagccaaggttgcgccactgcactccagcctgggcaacaagagtaaaactccatctcaaaaaatatatatatatatataaatagggaattttttttaatgtttgctccttgagttttcaagatgaaataaggagaaaccccataactttttagctctcttttaaaaataaatgtctccttctgtgttctgtaatatgaggataaataatctacttttgatagcatgctttgagatatttgtattcttaatttaatattgaaggaaggggttggttcccatagtacctggccagagggttatataccatcctgtctctggcccactgtggtaattccacatccaggtaccaccgccattcagagttgtctcaccccttctcgtgccttttctctccttgagctttataaacagatttgtacctgagccccagtgctacactcatccttgctttccagccctaagccatctcagcctgatgtcacaacccaataaatggggcactttcttcttttgtaaactattatc

SEQ ID NO: 10575 - DNA, 119 bp, Homo sapiens
ataggctaaaagttggatttcagattaacagtcagtaactgttaatcctgcctctttttttttttttcttttttggccaagttactactatactaataaaatatgaaatgttaactatg

SEQ ID NO: 10576 - DNA, 199 bp, Homo sapiens
gctttgcccctctaatgtcagcccctcccaggatgactgaccccacaccccagtggagagtgttccttttggtccctctcaaagcctgcatctgtcatccatttataagtctacagtgtttctgccaagggattgacatggagggagctggggagagtgaaggagtcagaatgccttaatacaaactcgtccaacctgc

SEQ ID NO: 10577 - DNA, 192 bp, Homo sapiens
agacagaatcttgctatgttgtgcggcaagctagtcttgaactcatggcctcaagtcatcctcctgtgtcagcctcccaaagtgctgggattacaagcatgcaccacggcacccagcagaattccagtcttgagaaacaggtcaaggacagcttcaaaagagattctaaataaatgttaatgttacaatgtt

SEQ ID NO: 10578 - DNA, 124 bp, Homo sapiens
agattcctcctgtgacccgggctacctgtagccaaaatgcaactggatccagttaatcctctcatttctgacccactttttcctttgaaaatacaataaaattcccccataccggtgtgcattt

SEQ ID NO: 10579 - DNA, 1493 bp, Homo sapiens
cggcctgccctgttagctttccaaggaagcagaagacgggaggggaggcattgacataggtcataaagcattggagtttcaaatcccgcagcctcgcgggtgtcacattcctgacggcgcctttttggcctgtgatgttttatccttacaatgtgaataatggcactgaccggtgcttttattgtaaagtcctatagtcgtgggtggtcttgtggttgtgtgtgttctgtccccatctaggtcctggctggccgcatgaccacccctctcgcctcattactgtgaggagtctgggtccatcctggtcagctgccccaatgtgacctggggcagataaaatgccagtctcattgtcacctctgtgacccctccttgtcagggtctccttccttcccagaatgttactgactcctcagtccctcttctggtttccctttatttctcttctacccttttccttttttggggagtacctgtccaagacagggctcatttttgcacttatctcgaatttgaagagattgctgacgcccgagagcctcgctttttcatccttctttccttgttcagcaggctagacagaaacatgtcttgactgttagttgtccacaaatcttcagtattttctccacttcatttttaagaaaggaagcaacagatagatgttgctctttcacctgggtgtctgggctcaagctttcccgcccagcctcacttcctttgcccttcctcctgcctttctcaactgtcccaaggagggggcctcattgtgtctcccgtgcatgctctgcagcattgaagtatggtgtgttcacgtagttctagcagtccccagctgagtgagtgggagagtacctgtgtgtttcgtaacggccttgatccccttgatagatgtttggatattttttggtgtgccctgtgtgtgtgtgtgtacaaatacatgtgtatattccttttaaagaagctttatcgaacgtggtctgattttgaggtttagcaatagctagctatatatggtaggtgccgctacagtttttatttagcatggggattgcagagtgaccagcacactggactccgaggtggttcagacaagacagaggggagcagtggccatcatcctcccgccaggagcttcttcgttcctgcgcatatagactgtacattatgaagaatacccaggaagactttgtgactgtcacttgctgctttttctgcgcttcagtaacaagtgttggcaaacgagactttctcctggcccctgcctgctggagatcagcatgcctgtcctttcagtctgatccatccatctctctcttgcctgaggggaaagagagatgggccaggcagagaacagaactggaggcagtccatctagggaatgggactgtgaggccatacttgtgaaacgtctggactgctattctagagcttttatttggtgtgttcgttgcacagctgtttgaaatgtttaataaagctttataaacttt

SEQ ID NO: 10580 - DNA, 433 bp, Homo sapiens
ccctgctcccccaccacagaggccaccgatccctcccctactgccagccagaagctgggctgaccccaccccggccataggcggtggcagcggcagcagagaaggtgaattagttagccaatcgatttataaattgatcgatcacacaactgcttagaaatggattgaaggaaagtagctgactattatttatgtttcataccttgtgttgtcaagtgacattgtctggtggctctaagggtttaaccccttagcctaccatctctatagccccagctccctcacaggccacacacacacacacacaagaggtcagttcccctccatctgcatacacctccctgtcttcaaataatgagatggaactaatttgttttacctaacctgatctttgggaaacaaacggaaataaagacacttcttggatgaaaag

SEQ ID NO: 10581 - DNA, 1756 bp, Homo sapiens
gggacccctgctcccagcctgctgagagcccccaccttgatcccaatccttatcccaagctagtgagcaaaatatgccccttcttgggccccagaccccagggcagggtgggcagcctatgggggctctcggaaatggaatgtgcccctggcccatctcagcctcctgagcctgtgggtccccactcaccccctttgctgtgaggaatgctctgtgccagaaacagtgggagccctgaccttggctgactggggctggggtgagagaggaaagacctacattccctctcctgcccagatgccctttggaaagccattgaccacccaccatattgtttgatctacttcatagctccttggagcaggcaaaaaagggacagcatgccccttggctggatcagggaatccagctccctagactgcatcccgtacctcttcccatgactgcacccagctccaggggcccttgggacagccagagctgggtggggacagtgataggcccaaggtcccctccacatcccagcagcccaagcttaatagccctccccctcaacctcaccattgtgaagcacctactatgtgctgggtgcctcccacacttgctggggctcacggggcctccaacccatttaatcaccatgggaaactgttgtgggcgctgcttccaggataaggagactgaggcttagagagaggaggcagccccctccacaccagtggcctcgtggttattagcaaggctgggtaatgtgaaggcccaagagcagagtctgggcctctgactctgagtccactgctccatttataaccccagcctgacctgagactgtcggagaggctgtctggggcctttatcaaaaaaagactcagccaagacaaggaggtagagaggggactgggggactgggagtcagagccctggctgggttcaggtcccacgtctggccaggcactgccttctcctctctgggcctttgtttccttgttggtcagaggagtgattgaaccagctcatctccaaggatcctctccactccatgtttgcaatgcttttatatggcccagccttgtaaataaccacaaggtccactccctgctccacgaagccttaagccataggcccaggatatttctgagagtgaaaccatgactgtgaccaccttctgtccccagccctgtcctggttccttcctatgcccaggtaccacccttcagaccccagttctaggggagaagagccctggacacccctgctctacccatgagcctgcccgctgcaatgcctagacttcccaacagccttagctgccagtgctggtcactaaccaacaaggttggcaccccagctaccccttctttgcagggctaaggcccccaaacatagcccctgccccggaggaagcttggggaacccatgagttgtcagctttgactttatctcctgctctttctacatgactgggcctcccttgggctggaagaattggggattctctattggaggtgagatcacagcctccagggccccccaaatcccagggaaggacttggagagaatcatgctgttgcatttagaactttctgctttgcacaggaaagagtcacacaattaatcaacatgtatattttctctatacatagagctctatttctctacggttttataaaagccttgggttccaaccaggcagtagatgtgcttctgaaccgcaaggagcaaacactgaaataaaatagtttatttttcacactca

SEQ ID NO: 10582 - DNA, 130 bp, Homo sapiens
ccgccaactgacaacatgctaggtagtgacctaaccacttagcatgtgtgatttcaccccacagacacttacatggcgctgactctggggcaggccctgtcctaagcactttataaatatcaacccactt

SEQ ID NO: 10583 - DNA, 2537 bp, Homo sapiens
ctgagaggccccttcagtcgcaccagcctccaggagcactgggccagggcccagctggaggggtagctgggagctctggtcagtcccagtgagacgtcaccatggagcactggttttacattctgcctctgctgggaggatgagaactgtcgacctgcccctggctccagaaaactcctggaagacccgatcttcacccatgcagaatagcaagagtgggcgtcagaaccagggcacaataaatggtgtgattggctccatccctccaggctctcattgtggaaagacctgtcggcacagacccctccagaggtctcgctcgcaggcaggcagacacccacctgcagctcaggaacatacacagctctcccctcgggtacgagggccagtgttgcccttaggcagaatcctcggggagattcgggagtgcttccttgtcttggattccaggaaaatggaccctgagatgaggatttaaggatcagtgtgtttggtgctgatccaggaacctctgctgggggagtaggaggcgaatctgcaaagggaataaagagtatgttgtcaagcaaattttcttttttttaatttttaaaacttcattgtattttatgtttagagatggggcctcactacattgcccaggctggtctcaaactcctgggctcaagtgatcctcttgccttggcctgccaaagtgctgggattgccttttccgcccaccccccccgaccccaccagagacagggtctcactctggtgtccaggctggagtgcagtggtgcaatcatagccttaaattcctgggttcaaccaatcctcccacctcagcctcctaagtagctgggactacagttatgcaccaccatgctcagcttattatttatttattttttgtagacatggggtcttgctatgttgcccaggcaggctgatctcaagctcaagtgatcctctggactcagcctcccaaagtgctgggattatacgtatgagccactgtgccccaccctcatacaaatttccatgttggcaactgtagctggatctttctggagatctctgaaagacagcatggaatccttgaacaccccctgaggcgtgaggcatccagagcatttatctgccaaccctcaggagctggcactcgtagacagcacgcacagccagctccattggtcttggcaaagagaattgcctcctggagccagaggccggttcctgtgcttagaaaggaaggacatgtcttctgtgctccctgtctcacaaggcctcttcagcaggcatgggaccttcattctcaagttcaaggaaccctgtggaaccttgtccttgtcctccagagagaatcctctccgccttagaggtccctcctctctctcacctccccaccaagcctccctgaactcaatgtcttctgtccccttccctgcccaacttccacttctctatgcccagcctctgtggcccagtaccattggggttctgtgggcagctgggtcctggtggttggggaccgtgggaaggggcctatctgtcggatcttagatggagcatccagaagccccacccttcatactggccagagtggcccctgccagcgcctctctggagtgtcattaagctgaaagtgtttgccttacctctgcagtaggatgcattactgaagtggcctcttggtcacctagctctgaattttcctggctccagaaagaggctgtggggcacaggtcccccacaatgaggctgtgaaggggagagaggcaggcctgggccaggcacaggaggacaactagggcttctcaggagctgtctcagccaagagtcacacacttgatacctaaaatggcttcaggaatcttccaagactgaagacttccccaggtgtggtctagggcctgcctgcctcagagccatgagcagagccggtcaaaaggcttcctagggaatcctaccccagacattaaaatagactcttggtgctggcaggtggctggaatctgcgtttgtagccaagtgctcttcctgtgtgactcagcaaagtgggggtgcatttggggaacacccggggctggggcctgagtcctccacccaaagccaggtttgattcttgcattcccctccctgccttccatccagacaggcccaaagatgcaagaggcgttgatcagcccatctccatccatgcctgttgcctcagagagggccgacggcttttaaaatgctgttgccatagcaacagcatccagccagtgggtaccacaggcagggagccacagaaactggggtgctgggatggaaactgacttgtgagagaccacagctactgctagaaggaaggggggcaaagcgggcacaggtaatctaagaatacttgggcgggaggagtccccaaggttaccttgtgcatccctctgtccccagaaagaactgtaccccaacaatctctcccctcactgcatcccctggggaagaagggaatgcagaaatgaaatgtcataatgagtaacaatgtataaaaatatcgaataataacagct

SEQ ID NO: 10584 - DNA, 2000 bp, Homo sapiens
gtcgtggccggtcctggcccccgcccttgccccggcccggactccctgtcccacgtccctagtcccagactaccccggaccctgtccctgccgcggccccagccttgacctgtttgacttgagcgagagggaggaagggcgcgcgggccgcgggcgacgggcgggtgcgcgggcgggcaggggaccttggctaaggcgagagtagcgcacgccagcgccgcctcctagactcgagcagagccggagagagagacgagagggtgggaggtcccggagtaacttctctccaggctgaagggcggcgaggcatagtcccgagaagtcaccaaggccatctggagactcctggctttctgaactttgcgcgttaagccgggacagctgctttgctgcccggagagtagtccgcgccaggaagagagcaacgaggaaaggagagggactctggcgtcccggcaggcgagaggcgaggctgagcgaaagaaggaaggacagacggacctgtctgtcagagttcggagaacactggctctcagccctgagacacaggcctcagttaggacgctcggcgcccaaatctcatcagttttattgcctgctcgattatatagaaaaatacaaaaaatctgcattaaaaatattaatcctgcatgctggacatgtatggtaataatttctattttgtaccattttcttgtttaactttagcatgttgttgatcatggatcatactccccttgtttctttgggtgagaagggatcgcagtttggaaactccggcggctgcgtgcggggtttcagtcccagctgtaggcttgtaaatacccgccccgccaaaccgcatagagaacgtggcagcaagctgagggtctttgtttgggtttattattacggtatttttgtttgtaagttaaaaagaaaaaaaaaaagaaaaagttccgggcattttgcatcagaaaacaactttgtcttggggcacacttggaagttgcatgttttctttccttcccttatccccattcggtcctctttttcctctctcgctttagttttcaaccttgttggtgctgagagagagaaccgagaggtcccagtacaagggcagggcagggcagggaagctgccaagctccgcaccccagaggagtgttctggactacagccttgtcttatggtcaaattgatacccttaataagaaaggaaaggaaaggaaaacagatcctcccctctgctttttattgtaaccagaatcaccctgaggtcccttctgaaccctctgggcctgcgctaattgtaggagccacagcgctcctagggtgagaggcttagccatccctgaccctggcagtgcactggtaagcagacactgcactgaaccaactgctatgctcagaatgtaccagaaacccaaacattggcaagtaattttgcaactttcaagtgcgttctttagaccaatgcattgcgtttctttccctgcttttgagatagtaggaagagttcttggtggtgtccccccccttcaattcttcagttgtatagtagttatagggaagatatgggtgtttttctttattattacttttttttttctgcaggtcagtaaaaggatttaagttgcactgacaaaaataccaaaataaaagtgtatttttaagttcccatttgaaattgctggcgctgctggccggatgcatttttgagtttgtattagttgataaattaacagtaataacaagattgtatgaaccgcatggtgcttgcagttttaaatattgtggatatttgtcctgcatcagaaacgagctttggtttttacagattcaactgtgttgaaatcaaacctgccgcaacagaaattgtttttatttcatgtaaaataagggatcaatttcaaaccctgcttatgatatgaaaatattaaaacctagtctattgtagttttattcagactggtttctgttttttggttattaaaatggtttcctattttgcttatt

SEQ ID NO: 10585 - DNA, 6742 bp, Homo sapiens
atttgatctgattaatgtgaaggactggccagtctgggaaaccgcctgccacgtggaagagccaaacccgactctctgctgccacatgccgttcccatgcccggctgctgggcacctgggagagcttccagaatcctcgcagacagcccagagcctgccgctaccctcggcctgcccaccaccaagcaagcagcaagcaagatggggttctcatcagttcttcctcccacaatgtaggacctttcctttaccttccaatggataaaatagttcagagttcatagtcatattcatagacacagaatcaagcttttaacatatacatccacctctatatgttaaataaaacatcagattatcaacactgtcattacgtagaaactttggttagccaagcagtgcattgtcagttacgtcatctctaaaaatgacctgtgtctgttctctggggattgctgggtcacaggtgcccctcaccttccacagtcaggcagggaagttataggcacaaagctacgtctggaacccctttgtgccccctttgtgttcctcaaggaagcagtacctttgaagagatctctgctgcattaagtgatgaccggctacgtttcatgtcaggcttgctttgccttgtgggctactcagtgcagaacctgctgtaaccctcagttcaaaaaatggactggcaatgtgattagcgttggatgctttaccattctctttagttgttaccgtaattctgctttttcatgggagtttgaatcatggaccataacttttcagttatcagatcaactaaagaaacatttgttgttaagcctaatgtgctgacctatgtgcctgcattttttttttaatctagacatgtttggagtgagagaaagatggaaaaaagacatggggtagggacgtaagtggaaatctatagccacagcctgaagctttgaccactgcggttttcagagccctttctccacactcatttcagagcctcctatggtttgggaaggaataacacactggcccattagtaagggtgaaggctggagggatttgttgacttcttggaattatcagaggtagggtggtctttagcacaaagacttgcatgcagagatccctggcagaacacccagagtgcccgtggctcccaccccagggtctggccggtgtgctggatgcatgcccaagggtgctgggcatcactggtccttgtgaggatgcttttaaagttttatatttatgtccccaaacttggaaacaagaactctactttagcctaaccctcatgtccttttttgaattgagaaaattacaggaaatggtgcctttgaaaattagaaaacttgcttacagagctgttctaaatggtaaatcctcaatttccccaagaccggttgctctgagagtagctggtaaagaggggcgaactaaagacctgtccacctgtagctccgctcatttcttagaaaccacctgcttcccagagtgccaagccacaagtaccaggcttcgtgggcacagacacctcctgggctgggcagagtgacagtgctagaagaccccagagagagggcaagggctttgggcaagaagcactggtggtgttttagggaccgtccttctcccctacccagggaactggacctggcagggcaccgtgctcatgtggctccaaggacaagcatggcggtggccccttctgccttccaggagaggtcttgcttttgaaaccaaaatcatgttcttctaaagtgtcatcttctgccctccctgtcccaatagggaccacatcttatttgtctcaaacagggacttgtgagtacttggcaagttttgcagcctatttttgtattcttaatttggggagtaaagatgtttggtctcaaaaacctttgaggaattgccaagaatggcgagtgattgctttccttcagagaacagacacttggaatttctccttttagtgtttatatacgtgcagattaatttatatatatatatatacacacacacatatacagtataaatactcatttgattctcgtaaaacgcgcatctggcgtgtgcagttgagaaacttggtggcacatgggtgttgggggagtagcctgtgttggagggacaccagtgcactaggcagctggggcggcccaggctgaagccatctccgggtgtctgagaaaccacccagtgcctcacctccagatcctgctggcatcacctccagagccctgcatgcactggctgaagagttggtctgtggagaggattttcttggttacttgtattcacggttaatttacaacccaaacagcaaaacacagttggtggacaagttcatgcaggacctacagtgacccagccatgggcactagctcatctttcaggtggaaaagtacagtgctgcctgccctggtatgtttttcttatagatgttagccctgcccaacagccagggctacactacaaaaggcaagaatgcccatgtaaggagcccagcagtctggacagatccttcttcctctgctgttggatgagagtgagtgagtatgctctggaccttatccttgaaagatgatcaaaagcgatgatgagggaggcagtcatcacgcaggtgcttaaagggacattgtaggaggtactcaagggtttgggggcaaaaccctgaatccagccagtcgtgcacagagacacacccacactagcccagtggcagtgggggatgtgggatggcagcagccaggtatgtagccctgtcacaggacagctcactgtggttttgcacactgcctaagggttaaattgtgttgttgccttcagtagaaggcatttgtgggctgcagagttgagagttgggtgaggttagtctctcctgaagaaaaagcctataaaaagtggctaatcttatcccttttctctgtatgcagttggactcgtcagagatagtaaaatcatcttttagtgtttttttgttgctgatgtcttgtacccatttgttttttacatggggttgtagatcgagttctcaaaggtgaaaccagatgatcattctgataaaggaaatttaaatttgatacatatgctttgtatattttgattacttgttttcgtttttgactataaaggagcttttttattttgggaggggaggagtgtcatttttgagaatcttgggttcctgaaaaagaacgccctagttggatggcttgccagggccttggggtttggtagtgattgtacaacttaaagctcctttctcttggctgagtgacaggtggctgttcaggtggaccaaagcaccttgacacaaggactccacactgtgctctctagtagcacaaggaggaagttggacagaacattgggtagtgccttgcgggctcacacatgtactagtggtctcatctccagctagccttgggaggccgtcccaccaggaaatctctctattccgtagcctgagatgtgcccttgtgggttttatcctgctcagtcagtggcctaggggcaggtcctgtgttctctccctctctctcctggctctgggacatctgtccctggctgcctttcatggaggaaggacactggcctttctggttggatgctgtgtggatgctctctgcttgagcctcgtggtctcttgtctctttttggaccaatatcctcagattggtgcagctttttcagttcagatatcacaccccaagtggataaaggcaacttgcaggagaggagagccagccaagaagaaaattttaaaaccaaacctcgtttaggattttcctaaagtcatcttctcttttttcttgctcagagtttacctgggagatttcaccagtttgactcaccatttgcagatgtgcttttgtattaaatttaaattttcacatatcacatccattctcaaggtagttatatgctggagaagaaaaatcctctagacacatgaaggcccacatagtcaagtcttccagggcaaagccagcagcccacccaggtcaggtagccagcagggctcagttcccctcactccagacacggaccctcctcttcagggtctcttgacccagcttccttctctccttttacctgagagcacagacctctctcagccagcctgcccagaccacggggggctactcccatgtagtttggggagcacttgatctcagaaaagctccattgtctgagcaaatgggcagttgtggagctcaagcctttctcctgtgctcaagtcccttccccaagcaaggcttcaacctcatctacccaccatgtagttttctctggccatttaagtggggcggcagggacatggttgggccatgccacaccagggctggtgaggcaaccagttttgattttgacagagtggctggaggaaaagtggcaatcaaggtgctgcttggtttgctctgagtgcaaatggaaccaacaggtttctgctgcaatctgtgtgttcccagtgccaggtcacaccaggaggggtggggcagggctaaccaagtggtctctgaactcaccgagcgtctgcacttggttgtgaagttaatgggagtacagagagcgtctggccttggagaggggttgagagcctcctttttggttcttcattcctgagctcttgcctgcccacaaatctgacctctttgaatggggacgcagtccttcaacagagaagtttctatggcaaagaagtttctatttagctctagatccagcagagtcatccattctaactgccctgaagtctagagcaggggagggaacccagaggctggggatgagactaggcagaccctggttaccatatggacaaggacaggggaaagcacccccttcctcaatttctgaaagttctatctttgggttcgcaggactttgaggatgataaagaacatataggtactagcttgttgttgctggtccaaagcttccacagccctgagaatttggctttcgtggctgctctggcagctgagcgaagggaggaaggcagccgctctggtggggactctaggcaccttccctgctgtccacttggataggcggtgagccccagggtactgagaggagcctgagcatttacctgccattagtgcctcttccttcaggagactggcttgaaacgtgtgttcatgtgcgcgtgcacacacacacatgagcacctgtatgtgttaatgaatagtttttcttggttaatgctttttaacttctgttcctttccgtaagtggatgattcaaaattaacgtgacttggctgggcgcagtggctcacacctgtaatcccagcactttgggaggccaagggaggcggatcacctgaggtcaggagttcgagaccagcctgatcggcatggtgaaaccccgtttctactaaaaatacaaaaattagccgggcgtggtggtgcgcgcctgtaatcccagctactcaggaggctgaggaaggagaatcacttgaacccgggaggtggaggttgcagtgagctgagatcgtgccactgcactccagcctgggcgacagagcgaaactccgtctcaaaaaaaaaaaaaaaacttaatgtgactggagttaaaagtgaaatgtcaggttgtttagtcactgaatagagagctacaagtgcttggtctttcccaagaatcaaacctgagtagaaatacatttaaaagaaaaatctacatggtacctatgaatcctgtaatttgtttagggagatcttgtcactcatccctggttcctgcccatactgtttggtctcgttcttgcagtttgcttggaacagggccagagccccacatgagattgtcagcaggagtgaggagcgccagtccctactcctcagcagggacccagcacagcaatccggttgttctcggttagactgggtcggggccaggggagaagcagtcacccctgtgtagagggttcccgctgtgcttctgagcagttgctttgttcagaagtgttaggagggtcagattgtgccataattgttattaaagagaaaacacgcccaccttcctttctcccctgctggccattgttcattgagttttactgagggcagcctttgtggaagtcagggaggttgccaaaggcctgtagatgcctcctgacaaggtcttgattcctggttttctagcacccatttgcattttggtcttcagcacaaagccttgttccctgtggccggacttctgggcaataagactggggagtgactgttgagcagtctgctgtcaggagagatggctgaaaaggtgatcatcttggtgctaaacaagtaagaggcaactgccctgtttttgtttgttttgaggcacaatgaaactttagccaaactctgcaagagggtcccatctcctgccatggccaggtgtgagagaccaaaccgagaaaacagcatactctatcacttaagccttgggtagaatgggaattctttaccctgggtaaacgttttaacaaaaaaatggaacttaacttcggtttggactgtggtcgtgctgaggcaggagtggggttgccctcttggggctgaatctccaggcctcacgaggtcccctgtggggatgctgctatttctaagatgcaaattgcacatttcctagattttgtatctgtggatttggataagggaggggaacacggacaaattgcttgtacaatttgaaatgggcctcaatggtacttcaaaccttttgattattcctaaataaaaacataaatatatttcac

SEQ ID NO: 10586 - DNA, 1302 bp, Homo sapiens
acaggctggccaggacccaacccctagatcccaccaactcggggaacatcaccccagagcccagccttatccagcagcgccttccagccttccctggctagcccaaatggcactaaggaggccactgagggaatcctccacgtggctgtcccagccaccaaaacccatgcacagtgctgcagaaactggacagttccggacagcggtcaaggcaaggatgtcatgcttgaaggccagggtagacttgagagagttcacattccactgtcagcaaatcagtgtctggacagccagctgcagggcctgagcatggctggcaggggcagctgctgtggcaaactggccttgatcagtgtccgtatgtaaggccttgagaggaccctgcaggcagtcagcaccagcctcagcaactgtgcagagacctacaggcccacagccagtggcctgtccgcattgccctgtgcccacaagcaacagtccacagcccttggtggcttctgttccttgtcccctcggcttctcttcgcagccatcaggactaggtttgtgcaggaaggtgatgcccactggaactctcctcacacctggcagcttcatggatgttgtatctgaactaaggaccagaggctgccagatgtttctggctcctcacgtgtccttcaggacagaacagaagcacaaagactcagccaagagttctctttattccctttgatcctcccccaaggtgagggcttaggcagctgtagaaccccaggaaagaacggaatccaggcaatctgtttagagaccccccactccaaatttatccttttcctttccttcccctaagatgtttccagggccctctggtgcccacactgtcctcttccttccacttgggggtggggaaatccttcctgcgaggtcagggcatttctctacaaagtggcctgaatgaggccaggccctgagaaggagccaccagctggaggaaaggggctccaagccttgcttttaacacccctgcaaaacccccaccctcccaagatgttcacaaaaggtgagaaattcaggtacgaaaccatcaatggacaacttgaaaatgcatgttcctcaggcctatgcagttcccagagactcttgacaccggtctctgctgaggctcccagcctcagtttcccccacagcagcacgggccccactgtgctgctcttcaggtccccacagccctgcctttggttcctggacatttggtattctgccctccactctggtactatcagagtagggcaggctctggattaaagcttttagccggtc

SEQ ID NO: 10587 - DNA, 2063 bp, Homo sapiens
aacttttttcatttaagaaattattgtgacttgtaagtttcttatcccataaaggtttgttacttccctcacttcacctccataagaacctgtgtttccataagtaagattacgtacctgatttcctgtctgagaactatggtaacagatgttaatagttgcagggtctcaccacttcattagataagtgttgtctacctagtctaggaggcacagaattctcattctgttatccagttcattccagcaatcatagttaatacagtacttggtgacacgccctacccccttctcttccaagtttcccactcacttgaggaggaaaaatggcaaaagaaagctgtctagggttttaccattgaagggtggaagaacagagacaaagaggagctctttttctgtgagctgggttgcacaggaagaatgtcacagggaaccaaaaagcacagaaaaaggaagtgctggtgcatatttttgagttaaaatatttccctattttatcatgattactaagtgagtagtatagacagaagtatataactaatggttgaaaatacatatattcatttctttataaaaaacaaaaaccttaccggtagtaatataatttcccccttggtggtttttcagacacctgcagcaagaagaaatactgactgactaggcattattttctatacatccctctcaccagtgaaaagattcctcttgctgcgagaaagctttacccaccatgagttattgctgtcgacgggggtggggcaaggacccgcgctccgtagagctacacgctgcttcacaagcacacggctagcgctctgctctcacctggttcgcttacagatttctctagccattaatttgcctctctgtgtttaaagagcaccaggaccgaatggattttcacttcaggctttccttcaccaagaataaggttctttctggagcctgcaagaagacagttgcccaacactttgacacttgctagtaggtcctttgatcaagagtgtctgaggctgtcaaatgtgtgccaccctttataatacagctatgaaaagttacttctccattaatttctccattctgtttatatcttacagttggacccaaattccaaattatcagttaatcgaaactacattgcaagtcaacattattttctcttcttcctcagcttctccatgtttaggaactgagaaagaaactgcctaagcagcacttccccatgtcctttcaccttcatgttaacgtcccttctgatggtctcactcttcacaggtagttcacactctgagacttgaagtaagctcatggttcagtactctgggggcgcagggctgcgcaggacccttggaaatgttgcaagtgttactagtaccagtttcactttttgttgtcacaatttactgtattttttactttttctgttacagttttgctaatttatcagaaggtccaaaagtctgacataactatttcattttgcattatttatttatgatgcttttttcattgtcttttatacatttgggattataaattatgtaaatgttaaaatgagcatctcaaagaagtctgttaaatcatgactgaaaaaaatcaatcagatgtatcttcaaaaagtggagtcccagttttatgaatcagagatataaaccagaaattctataactgatcatagaagaagaatccagtaattgaacaaatcctatttaatgacatccttgtagcatagatggtctataatgctgaccacagatttcttagaaatgctgctctctctatttaactaacattttgttcagttttgcctccagtggaagcagaaagggttttttcagctgttaaatcctaaaaatcaatataatttatttatgtaagaaaaataactcaatcaatatatttttgaaccttttaagtactaattttctttttatcaagtagaaaaaaaaatgtatttgccctaaatccttaaaatacaaatgctataaaaattcctgtatcttgaaagccttactgcaaatgagtattatagacatccagcagagtctggttttctttgt

SEQ ID NO: 10588 - DNA, 8127 bp, Homo sapiens
ctcaatgggatggggaacctgccggagtccagaggctgctgtgaccaagcccccttttgtgtgaatggcagtaactgggctcaggagctctgaggtggcaccctgcctgactccaaggagaagactggtggccctgtgttccacggggggctctgcaccttctgaggggtctcctgttgccgtgggagatgctgctccaaaaggcccaggcttccttttcaacctaaccagccacagccaagggcccaagcagaagtacacccacaagcaaggccttggatttctggctcccagaccacctgcttttgttctgagtttgtggatctcttggcaagccaactgtgcaggtgctggggagtgggaggctcccctgccctccttctccttaggagtggaggagatgtgtgttctgctcctctacgtcatggaaaagattgaggctcttgggggtcactgctctgctgccccctgcaacctccttcaggggcctctggcaccagacatttgcagtctggaccagtgtgaccttacgatgttccctaggccacaagagaggccccccatcctcacacctaacctgcatggggcttcgcccacaaccattctgtaccccttccccagcctgggccttgaccgtccagcattcactggccggccagctgtgtccacagcagtttttgataaaggtgttctttgcttttttgtgtggtcagtgggagggggtggaactgcagggaacttctctgctcctccttgtctttgtaaaaagggaccacctccctggggcagggcttgggctgacctgtaggatgtaacccctgtgtttctttggtggtagctttctttggaagagacaaacaagataagatttgattattttccaaagtgtatgtgaaaagaaactttcttttggagggtgtaaaatcttagtctcttatgtcaaaaagaagggggcgggggagtttgagtatgtacctctaagacaaatctctcgggccttttattttttcctggcaatgtccttaaaagctcccaccctgggacagcatgccactgagcaaggagagatgggtgagcctgaagatggtccctttggtttctggggcaaatagagcaccagctttgtgcataatttggatgtccaaatttgaactccttcctaaagaaacccagcagccaccttgaaaaaggccattgtggagcccattatactttgatttaaaataggccaagagaatcaggcctggagatctagggtcttgtccaaagtgtgagtgagtcaatgagagggaaccaacatttgctaagtctctactgtatgccagggatcatgcttggcactttccataggacatttcacacagtccttagaacccccaggagagagctactgacttgttatcatctccatttgatcatctcctccaatgaggaaacccacgcaccttccttagtaatgaaatcctgggttccaaaggggcaggtaatggcaatgagacttctccgtgctgttttcttcatcttctctaagccaagcaattattttatggagggaaaataaggccagaaacttctgagcagataactccacaaatggaaatttagtactttcttcctgatgccagttcttctgggaagcgcagaatttcagatatattttagtaacacattcccagctccccaggaaagccagtctcatctaatttcttagtcagtaaaaacaattccctgttccttcaggctatgaatggaccagccagggaaactctcgaccttgatctctagccagtgcttaggcccaatatctgacagcctcaggtgggctgggacctaggaagctccatcttgaaggctggtctagccccagacagggcatgaggggcagagaattcaagaaggtacagctttggccctcaagagcccactgtatgctggggaaatggaaccatggtgcagtagtgtggagtggatgagtgttccatgagcctaggagcaagaaagtctcttcggcctcgggcttcctggagaaggggacgtccattcctgctgggtcttaacaagcataaaaaggaaaaaaaggaaactcaggcaaagggatccatatgtgcaatggcaaagaaatgtgaaaaggcattgggagaagcagtctgggggaggccagcccagtgcgggcacagcacaacacggggagcagcaagagatgagccagggtccaggagacagatgcccatcgcgagtacagactttgtcctattggcaacaaggagtccatggagctttagagagatgcactcagcttcgtgttggccaagactccttctgggccaatggggctgcctcttttcctttcatcagacactgtgaaaacattcccttaagcgtgcactttttaatatcacatctatttgtctgtctgctcattgttttgttgctggaactaaatatgcaatggatcatgagactcagattctatgagaaacccagggtctctgctttaccacggagcagggtcaccaacccagatctccaggcccatgaggatggaacatgaaaggagccgacaaaagttgcttccattggcatgggctctggagctgtccagaagtccagggacaccagacttgatcaaggaagggctgtcactttagaggttcaaaaggaagtgcctcaaagcaaaggcaagcaaaggaaccccacgatgaacttgctcttttcctttgatgagcctctccccaggtgtatttcagcagaccccggggacccacccccactgggcctgctggcctccctcggctccagcccaatgccccagctggccttccccagcctgcaaggagcctgtagcatggcaaatctgcctgctgtatgctattttcttagatcttggtacatccagacaggatgagggtggagggagagctatttaacacaaatcctaagatttttttctgctcaggaaggggtgaaatagctggcagatacaaaagacagtggcttttatcattttaaatggtaggaatttaaggtgtgacttcagggagaaacaaacttgcaaaaaaaaaaaatctcaggccatgttggggtaacccagcaagggccagtgatgatttcccccagctcatccccttattttcccacaacccaaccattctctaaagcaggacagtgaataggtcttaggccagtgcacacaggaagaaattgaggcttatggatggggatgacttccctaagatcccatgggacaaggatgtggcaaggcttggatgagatggggcaccagtgcccaggaatttgaacattttcctttacccaggaaatctccggagccaacaccaccacccccagggggtctccccaccccaccccatttacagggtgagctcagcctgtcatgagcagaggaaaatattattaatgctctctgagtctttacaacaggagctcttacctcatagatgtgggctctgtttggggaagatgcaaggaagtaatgagaagcccaggaaatttctccacctgtgtttatggcctaaatagcttcaggatgtatcttagctgcactccaacattgcatcctttctggggtgaagaatctgggccaaccaggggtccttgggcctctagaaggccacagtaggcctctctttgtgggaatggaaggggacagtttgcttttagtgctggccctctctgtgggtgtggcctgcaaaggaaccaacagaccctatgctggggactctaacatgtgagctcattaaattcttccagcattctaaaggagggtttgtgattgtcaccatttactgatgaggaaactaaggctcctaggggagaaatcacttgcccacagttccacagctagtgagtgaatgaaccaggatttaaaccggttttttctcactacagagacaatatttttccaccattgtatctcacatttttcccaggaggttacccataacagaagagactagagtggaacagatacgtcagtggataaagctcaaagcaaacaacagtaagcttaaaattccttcatagtctcatgttttacgttcacaattcatgcaaaatttgcattccactttctgatttagccttgttggttttaatatgactctatgaatatttcaaaaaaaaatgtgctctgttcctcatgttgttctgttctgttcaccccgctatgacggaccctaggtcagctggtcttcagcttgaccctagaattgactctaggagcagtgaccctgctgcctcccagagccagttataggctcaagatcaagaccaactgaccttctcctaggcagctcctttggtgtgtgggtgctctgacctcactgttcatgaggggacctcaactaaggcatcttccagttgggtgctggaaggaacccattaactcacactagaatgatgaggatttgctcatctggcgtggagaaggatgagcccacaaaaccctaaagggaaaagagaagctggacacagctgtactcagcagattcctgaatgctaggctggaaagtggtgcctgttgtccaagtggagtcacatggttgctaatgtgggcaagtctgaggacacacttcatgagcagctggggtctggaaggctcctcactttaccctagccacacataattactgggtgcctacagcacctagcaccttggagggggcactattaggaaatcgagattactatggcacaattaattcctgggtaaggcatggggttgtggtggacagagctcagtctttagtttgaacgaaaacatacatacatgaaaaacatacatgaaaaaaggaccctcatcaacattagaaggggtagatttggagcactttaggcaggaaaacaggaacgcaaggccaggaaactggaacccagtgaatactcagaaccgaggatgcagatgacttatttagcaaaatggtcacttctgtgacatagctggagaaaggatgggtaacagcttgccagagccacttggaacaagggcaaatctcagtgtctggggcaaaagatgatgcatttccctctgacccatcatgtttattcatcctccactccccattgccacactagctcttgctgtaagtcctcaccaggatctacatttcctcgtcgctggtgggaaccccttagagtacatagaggtatcagtccagtaagactgctctacacaacagaagtgaggcccagggagtagcagccaggcccttatcctgttacctctgcaggagtgactgcccaacccagatccagagacattgaaggaaatgataattccttggtacctcactgccttgggacaaaatgaagaaagccacccttccttaggctgcagcttgccactcctgggctgggtaaacaggtcatcagcaccaagctcaaccaggagtaacactctggaagacatgggtgagcccaagaggaagcatgaacaggacgctgttcctaagtcatgtcaacaggttgtgctgggccaggatccccagggaaaaaaatggtcaacccaactggagggtaggttagaagaaaaaaaacataaacgtggatagtcatgtcatctcaaatccctgacttggcttccccattacttaacagtctgagctccttcttagcctgtgaccagcttcaaatcacagccaagtaaaacaaggaaataggaaaagtaaatccaactagaagagacaagctgagattcagatttgtttactcctcccatgcaaagtttccctgttggaggttttccatgtatacatgtctagaagtgatagaatgcaaggccttggctttgtcttgcagggatctgcctttgaggtcatagactgaacagcagggagagaggttagtggtggagtgtggggggagctgttctagctccagtttcttctgacacatttttcaggatcatggatctgatcctccgaagcacagcagagatatctaagccatatttgtgcacatgagcagactcttctagttttttagtaaccagggatgggcttttgcatggcactgactatagagatgtcttgtagagatcaagccagtcttttgcatcccacctgcccacctccagaagagatgggaaaaggtcatcaaagggcattcaccaactgaaatccactcatgaatgttaggtctctaaaaggaggcatcaacactcacaatggtagcctccaaacctagcatcccacctatctaagagctcaggggtggtccactggggcagatacaagggaagtgcaagggctcaggatgaaagaaaatctattgggaagagttttaggggcttgatcattatggggcttccttctatatctgagaactgctctgggtggtgagatgtggactctgatccttaattggaatgttcggagaatgagtgtctggtggccttgaagtgttggacagaaaagtatcagtataaaagcctggagctcagggtaattaatgtagttcatggttccttagtgagcaggactcttggatgtggaggagaaagggtcataggaagtaaaccaccaaaattacaaaattgagtctctgtacaattacttcagtgcctttgggcttatgaatacaaatcagtgggccttctctatgatggtccaacaaactctcagtgtccaccctgtccctgtatctcccatggaagatgaataatgtcaggtgttctttgggtcaaaggccccagggcagtctggaggcttagagggcagagtggtgtcattccatgtaaagttaggcttctgaggggtcaggcagaatatggtgtccatatcttccatagctctgcagattcttggatgaagtcaagcacagtttgctagacccaggtcactcctctgagtataactaggacccatgagtgaaacttaatagctgtaaggaagaacctgctgtctgccagagaggataagctgcccatctcagcagctgtctaaaagaaggcaggtgtctctttaaagggaagagaagcattggtgaaatggatttcaggtcacttccattccagatgggtgagatcttgtggagctgggatcatgtttgaactcattcatacctgtagagcacgaatccaagtagattgtgtttggtctgtacaggctgaagccccctgctctcccacccaagtgcccccactgagcaggccaacatgctgttgtggccacatatactgggctgatccaggctggttatcaccaaacagcaaaccatagggaacagctgctttgccatagacccaatacccatgtagatctctcatgagagcagccataactcagacccactgaccaacagggccatgagtgacagccagaaccagtgaaggtccaagtaggacacagagcagggcttttcttaccatacacattatctccagaggttatttctaccccactccctattcaaggcctgttggagcacactgcaaaagcaaaagcacagtaactcaatttacacatgattataatcatttccagtgcacacatttcatcaccaggtggatcctgagctagcccatgtaaatccgggttaacccatattggtaatcatactcaaaagcacttttcaccctacattctactagccaatcaaagacaaagagttgtggcctctaccattgccttggcttctggacaccctcacaagctatcccaaggttcccgctcaactccagggaggctgacatcttcacatccactgggcatataatattgcatgagaccaaagtctccacactctttgcagcctcctccatgaatcccaatggcctgcacttgtacagtttgggtgtttgatagataaagcacgtatgagaagagaaaacaaaataaatcaactttttaaaaaagccagcactgtgctgtcaatgttttttttttcttttcaattctagctcagaaaagcagaaggtaaataatgtcaggtcaatgaatatcagatatattttttgactgtacattacagtgaagtgtaatctttttacacctgcaagtccatcttatttattcttgtaaatgttccctgacaatgtttgtaacatggctgtgttaaaaaatctatacaataaagctgtgaccctgagattcatgttttcctaagata

SEQ ID NO: 10589 - DNA, 86 bp, Homo sapiens
actgccagctgaggaaggagcacacgcctcatcaatgcatggaagaacgtgcaatgcatcagaataaaagacatgcaaagtaaact

SEQ ID NO: 10590 - DNA, 1807 bp, Homo sapiens
agccagaagttcctgctgaggacatgaggacccgtctttttgcagtgccaggcagggtggccaaagaggactggactctggacctggagccccgtggtccagttcacattcaccccacaagagtttcaggaggcctcccacggtgcctgtgctgggtggcggtggtggtgccaagaggaatggaatgtcctgggctccttcaggagctctctacccaggggcaaggagagcccagagagaagcgccctggtctcttgagcttcctgatctgctcctgtcccccgctctcctccactcccttgcctttccctaggttgtcccctccctgggcttttgtgtgttttgggagatgtcacctaaccaggacattgatattcaatcccatcccccttcctcccaccctgccccactttgatttaatcctttggctgtgggctgaggcctcccagggaagctgggtggggtgggtgttgagaccccctcagaccagcacagagacctgtccttgtgcagtctgcaccctgcactccctcccttgcctgtagatgttctggatgacagtagaggaaatggacaaggtcagtttgaatatcccagaacacagtgctctgtctcctcccaccagtccagttagcttcccttctggaccaatagacgaggggagaccccatggatcctctggctgggaagccactgaccaggtggccagggggcagggtgggaagaggggttaaggtgcagtgatgatggcctgttttggagtgtgtctgagactgggattgcatttggggtttcccgtgtgcttgggatgctagagggtcacctgcaggaggcctggggccggcgagaaatctcctgtgatgccctgtgaaatggcttgtctcctcccccatcagggcccaccgaaagctcaggggagcacagaagcccatggaagcccagggagatgtccctggggcagacactaaggcaggtgttgaagacaagctgcttgtcaagaagcatttcccggcaagagaggggcaagtctggggctccaactgggtacagcctgggtgcagttataagcccctttggcttacttggtagaagatggctacttggatgtacctcacttaaagatgttttgtaccacactaggtctctgggcccttgtgcttcctgtgggtggggtgagggccaaaggctatggtttcctgcctccaggagaatggagagaaagggcttccaggcccctccaagcctggggaaggacgtggcatccaagctgagccagagggaactgctgctgtcctcccttcatttctgtggaccttggaggctttggctttgtggcagggcctccccaggcagctctgggacctaggagtttgcttctgatagggtcagctttcccatttcccttcaatgcttgggaaccttctcccttagcttcacacttgccgtttcaagccctgctgggaccttgtggcttggctggaatccaggactgtattttcatggagaagaacctgcagattcttccatcctcagctggccatggcccacagctctgcatctgcatctgagcttctcaagactcctggagcatgaggggaatggggcggggccactgctctgtgctgacgggctccgtctcggagattcttgtcctgttttttttctgttgtttttttttggctggtgctggggacaagcctgtgcctgccaaagctcccaggccaagtttgggggctggtgtttggggttgggtttggggttcaggatgctgcagtctgtgcaataataaacccgcatctgctcacgg

SEQ ID NO: 10591 - DNA, 1145 bp, Homo sapiens
aatcgccctcagaatatggtcgagacaatgaaacaagacaatgaagcactgagcatcatgcctggcacataggaaatgccaaaatatatattcccgtatttccttcacattccaaagggtgaattaattcaggatggcctgaaccatagctgtcactgtcttcgggaggatatttgaggacaaaaacgagtttttgactttggaacagtaaataagacaagactttgattcgcttagttctgccttgagtcctgccagtgtagatggaatccatgccagacatgattccatttcgaatgtagaatcagcataatttaacctcatcttggaaatctcatgtcccagttcacagccaggcatcagcgtgacagtcagctgagctgctgtcttggcagcttctgggcattctatggagaccccaggagagcacagcagacccttagcagaacagaaaagcggaccgtattagtctttcctgtccacggccttgttttcagtgattcatgtgcccgattggccaaatctctgcagacgtgcccctgtccgaggccaggcttctgggattcatcgagcttgcttgtttccgggacctgctaattccgtgcccagcagctgttccccggagcaggccctgccctccacaccctcatgaggaatgccgagtctcattttctgagggccctggttgagggtggggtgtggggcgagggggacagggttgcttcctgccatagacttcctgccttggagggttatccttgttctcacctatcccttcccgagctgaagccacagagtaggagagaagttagggctggcacacctccctcccgtgtaactttcactccctgcttaaagggaactgatgagagttgcctggcacagatctgtgcctggcagaatccacagagcagcccaggtgtgctaggaactccagagtgacccctgctccaggccaggaatgagcaccttgtgcctggaggtcttcctgccactgctggctgcccattgctgtggatggggtagagctggagtcacacatggaggctggacagctgcatgcagcctgcaggggacactctggatggcatgtaccatgtttttattatttctatttttaattaaattggaatcctttatggata

SEQ ID NO: 10592 - DNA, 556 bp, Homo sapiens
tagcaagaagctaattcatatgctttaaaccaatgaaggcttgtcaaagagatttagttaatggcagaccttgtggccactttgtgtgagaagacatctctttctgctcactgtgcttgcaataaaaacttttcttggcatctcagttaatcttcattctttcaacttactctcttgagttcttacatacacttcaaggcgagcagatcaaagaaaaatcccccttatttagaaatgttcctgggggatgaagaaaccataattacttgagactggcagcagtgggtatatggtaaaagcctttgtaaaacagtgcatttttcagatttgtttaaggtttgctagccaaggaaagtaaaatgtgattttgtaactgcactaaacatttgtcatgctgtagttgccagcccagaatattagaagttacaagactgatttaaaccgtctctgatttaatgcaagatatattgtgtctataaaggtttctcttgttattgttaagccagagatctaaggtttagattcaatttgaataaactagctggcctgccctcta

SEQ ID NO: 10593 - DNA, 1036 bp, Homo sapiens
acctctgagtgccaaggacaccactggaactcacaaaggtctccttcaccgaaaacccatataccttttaagtttgtttcaactaaaatattaagtgaatgctttgcaagtttgactgtatgcaggtttatatcagaaggtgagattgaataatgcttgatgcagaatcgaaacttctcatttatctgtatattatgtttacttctaaggatatagcacaaagggaacattttttgtttaaagtgaactacagctgtgctgtgaagagagttctttataaagcctgtaggttcttttaactttggtttaaaatgtaagataggaaaatgttggatatttgaggccatgcttaatatatttatattgcagtatcctttaaaagcaaaaaaaaaaaaatgcatttatattacagttttcctctatgaaagtccttacttatatgatacaagcactgtgttttgtgcttaaactcttcagcggggtagcatcaaagttcttggggaaggatcgtatatgtgggtcccttccctagaagaatggttgctgatatggctactgcttctacatcttgagttttttaatttactttttttacactgtagcattgagactgcttgattcaagtctggtgctttgccagatgtattaatttccataaatgctttgtgagtttggttaaaatgaagattcacttgggaaaacactgcagctttagtctgtgttactatcttgttatgagtatgtaaaagtaaaatgcatgtgaatttatcatatttgcactatgaaggtatttggttaaaatacaaagacttttaagattttaaggccctttcttccaacagcttttatagttagcagccattctttattttctggatagccaggttttatcacgcttctagtcaggatgctcctattccttctaaaaattacggtctgactagtgagcaaagtcttgaatttattcaaaagtcctaaataccttctctaggtaagacacttggtagatgagagacggaaggcattgtcaagaacc

SEQ ID NO: 10594 - DNA, 133 bp, Homo sapiens
gcacccaactcagtgatgtcctaattactgctggatgactcaagccacaccatgcctatgttctcaggtgaagaagaataatagaaaccacatagatgggtaggtgtaccaagcattaaacagacagtatcca

SEQ ID NO: 10595 - DNA, 311 bp, Homo sapiens
agacgccactcctccaagccttcaccctgtggagtcaccccaactctgtggggctgagcaacatttttacatttattccttccaagaagaccatgatctcaatagtcagttactgatgctcctgaaccctatgtgtccatttctgcacacacgtatacctcggcatggccgcgtcacttctctgattatgtgccctggccagggaccagcgcccttgcacatgggcatggttgaatctgaaaccctccttctgtggcaacttgtactgaaaatctggtgctcaataaagaagcccatggctggtggcatgc

SEQ ID NO: 10596 - DNA, 4326 bp, Homo sapiens
tgctggaatggggaggggctccccaagatggcctggagaccacccagccctgacctgggaccccaggcccaggggcacattgaacaggaggacggggctctcccccacagtggggaagcagaacggggagacctgcccccccttgggcccctcctcaccccttctttgcctcctacccccgagacctcccctctcccaacgggattggctacacttttgacttggccggttcttgacctggtggatgtggctgcagtccagagaaaggaaagattgaggtggcagagcagaccactctcccttcccaaactgtccaacttctccccctttttgcctcctcggaagctcgctgcccagagccatgtccagaacccagccggccatctccatggtgccaattaccagcaagtgtctttcctgcggcaccgggttcaggcagctactcctgccccagagatgaaggggcagctttgcaaggatccggagccagctcccaggggcccagagccccccacttgaagaggagcttgagcttccctctgcctgcccgtggaaggagctttgccgcagcctgtccgagtccatccgtccgtcccctcctgcctgcccctcttctggtggctctaggaattggggttcagcagggaccaaaggaaaggaggaggtgccgggggcctggcacagacccctaggtgcctcgctccatgggattgcaacaagctagtttaggaaccgctggcggactagaaagaatgttgtcgtctgtgttccggtggaggagctgtggaacctgagtttccagaaccccaaccctagagagcatttgggggtgctgtattggagggggaggctaaggaaagttgggattgggactggtggtgccaagataagggtttctcaaattggagaacccctccttgttgcatgaggtcaatggtcatcctgtctacccaccctgcctccaggccagggggctggggaggcaaatagagcccccctattttagtctttttaaaaaaaacatcctatactaagggcagaacccactgccccggcctcaattaccttggctgaaggaaagatggcggtaggagagaaaagtgaagaggcgtgagtgtaagaactgggagattccttttccagcaggcctgggtagctgccttcccagcccagccctccctggggcctgcgggagcccttttgcatgcaagggaggatggaggctggcccctctttatagaagcacatttctgccacctcccctgggaggcacccagaagcctgccactctttacctagtccctgctgtgtagggcgtagtccaggttagctaggtagagttagtgctccaagccctggggcctgttcttagctcatgcatagtccttacagagtcccaggaccgggggtggagaggagcctcaagtacattccaggagaccactgtctcctcgctggcctgggcctagatggggcagcctggctcacaggaggccagcccctcctcctccgcccccttccttcccttgtccccgtagggttatagctggagctgcctgttatactcggctgttctgatttattattcttggtactgactttctttatgagggactcctaagggttgtaggaccttggcagagggggcctggtctccattagagggtgttgttttctcctgaggacacccaggctgcctttggtcccaccctgttcctggtcccggtcccggtcccagtcccaccaggcaactccttccacccggaaattcttcccttcccttagcctgtggaaaccctgggtattctttaaagttctggtcaatgtatatcacctccacagagctgcttaccctgcactgggaaggggagatggagacgccccctttacccaggaggtcttcagagtttcctgggaccgcggtgggtggaatcccaaggctgggggtggaaggagcagggctctggagggattcgcattcaaggcacagaattggccccttgcctgtttgtttttctaaccagtgtgatttctctgctgttcgtttattacttaccattggaatattttgagccaggagagcgccttctctctccagccatcaccgctgtggttgttcaggggtagcttttcaaaaacagggcagagcctggctgtcccaaccagggggagcaggggcttggccctgacagcctgagcccttcccctggtgtctgcacagcctttataaagagagagagagctccgaagcaataacaacacctgggggtggtcagtgagggccccctcaatgattttcttgtttgttctgtgaaatcccgctcacctcctggaggggtggagcagctgggggctggagccctgtttctttgtgtcatcgtgagcatgtgccccttcccaggggctgtgaccattgggtgtgggaactacggtctgtcctcaccaagggatgggggtttggggaggagagtgacattttcatcattagcttcggagaagcttcaagcccatcctgtccccgctactgcctggccccttgctgactcaggctgcactgtttgaagaggagcagagaggctggcactaggggccactggggggctggggtctccaggggatgactgttttcaatctctgggccaagatcacatgcaggataccatgggaaggagccatctccactctccttctccagaacccccttgaagggcctttgggaccattagtccatttccattttacagacaaggaaatcaagacccagcttgggggaaaagccacccctggagtcacctgtgtgttcagtggcacccccagcctgggtcccctcctcccaatagaggctgagccggagccagggcagtatgaggtggggctgccactgcccatacctcctcctcccttctttctttgaagcctaatggccccccaaaagatgggcaggacaagctgtagcccatctgagaggttgggaaactgaggcccagaaacaggaagtgactcacacaagacccctcagcaagggtgcaaagggggaagaactaggggctccattgttcttcaggcgacaggagaccgttgctccagtgcatgtctgctgggacaaggattcctggcctcgaagccctgggctgcacagccctactgggctccacctctataaaccagtgacttctctgggcctgggtctgggggagagggttgccagggagactcagctctccttgggggctggcccagctgactgagggtacacaggattgggtctagaccttgatgcctgggtggagggcccttgtaaggggccatagcctcttcaggaccaactggagggagagttaggaaacaccagctcctgcctggggcagtgagggaatgggagcagctgtgggcgcctcatttcaggcaagtcctccccaaaccttcagatgcagtgagacctggccttcctgttgtgcttttcagactttgttttcagaatgcttttatctcgagtgtgcccttcggccctcacaagagcccctggggagtaggtggtggcctgtgccgtcatccccatttcaaagcagggagctgaggtcctgggaggggaaagtgcttgcctgaggtcccactgtgttagtgggtgggcaggactggaactcggttctccaacagcccagagctcactcttttacacccagaggtggagcaggtggcttagggggtggttatgtacttcacaagccaattcccttcagccaggagctcctgggtgcatttccgtgtcagaaacagtaccgagtcccaccccctctggaggcacagctgttgcgtcaggcaaggtcacctgcatttatttattgagcagcagtgctgtgtcaggcccagggaccgagcccctctccctgttcccctatggtgtctccgaggccctctgggagggccccacatctggagcagcacctcagagtggacagaaagcattagcgtccacgagctcacccgacgccgagcctgtgaggtgggctgatggtgcccgtctaacccagcgcttcagggaggtcagaatggagccgaacccagggctgtgagcatcacctctggagccctttcactttatgactgcttcctggacgggtggtgggaaggcaggagcctgggtccttaggctgggggcctctctccatccacccacctttccctcattccctctcttggagcagcagccgcccaggcctttagggagggagggtttctggggcccttgggttggagtggggtcgcgttgcattgtgttcatgaccatgtagctcatgttgaaattaaagtttttggcttttctaa

SEQ ID NO: 10597 - DNA, 979 bp, Homo sapiens
aaacccaacagggcaactggaacccctgcctgaccttacccagagaagccatgggccacctgctctgtgcccgctcctgaaacccagcatgccccaagtgagctctgaagccccctcctcaatcccttgatggcctcccaccctgtaagaggctttgcttgttcaaattaaactcagtgtagtcaaacacagacatggttgttgcaccagaaaggtccccactagagctaagcgtgaagctgaagctctgtccctattcccccagcccagctagctgatcacaccaacagatcctcatcagcaaagcatttggctttgtcctgcccaagtgggctgcagactgagtgctgcccttgtagcttccccagaccccaactcactgcagttcatctgaacaacctgagctcctgggccggggtggaaggagggggataaacctaaggccctgatccaaagcagcctgttgagctggttctccagggctgcagtctctccaggtgtacagctgctgtccctgccctgtcctgtccttgcacagtctcctatgtctgagccccagtgccttctgttcgggccctcctttggtgggaaggcagagccctgacccttgaatggttgtccttgactctgtgctgctgccttctgcagagaggcacctaagctgtttaaagagcccagtgattgtggctgctcctcctagaggtgggagggggcaagaggcctccttggtcagtgtccatgctttctgggcagggacttggttttttgttccaacagtggccttctccgggcttcatagttctttgtaatatgttgaagttaatttgaattgactgattttgttgaactgtgtgtttaagctgttgcattaaaaagctttcttctacatcaatatctgctgtgctttcatttatgccttttcagctttgcacctggaactctgtagtaataataaaagttattgcttattgggcattca

SEQ ID NO: 10598 - DNA, 2560 bp, Homo sapiens
aaccagggatccgtgaccccctgccatgcccctacagtagagattcctcccctgctaaagttcttcatggtagtgagcctcccaggatcactcatgctgtcctgagaaatgagattcaaaagctgcattccttcctccaaaggcccaggacaggacagtgctaccctagattctgtgagattctgcaagcaactcagaaagctttataaacctgcctccaagccattcatgaagcaggcatgagccagagggaggaagttgaaaggatactaatgattcctgagcacctcctgtacatgaaccaggtcatgtttggccttgtgttggagaaagagaattatccccacttcacagatgaggaaaccaaggctaagagatgagcgatgcctctcccagatgtcacaattagaagtggcagagtcaggtttggaatctgggcttgttggtgtgcctggagcaatgctccatcaactccatctttcttctgccctcatgaagtttgcgtgtgttttttggtgattcatggatccccagagttgatccacaagataagaaatccctttcagagccagggaagggtccagacaggagatttggatataggagctctggatctcagctgtggttcctttctaggagcatccaacaggagtcagcaatcaaagatgagtcctggagggaaggaggatgagtcctgggaggaagtaccatagcattgtacttgcctctttagctggtatgcaagatttgctaagcaataatcttccgaccttcctcccagggctgatgtgagagaaagaaaatctgaagggcccctggcctgagatctagacaacctagctgcgccaagacctgctgtgtaaagtggtccaatccctgcccccaagtccagattccagcccctctgtcaaatggtcagaatctgtgacccagagggcaatgaaagccaaggagagcagaggggtctctaacttaaagccagctcagctctgaaatgttcagagggctgacatatatgaatactggcttctaagaccctcccccaacagtctgaccttggcagttcctttctgcccatcacacagacgtccagccctacattgtccagccctacctagagtacccatccaggcccatgtgtgagagtcctctcccttctggccagctccagccccctcacccttgctgggggcatatctctcatacccacctgctgaatcttctcttcacttgctgagaaagtcagaggaggggatccagtagccctttccacatactgtggctacagcacccagcactgtgctgttgttgtctgactgtggctatctctgtcccatcaccctgagcctcaagatggaagacattgtctgcttgaactctgggcttggtgcagagtaggtatttggtaaatgttgaatagatcaaccaattcctacagcccactgggtgccaagctcagagggggaaaaaaagatagccagagagagacctggccctcaaaaaggtgtgaacaagactgaaaaggaggtccgttcagctccgcctgccctgtccctgcttggttcttgaagtttttacaatatattccttgtaggttcttcactcactcactcaacaaatacccgttggaagagtcttaaactggggcttcatgtgtggcctgcagtcatgtttcggcttagtccaacagtgtttttattatattttaagaatctgaatgcctttgcgtgaggcatgcactctcaggttccccatagtgtctcccccgctgccacccacaaacagacacacatgccgttgtgttatgcccagccactctgatatactggcttctgacttatgggctgcttactagtctcaagagatacagtggtggaaaaatatatccctatactcatgaagcttaccgactagtagggaagatagactctaatgcaataatcacataaatatagcgagctctactaagtacaggtgtgtataatgtatcagggaccatggcccgagaaagtgagaaggctttcctgagcaagtgacaatctaacctgccatccaaatgataaattgctaattaagcaaatgaggttccaggggggagtactccaagcagagagaatggcatgtgtgaaggtgtgtgtcatacacagggcctagtacatagtgggccccctacatacgcatggattctgggtctccagattggaacagaggatggagctaagcagcaaagggcctcccttgaattcaccacacacataccagcccttctgcacactctgctccttacatctaggcccagctgaacccaggttaggggcagatcagaagggctgcgtgtagcacccttatggtcttgcagaacacaccaagaaacccgacggcttccatattttctgaccctacaaacaggtccctaatactgatgtggagaaagctcaagagggaatcatctggcctgagcctaccatgaggctgtttgtggtcctggcagaaaagcaacaactcgctccccttcccatgtatcagtgaaaaccattatgcaaataaagagctgggcccc

SEQ ID NO: 10599 - DNA, 557 bp, Homo sapiens
ttctgatttaggatctgtggctctgcacctaagctggggaccaacggaaagagttcacgatgggaggcctggggccctgcccgctggacagcactatctctaccagcggtggttccagccttctgataatcactggcctgctgacacttccctgcaacccatccacccctggtttctcctcctgggagtcaaagtccatagcctgagctcggaggaaggcctctgtatcaccccagtactctgcaccactgccatacgagcttcccacccttcctaacgctttcacaccaatccgtacatgctgcttcctccaccaaaaatgcccaattcaggcagaccctgacctctccctcaggcagcccaaccatccagaatgaatattcttgcagagttttccaaacatcagtcattcacctctttcatgattttcaccatacctacaaaatagcaccatgataggttgcacgctgcctgtaccaccatttacttaatgttttctttaaatggctcacttttgtatataaataaattcatttcaaaagaaaattgatatcact

SEQ ID NO: 10600 - DNA, 420 bp, Homo sapiens
tgctgggtcctttctacctctgggggtcactctcacttggcacctgcccctgagggtcctgagacttggaatatggaagaagcaatacccaaccccaccaaagaaaacctgagcttgaagtccttttccccaaaaagagggaagagtcacaaaaagtccagaccccagggacggtactttccctctctacctggtgctcctccctaatgctcatgaatggacccctcatgaatgaaaccagtgcccttataagagaccccaaagagctgccttgcccttctgcaatgtgtgatcacagctagaaggcactgtcagagaagagaaactggtcctcaccagatgctgaatctgctggtgccttgatcttggacttcccagcctctagaactgtaagaaataaatatttgctgtttataatcc

SEQ ID NO: 10601 - DNA, 177 bp, Homo sapiens
ttcctgccatatggaggaggctctggagtcctgctctgtgtggtccaggtcctttccaccctgagacttggctccaccactgatatcctcctttggggaaaggcttggcacacagcaggctttcaagaagtgccagttgatcaatgaataaataaacgagcctatttctctttgcac

SEQ ID NO: 10602 - DNA, 320 bp, Homo sapiens
gggccacggacggcccagacccgggctggggcgcggcaccacggacggtgccccttgcgcgccatcggtgcgccggggccaggcagaacctgggcccgtccggcttgggctgtcggggcggaggcgctggcgggcttccggcattgagctgagttggcctcgcccggaccattaggcggactgcggcgtcagggggatagcgggtggtgagggaaggggcacgtgctagaccggcacgccctcgccgcgtgctgcgctcagttctttgttggatttcttgtttgtgttcttaaaaaaataaaaaaaactgatttccacgg

SEQ ID NO: 10603 - DNA, 1973 bp, Homo sapiens
agcttgcttgtgggcactggcttggactttagcggggagggaagccaggggattttgaagggtggacattagggtagggtgaggtcaacctaatactgacttgtcagtatctccagctctgattacctttgaagtgttcagaagagacattgtcttctactgttctgccaggttcttcttgagctttgggcctcagttgccctggcagaaaaatggattcaacttggcctttctgaaggcaagactgggattggatcacttcttaaacttccagttaagaatctaggtccgccctcaagcccatactgaccatgcctcatccagagctcctctgaagccagggggctaacggatgttgtgtggagtcctggctggaggtcctcccccagtggccttcctcccttcctttcacagccggtctctctgccaggaaatgggggaaggaactagaaccacctgcaccttgagatgtttctgtaaatgggtacttgtgatcacactacgggaatctctgtggtatatacctggggccattctaggctctttcaagtgacttttggaaatcaaccttttttatttgggggggaggatggggaaaagagctgagagtttatgctgaaatggatttatagaatatttgtaaatctatttttagtgtttgttcgtttttttaactgttcattcctttgtgcagagtgtatatctctgcctgggcaagagtgtggaggtgccgaggtgtcttcattctctcgcacatttccacagcacctgctaagtttgtatttaatggtttttgtttttgtttttgtttgtttcttgaaaatgagagaagagccggagagatgatttttattaattttttttttttttttttttttttactatttatagctttagatagggcctcccttcccctcttctttctttgttctctttcattaaaccccttccccagttttttttttatactttaaaccccgctcctcatggccttggccctttctgaagctgcttcctcttataaaatagcttttgccgaaacatagtttttttttagcagatcccaaaatataatgaaggggatggtgggatatttgtgtctgtgttcttataatatattattattcttccttggttctagaaaaatagataaatatatttttttcaggaaatagtgtggtgtttccagtttgatgttgctgggtggttgagtgagtgaattttcatgtggctgggtgggtttttgcctttttctcttgccctgttcctggtgccttctgatggggctggaatagttgaggtggatggttctaccctttctgccttctgtttgggacccagctggtgttctttggtttgctttcttcaggctctagggctgtgctatccaatacagtaaccacatgcggctgtttaaagttaagccaattaaaatcacataagattaaaaattccttcctcagttgcactaaccacgtttctagaggcgtcactgtatgtagttcatggctactgtactgacagcgagagcatgtccatctgttggacagcactattctagagaactaaactggcttaacgagtcacagcctcagctgtgctgggacgacccttgtctccctgggtaggggggggggaatgggggagggctgatgaggccccagctggggcctgttgtctgggaccctccctctcctgagaggggaggcctggtggcttagcctgggcaggtcgtgtctcctcctgaccccagtggctgcggtgaggggaaccaccctcccttgctgcaccagtggccattagctcccgtcaccactgcaacccagggtcccagctggctgggtcctcttctgcccccagtgcccttccccttgggctgtgttggagtgagcacctcctctgtaggcacctctcacactgttgtctgttactgattttttttgataaaaagataataaaacctggtactttct

SEQ ID NO: 10604 - DNA, 26 bp, Homo sapiens
gatcttccatatggcacctaagacga

SEQ ID NO: 10605 - DNA, 270 bp, Homo sapiens
cctccaggatttggctcataatccaggcctctctccacgtgtgcctgattgatgctccaaattggcttccacgggccaaaccttggctgttccagaaactgaaccccaggaattgcttacacactttcttccagcgtagcatctcttcaaacacaatgctcttccccttgaccacttctcagtatgaaactctatgtcttcaactttcagaccccccatttatttgtatgaaggcttcagttgccttaataaagtgctctgtggggtccg

SEQ ID NO: 10606 - DNA, 1516 bp, Homo sapiens
ttggataaggatgcactggaagaactgccagaatgtggctcatgctctgagtactgttcctgtacctgacggatgctccagactggcttccagtttcactctcagcattccaagatcttagcccttcccagaacagaacgcttgcatctacctcctcttcctccatctttggctcttttgatgcacaatatccatccgttttgatttcatctttatgtcccctttatctccaacttctagaactcccagtttatacctgtgtcactctcaattttttccagtaaagtacttgatgtagtcctgtgccttgaggctgagtgattgacatctttttggcacattacactttgcagagtaagggatcattgaggcttctggtgacatcattcaagggagtgaagacaatcagaactttgagagttcagagttccaggaatattgttattgttatcttcctctgtttctacaaaagattgtaaaaccctttttaggcaagggcccaaggacagtgccttagtttggatcctctagaaactaaccctgggaaaagggcatgggtgcaggtagtttgtttgagagatttcccaggacatacaagatggggagtgagatgagtaattcagggaagagaagggaagagagaagagtctattatgagctggttactactgtggctcaatcctattggggaccttttaaagaatcatgtaaaacaggcttacaaattttctttttaaaaatattttattttattttacgttccgggatacatgtgcaggacctgcaggtttgttacataggtaagcctgtgccatggtggtttgctgcacctatcaacccattacctgggtattaagccccgcatgcattagctatttatcctgatgctttccctccccctgccccctcaacagtccacgtgttctcattgttcatctcccacttgcaagtgagaacatgtggtatttacttttgttcctgcgttactttgctgaggataacggcttccagcttcatccatgtccctgcaaaggacgtgatctcatttctttttatggctgcatagtattccatggcatatatgtaccacattttctttatccagcctatcgttgatggatatttggtttgattccatgtttttgctattgtaaatagtgctgcagtgaacatacacatgcatgtatctttataaaagaatgatttatattcctttgagtgtatacccagtaatgggattgctgggtcaaatggtatttctggttctagatctttcaggaattggcacactctcttccacaatggttgaaccaatttacattcccaacagtgtaaaagcattcatgtttctccacagctttaccagcatctgttgtttctggactttttaataatcaccattctgactggcatgagatggtatctcattgtggttttgatttgcatttctctgatgatcactggtgttgagctttttttcatatgtttgttggccgcataaatgtcttcttttgag

SEQ ID NO: 10607 - DNA, 874 bp, Homo sapiens
atagtaagtagaaaatattatcatcaaaatcattaattatgagtagcatgataaagagctgtcagttttgtcttgtatccaacttgccaaattatcttaagtatcacaatattgaatgatgttactttgattttatatataatcccatcatctgaaagtgatgatatatttggctttttttcaacttcatgactttattttcttgtcttcttgtattgtgtagaacctccaaaataataatgaaaataaaggcaatggcatccatccttgtctagttccttattttaaagtcaatggctcctgcactataaaaagatatttgttgttgaatttggaatacataagttttattgcacttaaattattttctttttccttttctttctttctttctttttttttttttttgtgagacggagttttgctcttattgcccaggcgcaatctcggctcactgcaacctctgcttcccgggttcaagtgattctcctgcctcagcctcccaagtagctgggattacaggtgcccaccatcatgcccagctaattttttgtatttttagtagagatggggttttaccatgttggccaagctggtcacaaactcctgacctcaggtgatccacccacctcagcctccgaaagtgctgggatcacaggtgggagccactgtgcctggccagttatttcctttttaagcctatttcctatccatttatagctactactgaaaatgactactgaattttatcaaataccttttaagcatacagtcacataatgatttttctcttctaatttgttggcataataaattactaaattttcttgagccatccttgcattcttaataaacttaattgcagactgctgta

SEQ ID NO: 10608 - DNA, 170 bp, Homo sapiens
attctattggccgatcactactgtgggctgaaggatgaccatctggtctaagaagagtgctgcctacttccttcttgggacacccactggctctagctggtaacctttctgctatttccttgacctctttaccctgaagcttttgtcaaataaactgctacatcaacctg

SEQ ID NO: 10609 - DNA, 156 bp, Homo sapiens
aaccgtagcttcccaccaggctgccacctgtgtgggctgggaaatgtttaagaggtctcatagtagtaccctgtggctacttttaggaacaccagtctatttttactgagagctggacaacagcaaacacttgacaaataaacttatttaccagta

SEQ ID NO: 10610 - DNA, 178 bp, Homo sapiens
gtgggagagtgggctgggatgtgcatcctgctccctgaacccttccatccgagactgtgcccacatccgaagcacaaggacatcaaatcatcagcacaagaacatcaacaggaatgccaccctccccagtgtctgaactccctgtccctgtcaaataaaccagaacaaatgcccatgg

SEQ ID NO: 10611 - DNA, 220 bp, Homo sapiens
ctgtgctgatttgtctggagcttctttggtaattctggaagcttttcctggcagtcaagagagggtgacatcctggggcttgtgacatttccaggggcactcatggccctctctgctctgcttctcctcctgccgctgaccagagcatgggaaatagccctggattgggtagtgggtgtgtggtgcttctctttcccgataaaggctggtgctgacctct

SEQ ID NO: 10612 - DNA, 131 bp, Homo sapiens
ggagtggacagtcgcctctaccaagatcgcgtgtccctagggtgtgggagactccgccctgccgggtccccaccagggaggcgcgaccccttgtgggtctttgtctggaaggaataaaagcaaatgttcca

SEQ ID NO: 10613 - DNA, 116 bp, Homo sapiens
ccagaggtaccagcttcgcctggggcttcaagaacctcccatctatccccattcctgagacaggagttacagtcccttttggccctcacatccaataaagagactgataccactgg

SEQ ID NO: 10614 - DNA, 25 bp, Homo sapiens
atggatgaaatagcaccagatatgt

SEQ ID NO: 10615 - DNA, 130 bp, Homo sapiens
agacccacagtgcaccagagcacagctgcatcctggagccccagacctgtggctggctggtccgaagttggccacattgctgccagccaagaccagaaataaacagccgatgctgacatcttgatcactg

SEQ ID NO: 10616 - DNA, 183 bp, Homo sapiens
gccctcaatccccaagctggcagctgtcattcaggaccccaacccctctcagcccctcttttcccacattcatagcctgtagtgccccctctaacccccagtgccacagagaagacgggatttgaagctgtacccaatttaattccataatcaatctatcaattacagtccgtccaccacctc

SEQ ID NO: 10617 - DNA, 299 bp, Homo sapiens
gccccgagggcccaacacagatcatggatttgcggccagctctcctgggggtagggggccaccaggactcacctccctcttcatttaggatctccagatactggatagccagcatcctctcattcccagggagccagacctgtgctgttggggttaggggcagccatgggccccagccaggacatgctgggtgccccagcctgcaggcaggctttgggagagaaatttatttttgtttgggtggacccactggcctgtcagtctcaataaagggaccggagtccagtcctgaacagctt

SEQ ID NO: 10618 - DNA, 1311 bp, Homo sapiens
agctaaatctttcaactctccccagtcccctcatcccctggcctcctcccacttacttgttctaaatagagctgtttggaggatgttctctgcgctcccaggccggcatcgagtgtcatcaatttctaccacctgctctctcttctgcccaaggctgtgttgcttattccttacaaagtttatactgcatttggggctgtatctttttttgttttttgttttgtagaaaataaatatctccgggggcagtacaggtgtctgggcttgtatttgatggggtttctccggtccctgtttctactggatttggagccaggcccagctagccaagtttggaatggcatttgtcatgtcagtagccaccacctttgttcattgtgaacctaccaaggctttccagcttcatacacattgaccagagctcaagctcctgcctgcaactcctgcctagagttgaagaaaagcaaactggccttggcaggcacagtgtcatcataccctcaccccatatgtttggggtctgcttgaggattcataaatcagccactctggattgttgaggaatggccatggcagccacagaaaaaagaatttttctctctgagccaaggttgttttttgtttttttctcttttcttttttgttttcatttcattggaagatctccaatggactgaacagctccagtcagcagcagttaccacaaactgtgaatctgggccccaccactcttccctgttaaccagttctgtcagcatccccctctccagcagcacttccatgaagttggttctgagactctggccgtgaacacccgtttcttcagtgatttgttttgggcttttggctcaaaaccccaggctcttgtttttgtctagactcttattctgtttcctgagcagcaggaggtagggaccactttgatgtcagacttctggtagctggacatgttctcgagatgggtggctgttcgcgacttttgtaccagagtgaaattgttagaaggagggtttctggctgtggttctaaatggagccccaggaagctgccctctccccagggtttgtgctcagtagagccctgtggatcacagtcttgaggtcctctagcaggggtgagggagagcagcgacttcagctgagtccctgccagtggttaagcaaacaatggtttcaaaattcaaggtccccaaatggcagcattttatgttctgacctgtttgtgttatatagtggttttttttttcctctttggaactcttgtgttgttaataaaatgaaatgattactttttaattaaaatgaaaaaagt

SEQ ID NO: 10619 - DNA, 769 bp, Homo sapiens
cccctcgccctgccgtcggggcgcggctgctcacccgcccagcacacgccggggccccaggacaacgcgtttcccccgcggaccccctttcctgccctcccccaaccctcccttggcggctggacggaggggggacttgctaggagcggactcttccattcctcctcctctaggggtgcagctttggagcccagaggtgcgggattctgaccaacggcattaaaactgaggcgagaccgggcacggtgtggctctggggttagaatgggagatgggggtggcgttgcagagtcgggaaggggcgggtcactcaatcctggcctgggggagaatgctggagggagcacgccgctgagatgcccccaccccaggtttcccccatcagagttaagaggaaagaaggctgttcacttactaagcacctactgtgtgctgggacgctgtacagagaccagctcagtcgtcagagaaaccatgaggtggtgtcctgcacggaatagaaggggaaaggaccccagagaagtggctgtgacccgtccaagggcacctggccagtgaatggcagagcctctggcactgaccagctgcctggcctcgggcaagtcacttcacttctctggtcctcagtttcctcatctgtcaaatggggttaataacagaacctacctcgaagagttgtgaggctaaaaagggttcatatgtgtcaagtggttaggacagtgcctggcacatagtaggtgttcaataaatgctagcctttgttactatt

SEQ ID NO: 10620 - DNA, 855 bp, Homo sapiens
ccagccagggcaaatggcttagaagcaggccactccccagcctgctgccagcactcactgtgctcaagccgccagggctcatcatggtagctgggagctgtggacgggagtcaccaggtggtggggccaagccagggactcatgacttttgcccctcccttcagagcctggtcacacaaggggcgagcaccaggccagcctgggactggccagagctgggcccaagctgcgctggaatcgcagcaggagaggggagtgggctggttcttcccaccacttcccaggctctgacagccgagactcatttccaaggcacagcagctttctaaagggactgagtttggactgggttttggacctccaggggctggagcttcatcacctgggcagtgtcttttctcagagagcaggtttctttatagtttggaaataaatggttcacggtccactggccgccttgtgttgctggagacgtgggggcagggaggggacagtgtgggcctggcctctcctttcctttccctgcctggagccttcttcaaatgtctggtcttaagccaggcctccttcattttctcgctcctgttagaacaccagtcccctccccagtggggccccactgcacctgctggcaggaaataaatgaatgtttactgagtactgcattctggagaccttacatgttttcacagcctagtttgaatactggctttgtcactagctgtgtgaccctaagcaaatgacctaacctgtctgtgccgtagttttttaatctgtgaaatggggataatgtctatctcagagtccttttgaagattgagtcattattagtaacagattaaatgttatataagc

SEQ ID NO: 10621 - DNA, 1309 bp, Homo sapiens
gcctggagccagaaacgacggtacccaggagaagggattttgggcccaggagaaacacttacattctggtgccttgtcttttgcttgtacagaatctgtagtgattttggtggccagtaaatgccagccatttctcaaacccacctcggaccacccagagtttcctcttggtccctgtctactaagagtcatgaaggcagggtgctctgcccactccatcaccatgaagcctgggattgggccacgaggaacaaacagcagatgcccttgccttccagtccaagaaactgcttcttgaaatggatttaacaacagccactcaccttttcctcctgagcctgctctctgatcagctggatccccacgtgagcaacagctggcccaggaaaggctgcctgcagaggacaggtgtgttgggcgtgttgagagccttgaagtgactacctgtatcttagatctgagtacaagcctgaggcttttgcttttgtcttttttgatgagggctcactccagcttcatatggtgccaagacgttgctgcttctgaggttggctctaacatctctggtctttagagccaccagatctctctggcccatacagatatcagagcagacggaaatttctccctgcaagcgctcagtctcatcccagcaagtcaaagacctcctggccaagtcctgccctcttaagtctccaggaacgctgcagggaaaacccagctgaggcctgggcctagactgtggtgaggtcactagattctactgctcttcccccacattaataccttttccttcctcagagagaaatctcccctaacctgaattgcagccccctccagtttgctttcctttggccttccagaccccaggaagttggccttcccttcctagtgctatggtttctgccattggccatgatttcagggagctggctgaggccggctgaggccacacctgtgccagtggggcttccctggtgctgcagcacttgtaaaccacacacacagcctctctccctggacatacgttagcacattggcattcagtattggtggcctggcatggtaggtactacccaatgaagagtgtactatatattttcattactataggccatacttatacagacgtgtatatatatttatataagatctacctatcttaggatggaaccttggggaaaaataaaattgaggggaagtaaaaagtatgtaacacttccagttgtgagccaagattgtaaccagagagcagccaggagcttcctgtcagtaaccatgttttcaataaatactctttcatgtacaa

SEQ ID NO: 10622 - DNA, 226 bp, Homo sapiens
gttccaacaaagtaataaattccaacaaagcaacaaatcaaataacttacacaatgctaaactgtgagtatgtatagaggagtaaaatcttataaatgtaatgaatatggaaaatttttctgccataagtcaaccctcaatgtaacatcagagaaatcatgtaggaaagaaataatttgtttaataaatgtattattcattgtgaactatgaaaatattcaacagc

SEQ ID NO: 10623 - DNA, 2198 bp, Homo sapiens
gtccccctggaggactcccttgaggctgaaccctctcaaagggctgtcaccatcacctgctgctaggacactacaaaacaatcaaataattcttttctgtaatccaatatgcagcaagcaagggtgacctccagtggcccactcaagtccatgagccattatctaggatactttctctctctttcatgcagttcaaagcccaggtatctctcagatctgctgcctgagaaataagctcctttatcagttagctgttttatcattaggatacaagacagcccagtgtcatcaacagtgagcaaatctggcatggtgtttgtctcgtacagttgggataggaggccattcattcccatgggcacagctaacattatcccccagtgattactttcgattacactgaagagaccaccttgtctttaaagatcactttcctgggctgcaatgttccaacccagttgttccagctgttcacaaccagtgtgtgattttgcttagttggtgcccattctgcaccagttgttttacccctgccgataaccagcagtcagagattcttttttaatccttggagacagggaaagggacagatagctttccaaggacatgagactgtgcaaagcctctttgctgtttctctgggctcctgagcataccaggggaagttctagaaaccgcagctgacatctcgacccaagagatttaggattctcctgtttcatctgggtcagtttggccataattctggggtcaggccaggcctgggtcctgccctcccatggggtgactcatgacccctccagccaggactctcctacatgtggcccccataggcctctgtggctgcaaggcggtcagttgctgcttgtcccagcaggtggccttgatctctccatgccccaccttaagtggtaagcatgtttaattatcaaaggccccatttgtcaggggtgagagaaaagtcaaaagataaattggggccttgtaaaaggccagggtaaaatgtctcaggcaagcaaaagattgtccccttctgcatatgggtaaaactgagacgtccccgtgagcccgaggctggaagtggtgtctgccttcaagggttaatccctctttgttccaagcagaagcattctggcatcccagtgaagagctcaggccctcaggaagtgtctgctgaatggaatggcccagcattagcccagtattggaaaagacaccagcccaggggccctgactcgtcacacttccctttcctaagcctctgagggtggagattcccctaggagcgcttggccagctgggaaggcagcgcccagctgcacttgttgttgatacagcataagtgaatcatgggcatttccctgagagcagtgggagaggccctctgagttggaagttgagctccacctcctttccaagtgagcactcagtgttgaatcacagttacaacccactggggctggtgggagatgcgttgtatgggactggaagcaagaggttcattcaaagagaaactcatgggatttgtaaccagatgaatcatgatttctaagacttctgatcaaaaatactgtgaaataaagaatgttaatcaactttggacctggagatgatttgcctttctgaacataagagagcttcaaagccccaaattcctgggctggggattccacagagttgacctctctgattttctactgctcttccctcccctctccagctacatactctgcctcagggccttcgcatgtgctgttccctctgcctagaacactctctcccaagtatatgtctggttccccgactcactttattcaagtccctgctcaggtgtcaccttccctgagaggcttccctgacctcctgtctaaaatgtcaccctcattactctccacccccttactctgctataatttctccttaataggacactgtataacttattttcttattatcttcttctccctctagaatataaatttatgaaaatacaaatgttattttttttactgctgtaactccagttcctagaacaatttccagcacatagcaagtgttcagtaaatatttgctgcttgaatctgctccagaattaacaagaaagccatctcttcctctgatctggggtctgttttgttcattactttgttcactccttcttccatttattcattcaataaacatttattgggaacctg

SEQ ID NO: 10624 - DNA, 2387 bp, Homo sapiens
aagaatgtgtatgacaaccacacacagtgaagctcttttttcaaagtaaatttgaagaaatgctacaagtatgagatgagatctaagtaaaggtgttaagatatttttaagtggtatgtgatcgtgtcattatcatctgcacttcactcaagagcttactatgtgtctaagtcatgttctaggcagaattgggtatttaaagtaaattgaggacaggcttctcccagattgtgacatgtatatctcagatacatgggtgtggcattgaaccacataatgagaacattattctctttttagtccttgtgagacaaggatgaagtctcagttgctgatactcgctgagcttactggccctctaacccagtgtttttttttgttgttgttgtgtacatgttatatttattttgaaaccagtttaatgggatacaaccagcattttaaaaaatgaaatagaatacagcatggaaaatatcagtgtattgttttatgaaactttcacgtgtatatatagaccaaggatatgtgctgagttttgatgtcaaatatatttctctttcagggtcatgatcaaaaaatgaaaagtctgcttaactccaatttctcttttaaaaaagcagacttacagctttcaggcaactgaaattcatgttaacatgtttttatttttattgctttgtatttttgtggttaccttctaagacaagtgattgatctaaagttccttttaagtttataccgctaaacaaactgagttgatttctatcacaggcagtaagtaggtagagcaaaaatggtgaagtgacttgtgaagactgaagtttgatgaagtctggtttaaggcacaggtaaactgagtgtggatgcaaaagtaccaggagctagcttttaaccttgcccagcctcagtttcttttcttagaagaagctatgtttgggtgggaagggaagagagggataagaaaatacctttcttccttgtaaactccaatcaacaaacatattttgagtgccttttgtgttccttggcaccctgttgggtattgggtacttggcaccctgttgggtattgggtacaatggtgagccagacagacacagcgcctgtccttttgtaagaatatttatttttataaaaaagtataaagtatacagtgggatgttttgatatacattatgaaatgattgctacagctgagctaattaacacccatcacctcacatagttactgtcttgtttcttaatatggacatttgcagctatgaatttccctctgcacactgttgtcatcacacactctcagttttggtattttgtgtttttgttttcattcatctcaaagtattttctaatttcccttgtgatttcttctttgaccccttgattgtttagaaatctgttaatttccacacatttgtaaatgttccaatttttcttttgttattgccagcttcattccattgtgttcagagatgatacagtcagtgcctgttcttatgaagcaaacattctataatagtaggaccagtaccctgtctgtttcattcaccacagtcagcatgccccaagtgcccagcatggggcggatggccaggaatgagtgaaaacttcccttcctgggtagttgtgactagtagagaggaaaaataatataattgcctgcttactgcatgccaggcattgggctgggaatttttatattggatctaaaataactcttaagttaggcattatccccattttatagatggagaaactggccccaaaaggtgggaacttgtccaagacgtcacaggtagcaagaggtacttttacctggctccaaatctgtgttctttccactgacaaatgagatatgggatatggtgcatctttacagtactataataagtattggcgtataacattattttcaaggaactccaagggccacaggagctgacaggtttttcaattaatattcccaacatgaatgagatgcctcattcctcagtttcctcacgtgtactataaggctagtacctgctttgttggggtatggttggctcgtgtgcattaagtcaacaaatccctagttgatagggtttggctgtgtccccatccaaatctcatcttgaattgttcccgtaatccccacgtgacatgggagggacccagtgggaggtaatttaatcctcggggcggctacctccgtgctgttctcgtgatagcgagtgagttctcacgagatctgatggttttataaggggcttttccctcttgttcggcacttcctgctgccacgtggagaagggtgtgtttgtttccccatctgccatgattataagttttctgaggcatccccagccatgctgaactgtgagttattaaacttttcctttataaatt

SEQ ID NO: 10625 - DNA, 1025 bp, Homo sapiens
cagtgaatcgggacacaaaccacccaccccattgggagaaaaacccagacgccaggaaaagaagaaacaacaaaggcaggagaacagccactttcagacttgaaaatgacaaaaccctcagttgagcctgagcccccggcgcgggggctgctacactacaggacacccagcatcggctttgactgcagactgttcacccacacgagccctgtgcttttggtgtaaataatgtacaatttgtggatgtcattgaatctagaggactttcccctttttatatttgtattaactttaacttattaaaaaaaaaaaaagaaaaagaaaaacgatttaaaaaaaaaaaaaaaagcaaccaaccccaacaacaaaaaagaatgttttggtattggagaagggatggtcagttagcctgtctgtcacacgacggaatggatactgggcccggggaccactttcatactcacgtcctcatccttggatacccaggggagggcgaaccgttttcgctcgtgtgtctgtacgcagcatgttgggatcgggagtttcggcacagactatcccatcaagccgttggctcctttcagctactacgttaccacgttcctaaaacgcaagctctccggaccagacggacacagggagaagctagtttctttcatgtgattgaaatgatgactctactcctaaaagggaaaaaacaatatccttgtttacagaagagaaacaaacaagccccactcagctcagtcacaggagagaacacagaaagtcttaggatcatgaactctgaaaaaaagagaaaccttatctttgctttgtggttcctttaaacacactcacacacacttggtcagagatgctgtgcttcttggaagcaaggactcaaaggcaaggtgcacgcagaggacgtttgagtctgggatgaagcatgtacgtattatttatatgatggaatttcacgtttttatgtaagcatgaaacacaggcagtatgagagaaagcaaggcccgtcatgctgtccgtac

SEQ ID NO: 10626 - DNA, 954 bp, Homo sapiens
gaaacaacagaggtggacctccaaaaacatagaggcatcacctgactgcacaggcaatgaaaaaccatgtgggtgatttccagcagacctgtggtattggccaggaggcctgagaaagcaagcacgcactctcagtcaacatgacagattctggaggataaccagcaggagcagagataacttcaggaagtccatttttgcccctgcttttgctttggattatacctcaccagctgcacaaaatgcattttttcgtatcaaaaagtcaccactaaccctcccccagaagctcacaaaggaaaacggagagagcgagcgagagagatttccttggaaatttctcccaagggcgaaagtcattggaatttttaaatcataggggaaaagcagtcctgttctaaatcctcttattcttttggtttgtcacaaagaaggaactaagaagcaggacagaggcaacgtggagaggctgaaaacagtgcagagacgtttgacaatgagtcagtagcacaaaagagatgacatttacctagcactataaaccctggttgcctctgaagaaactgccttcattgtatatatgtgactatttacatgtaatcaacatgggaacttttaggggaacctaataagaaatcccaattttcaggagtggtggtgtcaataaacgctctgtggccagtgtaaaagaaaatccctcgcagttgtggacatttctgttcctgtccagataccatttctcctagtatttctttgttatgtcccagaactgatgttttttttttaaggtactgaaaagaaatgaagttgatgtatgtcccaagttttgatgaaactgtatttgtaaaaaaaattttgtagtttaagtattgtcatacagtgttcaaaaccccagccaatgaccagcagttggtatgaagaacctttgacattttgtaaaaggccatttcttgg

SEQ ID NO: 10627 - DNA, 1630 bp, Homo sapiens
acacccaaatgccccacgctgggccgcggcctctggagctgggatttgggaggacacagcaggcagcgctggccttctccagggatggcccaaggcttccgcagccgcccgttccgggacctgcccagcgtcctccctgcctccttccgggacaagcctggccaccctcgctgtgatgacgagctggctgattggccctgggccggcccattcttcacacgcctgccagaagctggaggggtgctggagacccatagagctgatgggagcagctggtgcctggccttcggctcctgcgtccccagaacccaagggaacgtcatggaggccacatggggccacccggctccctcgggatggctccgcctgcacttttgaaaccccggtttccttcaacgtccacattccaggtgaccacacgtgtctcctcctcctcatcttagcttccaggttcaccctaaccctgtactaacctgcttggtggacttggaaaagacttggctctgtcgggaaaggagagacggggcctccatcacgcctgttaccagaggatccccgagagccacaccagctctggacatcaccgcccctggaactggggccaccagccctgggcacgagatttgctctgactttatttatatggcatgaaatctctggtttattttgggattttttgttgttggtgttgtcaaagtttgttttttctaaagttgtgtgattatatatttgacattttacatttcaaagaaaggtatgttgtctaacaggggaccaacagaaggtagtattgacaactgttcctgcttctactaaaaaaaaaagagcacaaaagaaaaactaaattattgaaaaattaaaaaatgtcattgtttcctgtttgttaatattagggttgtaaggtgtcgttttgaggtatcgactgtgattccttcccccaccctccattctccagcggttggccggtgttagaactcgctctctttgagtgactggctacaagggcctgagaggtggccagccagggttggagctggaggggatggagccccacctgaggtgccgtgtcacacgggttagagggtcactgggaaacaccgggcggtggcttctgtgatttattttcttgatggtaacttctcagagcagggcgattgggacatcaccagccagagcacaggaagccaccctgcctgctggggaggagggacccacacaagccccctcggcagtttgtccccccagcttcggtatgccttcagggaaaggtcacagctggggaggaagcggggggacgcctgtcacccctggcaggtggtgagttcaggtgggggctccctgctgcccccaggcctgggagcttgaagccctcccggcatctggcatccgagcctcccgccctccagggtgcgcttccctctcttgccgcagcatacacgagggcaggcagtggccttgtcactgtatcttgcatcagagacaaaggaggacccgctttagccctgctgcgggaaatgggggagggcccagggccagcgcattgtgcactggtttactttaaaatgtacagattcttctcgttaaattcttgatagattttttattattattaaaagtcagtttataatac

SEQ ID NO: 10628 - DNA, 1537 bp, Homo sapiens
accttttctggccatgaaccattataaaatcccaacatatatactgaaaatactgaaactgctttgaaaatttggaatttctgatacctccagtgggccgagagacacggtgggtaaaggatgtgggcagcagcagggaagacaacagaaacacaaggaggcggctgtggccgggctggactgtgctggggtttgttgtgatggccactcggtgacctggcggtccctacgcaatagcagctgcctgtggggaagaagggctgcccagccagctggttctcccgggacaccagcagatccacaccctgggcacctccgtgtttggtcttttttttcccctgtgtgaaagaagaaacggcacgaccccttctcaagctggctcactcagacacattgggacaaaccctggacagccatgccagagagaggcctttgaccggccccagagctaaaagcaccagagaaaatcaaatgcttcctactcagcgtgacccaacttttctagtgtgccacggccccaccacctcctgcagtacccacaccatcaccactgctttctcttccaacagtgatctgtattcttagtttcattattttcttttgattgatatgacactatataaaattttcatttgagaatttctcaattgtatctagttaaatagcacagtttggaaacttgtctgagactgactttatcaataatctaaccgacaaagatcatatccatgtgtatgtggttagacatttttatttcattgactaacccaggacagtttcagtgatgcaaattgtgtgccctctggttcagctgaaacagtcctggactttcaaaaaccttgaataagtctcccacagttgtataaattggacaatttaggaattttaaactttagatgatcatttggttccatttttatttcatttttatttttgttaatgcaaacaggacttaaatgaactttgatctctgttttaaagattattaaaaaacattgtgtatctatacatatggctcttgaggacttagctttcactacactacaggatatgatctccatgtagtccatataaacctgcagagtgattttccagagtgctcgatactgttaattacatctccattagggctgaaaagaatgacctacgtttctgtatacagctgtgttgcttttgatgttgtgttactgtacacagaagtgtgtgcactgaggctctgcgtgtggtccgtatggaaagcctggtagccctgcgagttaagtactgcttccattcattgtttacgctggaatttttctccccatggaatgtaagtaaaacttaagtgtttgtcatcaataaatggtaatactaaatttttttgttaatttattctcaaatgccactactgctaggttggtcccctcccaacttgcccctatcctttttttatttttaagaaaaaaactttgtaatgcttgtgattccatctgggcaaaagtctgaagatctgaaataactttatatcaaaccattgatcaataaacagctactaatg

SEQ ID NO: 10629 - DNA, 1365 bp, Homo sapiens
gaagatggtacaccactgccttttgccctcgccactgaatgactggggccagctccctaatgaaggaactgaagtttgttttttattatcatcctttttaggctgggcgcagtggcttacgcctgtaatcccagcactttgggaggccgaggcaggcggatcacgaggtcaggagttcgagaccagcctgaccaacatggcgaaaccccgtctctactaaaaatacaaaaattagctgggcgttatggcgggcgcctgtaatcccagctacttgggaggctgaggcagaagaatcgcttaaacccaggaggcggaggttgcagtgagctgagatcatgccattgcactccagtctgggcgacaggagcaagactctgtctcaaaaaaaaaaaaatcattctttttagtcttagcacctacttaaggatccacttttagggctcacccacatttgtttctagatttacccctgcgctagagtaagcactttatctccagaactgagagcaaagttaacaaatctcaccccttctctcctgcaaattagtggacagactccctggaacatgtttggggcttccacctagggccacctagtggtatctctgggtctttacttggtcagatgtttattctacattgttccccaggaacagagtatgagctcattgatgcagaccgattctaattgccaggccctaatttgcagactaactctcataataaacagaggcccatagttgtttatgaactgcttatcccttaaaggagcacaagaacccctccctgccctccttgggcaccctgcctccaggagatggaggcacgtgataagacaaaagactgcaccaactcaccctgacacagttacatagtcactgagagtggggaagatgggacagcccacatgctgcataagatgggccttatgcagcaggcccaggtcgtcattaaggagtgacccctttcctgtaacctgcactttgggatggtagaagtttctttacctgctgacaggtttggtggcactgctggttacccctgggccctgaatggagctaaaatcacatttggtaccagcagcacctatcccaagtgtgatccttcatcccaacactccctcttggagctgttccctgggtagagctagcatgccagcagcttctgcaggctccaaacccaggccagaagccagacccaggcctgctgcctgcatctgcattccctccttccagtgttccttagaacagacatttaggtatctcaggtcctttctaagtgtccctttcctatgtatgcatttcctttttttgtctttactatgcactttagcttataaagccaattaaaaacaatgattgagaa

SEQ ID NO: 10630 - DNA, 1015 bp, Homo sapiens
actgccctgccttggaggagagacttttgggtgaggtccaaagaggagagctgttcagcttacctgccacagagcttttctgcatgaactctggaacagaaaggccctgtaaagccctcagagagaagagagactccagagaaggctccctaagaccttgagagccatgacaggtccatcagcatgaagttggccaagccatagggcacagcacctccttgtaacaactctatagccctctttgggagatgacatgagtggaactcacagccaccactaccaccactttagacaggaccgaggccacatactccccattctctcgtggctttccatctcagcctcggagggcaacattgacagtcctcctggcttcagctagagaaggatgctggaacaagcggctggtgttgaaagagtgggttgaccaatttggtattgaatgttgcccagccacccctaggaacacctgtccatcacctcctggatggattccactgttagacagctacagggaatgattggtcatggggaagtctctgcgccataagccacgatcccagcgcaaaacccttactcaaatgtcttcattgacttcggtatttcatagtacctgagattttattttgagataccatcagggtgagttgcaccacttgtactcaattctaattgccccctggcaatctgggaagggttcagaaggtgggcacccagccaacagcatgaactcagagcattgttttagggttggaggaggaacacgctttctttacatcactagtgtagactcaaaagatatgcaagtgtcaaatatgcaaaagaaatagtttattcaaagagactgtgtgttactgaagaacagcataaaaatatgatttttttacttgcaaaaatgaaaggaaaaaaataccacgcattgaaatgcccagttcagactgaataattcctgctgcagcaaggaaagtacctactataatagaaattctgttttgttttctgtggttttcaagtt

SEQ ID NO: 10631 - DNA, 4046 bp, Homo sapiens
cacagggagcagatggatccacgtgctcgcctctgcccagcctgccccagcctgccccagcctcccagctttctgtgtgcacagttggcccgggtgcaggtgctagcattaccacttccctgcttttctcccagaaggctgggtccaggggagggaaaagctaagagggtgaacaaagaaaagacattgaaagctctatggattatccactgcaaagttttctttccaaaatcaggctttgtctgctcccaattcacctcgttactctcacctcgtgatatccacaaatgctattcagataaggcagaactaggagtcttcactgctctgcccccaactcccggaggtgtcaccttcctagttcttatgagctagcatggcccgggccttatccagtcaaagcggatgctggccacagaaaggccactcaggatgtcctttgtgtccattgatgtcattcagcagtcagtcccccaataatccttaaactagctaaaaccaaaggagtcccttagaagatctgcttccctggggccccatttgccagattgccccattgctcacactacttgagaaaatgcaggagagcttcccccaaggctgatgcattcccggtgcagaacaggggcaccctccaaacactgggctctgaggagtggagttctctgttctagagtgacaggcaccagatgggatgggctttctcagtgtcagcactcaggtagggagctaaggaagacacagcccagacaagatggctggaaggagccagccaggactccttagactgatcaagccaaaaaagaaggtgccgatttcatgcattctagtgcagaagccccaactgtgatcacgatccagtctgcagacgtgttttgtttggacttcacttaaaaaaatgccttagttgttatcatctttgggagagttcattcaaaatgtccagcttctcttgaaaacttggtatatctggccacactgggctcacattcccaagggtaactcttggccagagctgagtggcagccgcctcccttatgcaggacatgtgctctcggcttcaccagggttctgaccgggtctgcttctgcattcacagcgcctcctggacctgaaggcatctgagtgtgagaccctgttctaactcttagaagtgacattgtaagaggtggtggggaccagctaattggtccaacccagcctgagtgcaccaccctttgaacaaatgtatcagtgatgaaaatttgcctttgccccggcttgcctgtaatcccagcactttgggaggccgaggtgggcggatcacttgaggtcgggagttcaagaccagcctggccaacatggcgaaaccccgtctctactaaacataaaaaaattagtcaggtgtggcggtgcgtgcctgtaatcccagctattcaggaggctgaggcaccagaattgcttgaacccaggaggtggaggttgcagtgaactgagactgcgccacggcactccagcctgggcgacagagcaagactctgtctcaataaataaataattaattaaaataaaaaacagcttaaagagaaaaatggcctgcaaaccttttttatgatgctatttttattaatataaagtcctgtttattgagaccctttaaatgcctgcgagagaccctacagacagtatgtctactcctcacagcatctctatgaagagaaggagggttgtgcccacttcatagatgagaaaactgagaggtgaggtgacttgcctggggccacatagctcataagctgtagaactctgcaggcagatttactgtcccaggagcaaatgctggatgagcaactcctgttctttgggctcaaggggactggtgatgggacaattcttctcgacttcaggagctgacagagccagaggcacctaaacttgggtacatcttgtaagacacataatgaggtccctctagctttagctggagggagataaaagaaccccagacctctgaatgtcccagaggctagtctcttctcagagcagcactggggtttgggggcttccctgggcctcagcctccaggcacccccaggattcccagagagacgctgtgattggcaggaggcaggatatccccagggaaacccatcttcacgcctgggtgacccccactgccgcctccttcttaactctgcaggaaatcagagctggcagcctccagtgggaggacagagccggtttccgtggcaaccctcagctgcctcatcgtggctgggaagggaaggaagcaagccggcagaaatagctatggaaggtcttgcgcaggctgcaaccctggtgtgctgggcgaaaacccttatgactccccccttccaaatcaggctgggttgtcactgagactagattctcacctgccttcaaagaagggccaattccctttaaaggtcgcacctccttggaaccacagtcattagtgaattacactcaaggaaaagatgtgctcccaccaggcagctccagctgttacctgagatactgaagtgcagctcaggagacgattatttaaacctgcccttgttttaatcgttatttttctctttaaaaaaaatagaagctataaagaaaagagggagagatgagtgggttagctacctgctatgcgctagttaggaagttacctggatgccattgtatttcttcatcccttgcttaagaatcaaaattactggacatatgttaggaatactctttctttctttctttctttttaagctcagtggcaagaatgaaatactctttttttttttttttttttgagatggagtctcgctctgctgcccaggctagagtgcagtggcgtgatctcggctcactgcaagctctgcctcccgtgttcacaccattctcctgcctcagcctcctgagtagctgggactacaggcacccgccaccacacccggctaatttttggatttttagtagagatgggatttcaccgtattagccaggatggtcttgatctcctgagctcgtgatctgcccgcctcggcctcccaaagtgctgggattacaggtgtgagccaccgcgcccagccaagaataaaatactcttaagttgatctaatgaagtgtttccttaccattgtgattattgttactattatttgctatattttaatattgttgtttaccaaatattctcctttaaacagactcgctttttaaacttttttttttttttttgagacggagtttcacgcttattgcccaggctggagtgcaatggcacgatctcagctcaccacaacctccacctcctgggtttaagcaatgcttctgcctcagcttcccaagtagctgagattacaggcgcacaccaccacgcccaactgatttttgtatttttagtagagacggggtttccccatgttggtcaggctggtctcgaactcctgacctcgtgatttgcctgcctgggcctcccaaagtgctaggattacaggcatgagccaccatgcccggcctaaactttgtttttaaaatgaactttttttccccccaattgctgccaatagtggataacatgtatcactcactgccaaaaatagaaagtgaccatgaaaaataaattcgctggggaagggggctccatgctggtgtggccaaggctgagagctctctcttctctgttacaaaacgagataagcaagtgttagaattgccttaaggccacactggcatctccctgaccttctccagggacagaagcaggagtaagtttctcatcccatgggcgaccagggccatctcctcccaccagtggcccccactcacagggagctggcaatgccctacctgcctgttctccagatggagaaacaggctctgagatttcacaggtcttgcccaaagtcattgattttgatgattaaaaagaataaacacagtgtttcctgagtagcagtgattgttatgccttgctattttaataaagattctattttcgtataacattgtcaagtggaaacatgctgaaatctattaaaccatctttgtttgtggaa

SEQ ID NO: 10632 - DNA, 3364 bp, Homo sapiens
gaggagagaatgtacgtttgctttacccaccgccaccaagaaagcagtccgatgagatttttttttggaggggggagggtctacacagcaagagaacagaaatactgtgtctcatgaaggatcacagagttcagggggaaaatgtgacagcacacgcacaaacgccttcactggatcagccgctggaactgagggagtgagcttggggacttccttcgtcagcactggctttctgttttcacaagacagacgtctgtcccgctgctctctccccatctcctaccccacatcctgtcttagccgcagtctccagaacccatgatgaactgtgatctgccgtggtcctgccgtggtcctgccgtggagcctgtccctacacatgaccttggagcctcttggccttcagagcagaggcaaacccaccacagggcagctgcgttttaggaagagcaaatgaaactccacaccattcttctagatctctggtgttctctttggtttcatttttttaaaaaattaccttctttgggtggggattgagggtggaggggagggtgtttgggaaagataaatagacataaatatataacaatcacttcttgaagaagtataattgtaaataagccatgtaaaatgcctttttaaaatttaattttctagctggctccaattcaaattgaggatttatgtattaggccacttacttggttggcaagtgcaggaactcagttaaaatgcagttgaagaatgtcatctcccgaattgctgtcactttggcgagggagtggatatagggcatgtcacaaaagaacaaaataacccgacctttattgctgggagctggcttctgtccctttcttcccccccccacgagtcttgcccttgacttctgctctggattcactcttccctgtcggccgcgcatgtgctcatcccactctccgctaagcgggaggctgctgttagagcaggctgcttcctgcctaaagcaggcccttcggggctcgctgcacacacatctctggctctccaggcttcgtgttctgtcttttcatcagcatggcggggcggggggcggggggcgggggtgtgtatgggaatccctccccctcttactttttctcttgtggaacttggccacagtttctgaacaatgtgcctacattaccagctggcttcagtgattcctctgtgtccctttttggtttctggaaagattctttgtcaacattagtaactgatacatagaaccaaggagcactcaaatagggagccaggagccagggagctggtgacacttgtgtgctgtggggcagctgggatccaggtaagaccggattgaagctttgaaattagactaacaaagctccagacagcaagagcccaggtgcactgctcacacccccacctgcattttgaagtcatattattttttgttttgttttttaagacggtctggctctgtcgcctaagctggagtgtggtggcacgatcacagctcactgcagcctccatctcctaggctcaagccattttcccacctcagcctcccgagtagctgggactacaggtgcacaccaccacacctggctaattttttgtatttttagtagagacaggggtttcttccatgttgcccaggctggtctcgaactcctggactcaagcaatccgcccaccttgacttcccaaagtgctgggattatgggcgggtgtgagccattgcgcccagccttgaagtcatgttctaaattgtatttgaatttgtgcctctttgtttttccccaaaccaaagccctcaaattgtagtctctgtcggcttctgcagaattctggaaaatgccagttttcctcccccgcccttgttttccataaaacatatttatatattgtgatgaggagtactttctgaagagtacttcgtatttttttttaattgccttgtttgccttcaacttccttgattttcatagtttacatgggtgtgtgtaggggtgtgtgtgtgtatgtgtgtgggttagggcttttttcgttgcatgtgatggttctgtggacatatgatccccacaaactgtgggagtgattggccaggccttgttttgtttgtttgtttgtttgtgtttttgttcttttgaagaatagagtggtatttagaaaataaattgcattgcaaagctcttatcggctcatatgagagagcaggttcctgcccttgaaaatgccggtaagctatagcatatgttttttaagacttaagcatttcatgctttaaaataccttcacaagtgaacattacacacagaagttcatttggttttcctttgttttatggtgcatatagcaataaagacccccctccaccctgcaacccccatcccccaccgggcctttgtccctgccttggcttttctccccttctcattctcctctcccctttcctcactgaaggctgtgagttgctttcaatgtgacaacactatgatgtcatttggaaggatttgccaggacagactgattctgagtcctgggtgccgtatgtgtatgcggcagtgttgtcaggcgatcttgtttgaagctctatgttgccataattaccatcaagtacacactgttggcaaaaggctaacacctgactttagaaaatgctgatttgagaacaaaaggaaaggtcttttttcactgcttaaagtggggtcactttgatacctttgcggtcatgtctgtgtctgatgagtgtagaatctctggatgtgcactgtcagtcatgtgtccaccaggcctcgaatatcatatgggaaatgtcatagttaaaaacgtacagccaggcccgtgtgctgttaatagtgtgaaattgtcatgttaaaaaaaaaaacaggaaccaaatgtgaccttgtgcatatattggtagctgaaaatcttcaaggctactgatgggtggccccttaatcttgtctttgattgctgtgtgcagggaaaggtgtccccgtttgttcatgctgttttggggggtgggggggtatttgcaagaatactcattttgacataataggtcctcttgtcagagatcctctaccacagacattaatagctgagcaggagccacatggattgattgtatccactcaccattgacgatggcattgagcgtagctagcttatttccatcactacgtgtttttgagcttgctcttacgttttaagaggtgccaggggtacatttttgcactgaaatctaaagatgttttaaaaaacacttttcacaaaaatagtcctttgtcattacattatttactcatgtgtttgtacatttttgtatgttaatttatgaatgattttttcagtaaaaaatacatattcaagaacc

SEQ ID NO: 10633 - DNA, 2225 bp, Homo sapiens
accggcctcgccccttccagctccaagggctacatcaaccgacctttcgggtttcacggtgaagaagtactaacgcattgatctcagaggcggaggcctgcacttgaccatgtaggtggcagagatcgtgggctggctgtgtccacgtgggagttcacttagcgactcagatatctcaaccaatggctgctttgttgtctgacaagggagaaggtggcacttccgttcagattcattttgctaatctctccactccctgttcagttggttctttttttggggttttgttttgttttgttttgttgttttgttttttcctttaaagaggatttctgtctctgggaccctcgctgcacctacccctcccattgcaaagccaacttggactgggaagggcccttcaggtcaccaaacatccacctggagcggcgagctagaggcctgttggcttgtgaaatgagccctcctgccacacggggcctctcccaaaggctcatcccttggccgcccccttcctaaacacaaggatccccagctggactccccaccccctggcttccccacctctccaggtgtcaaaggtgaaccgagtccagtattagctgaatgtcatttcgtacaccacagctcagtcagcccatggccttcgtgaactttgctccaacacactgatgtgtgggcttcccacagcaggactgacttccccctttctgttgtttgcacatgcccctcttactgtactgtcaatagatatttttgagatttatttttaaataaatattcaacttgctgtgtgtttcaacgtggttaaaaaaatgaattatgtagctatttattaaatgccctgggttctttagtcttccaagggagggcctcgcgcccattcgtgttgtatcctccactcactatggcccgaggggagaggagagtttggggcagggaggaacagacatgaagcctccttttcttgagctggtggagagccactgtcttccctgcagtaactatctatacacctacctccagtgtgcacttagggggtgagcgcgggtgtcgaggtctgtgtgtctgcagactgctaacctatgacaattcagggacctcacctgtcggacctatagcttgctgagcaggaaccttgcacttcacacttcttgagtctcgtttcagaaggaaaatcatttgggattcctactgcccctccatctcaatcctcttctcttcaccagtttccaggactcatctgcaacatttgcaatctttttgcactaaaagtgggcaggagtcggcatgtgcccatcagagagacggctcctcagatgctcagctaagcctaagcgcttccaagcctgaaggccccttcagcttctcatgtgaattaccaacccctggattttccttgtgggggtacaagagcaggagtggggcaagagtttgaaaataaagccgcttccttgtgaactaactatattttagccataactgtttgtgatgtacacaatgttaagggatttatatgcagtgggcttttctgggagaaagttattcagctcttgagcaagtttaagtctggctgaatcctgaggccactgtgaatttgctgatgttcttccaactcagttgagtgattttaaggttttccaaatcttctatggctctctttttaatatatatatatatatatatatatatatatatatatatatatatatatatctatctggtagatcacatgtagatgtacagtgtgtatattaagctgaatttcaaccaactttattactaagaccagcctagcagggcattcatctttgatgttcttccttttcacatttcagaatcggcaatgcctggcccactcctgagagctctagttttctagttttccatttccagattgcgccagcattacagtaactaactctttctaaccaaccgtgatgccacgtaacttaccctatggacaaaagcaggaatgactaacacatcctaggagggaaagtccagtgtacctgtcatcacggacgcactgtggtcacagactggaatacgaaatactacagccctgctcccaggtgtgcatcttactggatgaggttgctgtgattgagatagttaaatacatgctaatttaaaaatgcagatgttttacatttgatttctaccaagagttgaaatgttgagagatgattaaaaataataataataaagtgtcttccattgtt

SEQ ID NO: 10634 - DNA, 1644 bp, Homo sapiens
tcaaaaagaaaaaccacaggcccttccccttccccccaattcgatttaatcagtcttcattttccacagtagtaaattttctagatacgtcttgtagacctcaaagtaccggaaaggaagctcccattcaaaggaaatttatcttaagatactgtaaatgatactaattttttgtccatttgaaatatataagttgtgctataacaaatcatcctgtcaagtgtaaccactgtccacgtagttgaacttctgggatcaagaaagtctatttaaattgattcccatcataactggtggggcacatctaactcaactgtgaaaagacacatcacacaatcaccttgctgctgattacacggcctggggtctctgccttctccccttaccctcccgcctcccaccctccctgcaacaacagccctctagcctggggggcttgttagagtagatgtgaaggtttcaggtcgcagcctgtgggactactgctaggtgtgtggggtgtttcgcctgcacccctggtttctttaagtcttaagtgatgccccttccaaaccatcatcctgtccccacgctcctccactcccgcccttggccgaagcatagattgtaacccctccactcccctctgagattggccttcggtgaggaattcagggctttccccatatcttctctcccccacctttatcgaggggtgctgctttttctccctcctcctcaagttcctttttgcaccgtcaccacccaacaccttccatgacacttccttgctttggccagaagccatcaggtaaggttggaaagagcctctgacctcccttgtttagttttggaaccatactcactcactctccaccagcctgggaaatgaatattgggtcctcagccctgccaccctctgctgtcatcagctgatgcattgtttttagctcaggttttgataaggtgaaaagaatagtcaccagggttactcagacctgccagctctcggagtccttggtggttgaacttggagaaagaccgcatgaagatacttgtaagcacacatgatccctctgaattgttttactttcctgtaactgcttttgcttttaaaaattgaagaagttttaaacagggctttcatttggtcatccttgcaatccattggggtctagtttggaatctgacaactggaacaaaaagaaccttgaatccggtgcatgccttggttttggtgctgctgctgcttcccaagatcctcagcagggattaagaaggaacccggtgtgcacagcagatccccgaaattggtgggcttgacctcctggcaaattgctgcgtctttccacttgctgttcaggaccactaaatgctgaaatgtggatgcataccgaaataaaagcaattcattgtgtactaaaggttttttttttttttttaatttagtatttgtgtaaaaccaccttttgaagcagcaactatcaagtctgaaaagcaattgatgtttccattaatctttttctggggggaaaaccttagttctaaggatttaacatcctgtaagtgaagtttaacataacagtattccataagcagcctttttattgtcagaccattgcctgattttaatataataaaaaaaaagtgtgcgttaatatttaa

SEQ ID NO: 10635 - DNA, 1285 bp, Homo sapiens
cttctccgagcctgctacctggttgccaaccttccctagcccccaaaccgaagccatctgccaaattccagcctctttgagctggcccctccagatggagaggacatctcctgggctgggcccaggtaccccagcccacccctcatgacacagaatacttgagccactgatttttcatttcttttttttttttttcctcggcccctcctcagccacctgagttgctctatctgcaagcctgactctgccagcctcccctggtagagaggaggtttacccactccctgcacgcctgccgtccctgccccgctgggcagcccttcagtgtggctggcgttggggccagtgagttgcctctttccctccttgtctggccccagtggtctggggagcccccaggcacacctaagcgtcgtggagcattgttctgccacagccctgcatactgaccccgggaggctgggcaggtggacagccccagccaccaccttcagcctagcctgtcccccaaggatggtgaagctcagcaggggtctgagggtagccggccagaagaggctggaacctcctgctcaagtctagacccctacttctctgctgcccccaccctgccagagctgatgtttccaataccaagatgtcttcacagggcacagcccctgcagagcatcttggtcatttggaagaggacacggtatcccctctggccagagtatgtcagagaaggaagagtagggcttttttgttttgtttttttttaaaggtgcttgcttgtttaatgtaaataatagaaagccttaatatcttttctgtaacacggagtaatattttaatgtcatgttttggatgtacataatatatttataacaaagcagcaagagtctacttaaccttggctgcctcgtggtgtttcctggctgggtggggtggggggtatcaaggagcctgggacgtgaggccccactctcgccccattcccagctccccccaaccctggcctcaggatgagagctgtcacctgagacagtgaattaatgttgacatctgctccaaagccttttggaggggattgggtgaggacagtggtctttcctgttgatcatgatgataaagtaatgatggctgatccctatttgtgacttccttcagcaaatattcactggcacctggtgtgtgccaggctctgtcctgtacacaggtacagcggtgaaagaaccaacaaagacctatcctggtggagctgacctcctgggaaaagagtcaataaacaaataaatgcacatgg

SEQ ID NO: 10636 - DNA, 1059 bp, Homo sapiens
gtgccaggttccctggcgttggtgacatgctgcagcctggaactctgatatccagtgtgactgcaaagctgtcttctcactggtactgccttgtgagtactggttggactgtggggcatgtggccgctgcagttccagtggttatttctaagtctatgacaggacaggctgttcttgcttcagaaccttctctgacagacacggtaactaaatgtgaaaaaccaataagctggtgactcatgaatacacacgaggaaaagcagaggtttattttatctgccttttcaacatttctttccctctgtgaaatgattggtcagatgtctttgagaagtgttaaactaattcacatggtagtgtagggccaacatacaagctaccagtctaatgtgtatagtagactttgggaaaagcgattttttttcatgtattcattctgaatagttgaaatgtatatttgtacagtcttttagacctattcaagtgatgctcatgatcctgttactgtgtgcccatcatagatttctttttttagtgttgcccttgctgtgtaataaacgctctatctagtttacctagcaaaagctcaaaactgcgctagtatggactttttggacagacttagtttttgcacataaccttgtacaatcttgcaacagaggccagccacgtaagatatatatctggactctcttgtattataggatttttcttgttctgaatatccttgacattacagctgtcaaaaacaaaaactggtatttcagatctgttttctgaaatcttttaagctaaaatcacatgcaagaattgactttgcagctactaattttgacaccttttagatctgtataaaagtgtgttgtgttgaagcagcaaaccaatgagtgctgcattttggatatttagttttatctttagttcaacaccatcatggtggattcatttataccatctaatatatgacacactgttgtagtatgtataattttgtgatctttattttccctttgtattcattttaagcatctaaataaattgctgtattgtgcttaatgt

SEQ ID NO: 10637 - DNA, 1123 bp, Homo sapiens
aaaatcctggctgatgagcacaaatctcacatcgttttttttgctgctgcccagcctggacatagcctgcactctgggtaatggtgctgtgcactcctccaggagtgtgagctgcccagagctctacctgagactccggccattgacccagccccagggcatgggctggtcttttgtacagaggcagaaaaaagcaaggcaaaggtacagcattccaggggctgcacggcctcaacagagcgctcaacttctggctgagggtctgtgtgaccttccccgagatgcagagctgagccaaactaggtggccacctacaaaagggccaaggccaggcaagttgaggccctaaataaaaggctccaaggcaagtgtgtagaactccaggcctcgctgccggtcagctgctcggcacttctgcgtcaagaggcactggggatgcagcaggctggcaggtggctggccctgctaatgcaagactgctcaggccatttcagcagcagccaggtgtcaccttggtgagctggggaaggtgggaaggcacaaagccagggtttctacaaccacactctcagcccgactgacttgctgcgagtgctggtggagctcacagacggcggctggtggatggtggactgtgaacctcactttccctatgttcagcagcacaaagggaagaagccaccacatcagcccaggagccctgagcagcacaggcagtagggccactcactttggccatccgcacccaaatgcaatcaatcaacccagcttcggaagctaccctaggatctcgtcaataaactgctaagaagccatcaactggcctaaagaaagagttcactgaagaacgcaattgctttaaagaaagaaaaattagtttcctatttaagtcttaaaaaaaagcaaaccatgtcctgagatgtctgtgttaatagtgcagagagaacctagggtttgaggttgctgtagcaatggcattggagaactttaacttgaacattctcatcgatacttcctggacatattttgtgtttttaacttacttagtatttatttgccttgttcatatgttcaattttctgaaatttcaattaaactattggtgtttcactttttacccaaa

SEQ ID NO: 10638 - DNA, 264 bp, Homo sapiens
aagaaagatactcatttatagttacgttcatttcaggttaaacatgaaagaagcctggttactgatttgtataaaatgtactcttaaagtataaaatataaggtaaggtaaatttcatgcatctttttatgaagaccacctattttatatttcaaattaaataattttaaagttgctggcctaatgagcaatgttctcaattttcgttttcattttgctgtattgagacctataaataaatgtatatttttttttgcataaagt

SEQ ID NO: 10639 - DNA, 383 bp, Homo sapiens
gcgcggaggacacgcctgccctgcctgccatctgtggcccgaagccattgccatccactgcagacgcctggagagggacaggccgcttccgagtgcagtcctggcgcagcaccgactcccacgcacccggggaaggacaccctcactcccacaccccgggaagaacactagaacatcagcagaggggccctgcccctccgcctgcagccgtgaaaggaagctgggtcatcagcccagccccgcccaccccagcccctatgtgtgtttccctcaataaggagatgccttgttcttttcaccatgcaaataacatgcccagcaaaaacttgctttatgggtctgcctggagaaaaaaaaaaaaaatacaaacagcagaaacagca

SEQ ID NO: 10640 - DNA, 832 bp, Homo sapiens
gcattgtcacctcctccagaaagcctcctctgattgcacactggctgaatagcatccctggtccctcctgacatcaggaatgtttgtgtgcatggtctgcctccctgttaatatgtgagcatcatgggggtccacgcctgtgcctgtcctggcctccactgtgcccaccactgccctcccccttgccagtgtttagaacagtgtccagcacaaacaggcactcaaccactatttgttgaatgaacaaatgagtgaataaatgggtggtgtgatttttgacgtgcctggccctgagcgaagcacattacatatatcatcaaatttatctcaaccattcggtcctttctcaacgttcctaatcctttgcatcatagtagcccagacacattttctgggtcctgaagataatttttattgataggtatatgtgtgtctacaaatggtgagcatttctttttgttacataagagaatgaatggaaagtttatttactccagggcctgacacggggtgtgtgctacagtctaagggctcccactcatctgggagttcacgggagccggagctgggctgcatgtgccaactacgtcttatctccctagggaatgctccagcaaccctgtgggggaagtgttttcacacccactaggtatttgaggacactgcccaaccccaggtctaagtccagtctgtctttgtaagcatggaaatatggtgtccacgtggcagcttggggacctaatatagccccacaggactatgtgattggcccacacaaggtttcccaaaaatttgacttggttgccaacaataaaagtgaagttttttcata

SEQ ID NO: 10641 - DNA, 223 bp, Homo sapiens
ttaatgaaattatcaggaaggagttttcaggacctcctgccagaaatcagacgtaaaagaagccattatagcaagacaccttctgtatctgacccctcggagccctccacagcccctcaccttctgtctcctttcatgttcatctcccagcccggagtccacacgcggatcaatgtatgggcactaagcggactctcacttaaggagctcgccacctccctct

SEQ ID NO: 10642 - DNA, 4436 bp, Homo sapiens
gccgtgcgttcgctggagggggccctggtcttggcgcttccctgatggacagagctcaagttccatttatattaaccgccacctgtggattttgcagtaattgctaacacatgcagttttaatgggaagtggctctgcgcctaaacggagtcctaacgctgcatcaacgggagggagggtcctgaaagagacccatctgggcctgtctgaacccctcgttcttcatgtttaggtgaatatgaatatgttaaagctggtggctcagctgggagatttatatgggtcactgtgcgagcttccttatgacttgaattttgttgtcacatgataaaagtttctgtgtagctgaaggttgtagaaggcttgtgtgtgtgtgtgtgtgtgtgtgtgtgtgtgtgtgtgtttttaaagagtcctaatgtgtatgtactctttatgtctttcttgctcttacaaagaggtgtcagaaaaatagaaagctcttggtgtcggtttgggaggaaaagacagtgacatttggtaaaaagttatccacacaataatctccattcggaaatgctcagtatcgtctccagccagccctgcttatccaggttacactggattcctgggatcgtaaccagtaaatgagaggagagggagagagagtgtcctaagtccaatctgttatccttgatctgattcagcatccatagtgtgtgagttaacttcacctgccacctcgtaaaagaatttcagaggtgtgatcccgctttattgggacctggtaacaatcacaaagccagtggctgtttgagaaggacctcagacattttcagcagagttgttttagcaggaaacgtgccactgaatggcccctaaatgtgtcgacagtgtgataagagactcaactaattctttaggcaacatggcagatgtgactcagatcctccaagaccaaagcggaaaggtcagggggctgggactcttctcttccatagaagcctgtttcctgttaggaggcataatggaagatgaccccacaaaggcagaggcatctttcggaacaacactggtggcagctttcagaacaaggaacccctggtgggaggacgcccaagctacagcgttgggatctgggatctgttccactgccggcagatttcaaggggaacttgctgaaaggcagccagtggtgaagatttctcccctcccaggatggactacatgccggcatgtttcttataaagctgtggctgcttgtttcagaggaagggagtttgcagtcgcgggacgtggtagagcaaggcattcttgggttttcaagttgcttcttgcagaagccacatatgcatgccataagggttaagttggtggatctttaagagccaagtgtggttgagatcttggatttgcgtttacttcttgatgaatacatatccttcaaaccctctgcctggcgctacttctgtgtgcttcagagatgtacatcacagcctggtttctgatgcctactaactcctgctcttggagagctggagacacgaggatcagatagtcccttgcctttggagcactcttgataagcttttgtattttgtgttgtccttttaaaatgttctagaatgactttacgttgcaggtactggttaattggctgttgacaccacatctattttgtcttatgattctgcagttttgcagtacttttctctatctgattcagccatttctgccagagggaaaaggtcggcagaaaagatgtattgagtgaatagttaaggataggatctttgtccaaaaatttcagaaagattgagcaaatctgacgtattcattgagtgagtttctgtgttttcaaaggtggaggagaaatttgtgctggaagtttttaagcctccgttttcttggaaatcagtctgtaacactggcaagtcttaagatagtcccatttagactttgcagatgctgaacctggctctgtaacgctgggaagtcttaagatagtcctgtttagactttgcaaaccctgtacctggctttgctcggagattcgggatgctggctcctgcaggcagggcgtgtgggagcctcgtcagaaagttttagaggtttccagcagaagcagaatgaagatggtctccctggccttttccttaattctcaattttgattgaggtgcacaagttgacttttaaagccaacgcttaagatactgattgacatcttcaagggagaatgctcccaggaggggctgaagaagccatagttggaagtggaaggtactcgtcagtgttctccacaaacctttttactctgttgtctcagccgcactggggcggaggcggtcaagggtgagaagtaccgacactcaagtgcaaactgccacgtcgttggcccatcccatcagtgggcagctggctgacgccattcactggacggtccctgaacacctaggaatgcacacaccgtgcttctcagacactggagacgcaaaggcaggaggatgcagtccggtgagaggacacgatctttacctgcacaatcagactgtaagcccagcagagaaccccaggggcgcctgggtacttctcggaggtcatcttagttgtggtggggaagacaaagaaataagcaaacaagaaactagagttactatacaagaaactctcctgagtttgtaaaccttaagcataaggattcagttgacctttttcttggttcatcaatctggaaagaacttacataaagcgccattgacactgtcacctgggagctccatgggccgtaagtctttgacagccaatttaatttgaggtcagagggccttgaggtacacagtcagcactgtttgaacacttttcctgaaagcaaaactcacagctccctgcgccctctgacaacactagctatttctgccagagtaagaacttctattactattttattattgttcatatgtcttttgatgatggttgtgtgacagggggaagcaggatctatttggtttcttcccctccccccaccccttcctttttgtctctctttttttttctctaagaaaatcaccagactagtttttccatcttgagtaatttcttatgtgggacagttttgatcctcattttgaaagcatgcgtgtgcacatgtgtgttgcctgtggtgccaggtgagacaggtggcactaactccagctgcttggaaggcatcccaagggcgcatcttaaagttggagcagacctcccttttccagcccctggggccattagaccacgtgctggaactagcattgtaaaattcccatcccagttccactcccctgaagtgaaacccttttttttttgtgacagtaaatcttaaaaatcattgtctctttatgaacatttcctcagtttcttctctgctgaaaatgtaagccatgctactttttaatgtattttgaattttgtgctcattggaaattgatatgctaatgcctcccccaccccccgccagacttttctttttatactttgtcttgtttttactggggtaggctgggcatgcgtgcgtgcctttagggcagcattttaaacctttgccaaaattgcaaatgggacatgtacattcttctgctccatcctacttaaacacctatcagctatttttatctttaaccttttctgtatgtttgaagtgtgtggggggtgtgtgtgtgtgtgaaagagcgagagaatgatgtcatctaaagttttttgaagaattatttggttttcattgcattaaaattctatcactcccagctttgttttcatttaaaaaaatatacaaagagctttgtaaatacaacacattttatttctcccccttcttttaatgtacagcttttttgccacttatatatacttaaaatattcccatgaattatgtccagttcttcttggaaaaaaatttggttttgaatgaacctgcaaagcatcctgcagcgtgagcagctcctccacctggagctccgaagcatcttctcaggccaaagcggcattacccgtgaatctgtcttctccgccacagcatggtttgaggcgcagtctgttaatatagctgggccatgtcagtgactgttgtgtttgtggggtcaggtggggggcatggtatttgcaaaaaaaacaaattatggctaatttattattttgttgcagtggggttaactgtaaactcatgtaagagtctgtgatttcctcattggttgatctctctctctgtaatcctcattgcaaattttcaccaggacagcgttttttgattagaggggagctctggcacagtatgctttaatttagcaggaacttccagatgatttaaattctcgatgctgtgatgacacacatatgatctttcgtgtttctgagcgactctactttcattgtttgccagcgtggctcgttgctgttgcccaataaagcttgtgtacgttctgc

SEQ ID NO: 10643 - DNA, 219 bp, Homo sapiens
gggagaacttgcgtggaaggagcaatgcagacacagtgaaatctctagaatctgctttgttttgtaagaactcatctcctcctgttttctttttcttactgatatgcaaatgatgtttactacgttggttgtgaccacaacctcaggcaagtgctacaatcacgattgttgctatgctgctttgcaaaaagttgaaaaaataaaaaaaaaatgcatacc

SEQ ID NO: 10644 - DNA, 865 bp, Homo sapiens
tgcttaaaaaaacaaaaggagtgggggaaaggaattgagaaaaagaaatcttaagtagaattctctaaaaggtttgctcttaatgttttctttgttttgttttgtttttgagacggagtctcgctctgtttcccaggctggagtgcagtggcgctatcttggctcactgcaacgtccgcctcccaggttcaagcgattctcatgcctcagccctccgagtagctgggaccacaggtgtacgacatcatgactggctaatttttgtatatttagtagagacggggtttcatcatgttgaactcctgacctcaagtgatctgcccacctcagcctcccaaagtgctgggattacaggtgtgagccaccatgcctggccgtggtttgctcttaatgtttttaaggatggttgtgaatccccctggccccataataaattgtaattttatactgcttactataatttttttaacactgtaacaactttgagaccacctctgaatcgtcgcattataactgttgtagaatcttaaatgttaccaagatgattccaatgaggggttggaattaaatgcattaagtagtgaattcatgtgtttgtttccaacttgattttccaactctaataaaggtttctgtccatcttattacatttgtgtagtaaatggtacttcccagcctctcttttgccccattctggaatactccccagagtttgggggtgttcatgttttatacatgtaagtctgttggcatgaaggaccattttctacataatatgacatggatacttgacccaaaaaaaaatgtttagtgctaatgagcagaaaatgaatggttccataataaattgatatctgattaaaat

SEQ ID NO: 10645 - DNA, 545 bp, Homo sapiens
ctcagccgaagagggtggtcagctgtcggaacttctgaccagtgctgttgcccagccctccagaggtgaggccactgagagacaggctttgggcaccacttctggggctggccgctccaacttcacaggccttcagaggcgatggctgggcgacagtgacgaaagcaaagcaaagcagggctgtggagacactcctcgcatttgtctcttccctccaaggattatctgagcaagtcgacttgttcattcaaaggcggggtctgccaagccctgctctatccaatggggatagcttctacgtaacggattccaattttaaaactgatccatctctgatggaattattaaacttagacgatatagaaaactaaaactaatctctagagtggaaagggttaaagtgaggaaggtgtacgtgaagggtctggggttgctggaaaacttctatttcataacctgggtgatcgttctaagagtgtttgccttatatgtttgtgtggtttcttttacctgttgtcttacaataaaaaaggcagactcatggt

SEQ ID NO: 10646 - DNA, 2192 bp, Homo sapiens
gtcttggtggatgtcagtgcttactccccatgaaattaaattttacttcatcctttgagaagcgaatggtgaaagctactgaaataagctgtgattgtactgtacataaaacatatgaggaatctgcaaggaacactacagttgtgtaaagttgttctgttaacttttgtaccaaatagcaatacaaactagttggaacagttggaacttacatacatggggactggaaatctctattttgtccctgaataatatttttcttagaattgaccaaataagaagtggaatttttgcatacttgagcgctgctgaaaagaaatcatttgggttgggtggggcgggatgggggaaaagtatataatgcttgcacctcaggtaaaaatctgtaaatatctaagttgtaaacctgcttgttcaaatactgtgtgtattccttttctctaatgcagctcatcacttggagcagtttctgctattgtgctctttcatttaaaatgtatgtttttttttttttaaactgtcaatgattttgtattatgttgaatccacccaaatctattgttgtcttaaaattgttaatggaagtattgaccctctatgatatgtgctgcagatatcgaggtcagccattcggaagctggcagcattttatcgcaactttgagcatctcagatggggaaggcaccttcttcctcgcctctccagattgtcctggaacctccaggatccttgactgagggcgttgggatggcttgtaggatttttaagagagtgtgtctacagacaagcattttctctgtagagcagccacacgttgtataaacataaactgtatgtgcagttatttaaatttgtttctgtcaaattaatcatttttgttggacgattcagtggcgggggggttttgcctaaattagtatataaaaacaaaaatgctaaattatatctgtgaattgcaggtattggggaacagttttaagggaaattttggggggaacattttaggtttgtatttggtagtcttaatgtatctggcatttgggtgaactgtggacatactagagttgattatagacacattgattttgaataaggaactgctggccgagcccgctgggagtctagaaagagaaaatctgtttctagacctcagttattttcccatttttggttgttttgaagcagtaacatttttctcagtgcacatgcaatttgggttttagagaagatggccaccagctggcttcctagatattttaaacttttgttctttaatatgctgtccatggctgagtttattagtacatgggcttagtgaccacaaaatattttattaagaaactgtttcaaaaataaatttgcactgttcatttttctggcctcgctgttctccatagagcaagggtaatcctagaaaaaattttttttttttaaattatgcaacgtaagatgtcctccttgatagaagtcttagctcctgtgttacaagggagaactcatttgagatcagtctgttggcattgcaatgaagtgctttgtatcaggaaagtgtacactattgaccttttttcctgttcacaagctgagccatatgtacataatctagattttgttttcatagttttgcacttttatagcctatttttgaagattaacacatttgcaagatgattgactcaatctttgcctaatccaatgagtgttacagagagcttgctgtgactagaaccataaatcttaaagggggtatgtgataatagagggctggaatttaaacctgtatttaaaaaaaagaatcaccaaatctatttgaaaacaagtcgatttgtattatgctggaattttttgggctttcagatttctctttttaaccacatttctgaatgtataaaaataccaattattttcctacagccctttgtacttcaaaatatgtttttgtgtccatcagtattaactattggtatactactggttttatatttttttttctttgagacaacagtacatataatagaggtacaattcgttggatttttgtttatgtatttatttcattccagtttgatttattttaattgttgatacttaagttgtcgaacagtagacattacttgttttatttatgatatatttcagcttaaagttatgttattatatgtggaagtgtaaatatagatttggtgttttgc

SEQ ID NO: 10647 - DNA, 944 bp, Homo sapiens
acaaatcagcacggttcccaccaggttctcctgccaccaagatgtgttctccttactccatctcctccccaaacacgctccatgtatatattcttctgatggccagcaaatgaaattctgcctagaaattaagcccgagctgttgtatattgaggtgtattatttacgtctctggtccagtcttttctggcaaataacagtaaagatggtttagcaggtcacctagttgggtcagaagagtcgatgatcaccaagcaggaaagggagggaatagaggaatgtgttcgggttaagtgatgaaaatggcagtggtggccgggcgtggtggctctcgcctgtaatctcagcactttgggaggccgaggcaggtggatcacctgaggtcaggagttcaagactagcctggccaacatcatgaaaccccgtctctactaaaaatacaaaaattagccaggcatggtggcacacacctgtagtcccagctactcgggagcccaacgcacgagaaccgcttgtacccaggaggtggaggttgcagtgagccgaagttgcaccattgcactccaccctgggcgacagagcaagattctatcaaaaaaaaaaaaaggcagtggcaagtaagttatagaagagaaatgctgctagaaggaattaagcgttgtagtaaatgcgtgcttatcctctaagcttgaagaagggagacgaaaatccatttgtttaaattcacatctcaaggagggagaacccgggctgtgttgggtggttgccaatttcctagaacggaatgtgtggggtatagaaaaaggaatgaataagcgttgtttttcaaatagggtccttgtaagttattgatgagagggaaaagattgactggggagggcttaaaatgatttgggaaaacaattgcttttgaggctcagtgacaacggcaaagattacaactt

SEQ ID NO: 10648 - DNA, 1313 bp, Homo sapiens
atggtggtatttgctaacatcatatccaactcagggaagcggactgagtgctgggatccaaggcattctacagggttcactgctggtttacacttcacctgtgtcagcaccatcttcaggtgcttagaatggcctgggagcctgttctgtcttgcatcttccatgacatgaaagggaggctggcacttgtcagtcaggtagaggttacaaaccgtttcaggccctgcctaccacattcactgtttgaatctttaattcccaagaataagtttacatttcacaatgaatgacctacaacagctaaattttctggggctgggagtaatactgacaatccatttactgtagctctgcttaatgtactacttaggaaaatgtccctgcttaataatgtaagccaagctaaatgatggttaaagttatcaggcctcccatgaaattgcgttcttcctgcattgaaataaaaacattattgggaaactagagaacacctctatttttaaaaggactttaacgaagtcaaacaacttataagactagtgattcactggggcattattttgttagaggaccttaaaattgtttattttttaaatgtgattcctttatggcattagggtaaagatgaagcaataatttttaaattgtgtatgtgcatatgaagcacagacatgcatgtgtgtgtgtgtctgtgtgtgtgtgtccgtgtatgtgtgtgtgggttctaatggtaatttgcctcagtcatttttttaatatttgcagtacttgatttaggatctgtggtgcagggcaatgtttcaaagtttagtcacagcttaaaaacattcagtgtgactttaatattataaaatgatttcccatgccataatttttctgtctattaaatgggacaagtgtaaagcatgcaaaagttagagatctgttatataacatttgttttgtgatttgaactcctaggaaaaatatgatttcataaatgtaaaatgcacagaaatgcatgcaatacttataagacttaaaaattgtgtttacagatggtttatttgtgcatatttttactactgcttttcctaaatgcatactgtatataattctgtgtatttgataaatatttcttcctacattatatttttagaatatttcagaaatatacatttatgtctttatattgtaataaatatgtacatatctaggtatatgctttctctctgctgtgaaattatttttagaattataaattcacgtcttgtcagatttcatctgtataccttcaaattctctgaaagtaaaaataaaagtttttaaatatt

SEQ ID NO: 10649 - DNA, 1116 bp, Homo sapiens
gattcaatttctccatgatgttcatccaggtgagggatgacccactcctgagttattggaagatcattttttcatcattggattgatgtcttttattggtttctcatgggtggatatggattctaaggattctagcctgtctgaaccaatacaaaatttcacagattatttgtgtgtgtctgtttcagtatatttggattgggactctaagcagataatacctatgcttaaatgtaacagtcaaaagctgtctgcaagacttattctgaatttcatttcctgggattactgaattagttacagatgtggaattttatttgtttagttttaaaagactggcaaccaggtctaaggattagaaaactctaaagttctgacttcaatcaacggttagtgtgatactgccaaagaactgtatactgtgttaatatattgattatatttgtttttattcctttggaattagtttgtttggttcttgtaaaaaacttggattttttttttcagtaactggtattatgttttctcttaaaataaggtaatgaatggcttgcccacaaatttaccttgactacgatatcatcgacatgacttctctcaaaaaaaaagaatgcttcatagttgtattttaattgtatatgtgaaagagtcatattttccaagttatattttctaagaagaagaatagatcataaatctgacaaggaaaaagttgcttacccaaaatctaagtgctcaatccctgagcctcagcaaaacagctcccctccgagggaaatcttatactttattgctcaactttaattaaaatgattgataataaccactttattaaaaacctaaggttttttttttttccgtagacatgaccactttattaactggtggtgggatgctgttgtttctaattatacctatttttcaaggcttctgttgtatttgaagtatcatctggttttgccttaactctttaaattgtatatatttatctgtttagctaatattaaattcaaatatcccatatctaaatttagtgcaatatcttgtcttttgtataggtcatatgaattcataaaattatttatgtctgttatagaataaagattaatatatgtt

SEQ ID NO: 10650 - DNA, 769 bp, Homo sapiens
gaatcgtgcagggggagaaatccttgagccagggctgccatataacctgacaggaacatgctactgaagtttattttaccattgactgctgccctcaatctagaacgctacacaagaaatatttgttttactcagcaggtgtgccttaacctccctattcagaaagctccacatcaataaacatgacactctgaagtgaaagtagccacgagaattgtgctacttatactggttcataatctggaggcaaggttcgactgcagccgccccgtcagcctgtgctaggcatggtgtcttcacaggaggcaaatccagagcctggctgtggggaaagtgaccactctgccctgaccccgatcagttaaggagctgtgcaataaccttcctagtacctgagtgagtgtgtaacttattgggttggcgaagcctggtaaagctgttggaatgagtatgtgattctttttaagtatgaaaataaagatatatgtacagacttgtattttttctctggtggcattcctttaggaatgctgtgtgtctgtccggcaccccggtaggcctgattgggtttctagtcctccttaaccacttatctcccatatgagagtgtgaaaaataggaacacgtgctctacctccatttagggatttgcttgggatacagaagaggccatgtgtctcagagctgttaagggcttatttttttaaaacattggagtcatagcatgtgtgtaaactttaaatatgcaaataaataagtatctatgtct

SEQ ID NO: 10651 - DNA, 460 bp, Homo sapiens
ctcctccgagaattcagaccctttggggccaagtttttctggatcctccattgctcgccttggccaggaaccagcagaccaactgccttttgtgagaccttcccctccctatccccaactttaaaggtgtgagagtattaggaaacatgagcagcatatggcttttgatcagtttttcagtggcagcatccaatgaacaagatcctacaagctgtgcaggcaaaacctagcaggaaaaaaaaacaacgcataaagaaaaatggccgggccaggtcattggctgggaagtctcagccatgcacggactcgtttccagaggtaattatgagcgcctaccagccaggccacccagccgtgggaggaagggggcgtggcaaggggtgggcacattggtgtctgtgcgaaaggaaaattgacccggaagttcctgtaataaatgtcacaataaaacgaatgaatg

SEQ ID NO: 10652 - DNA, 1382 bp, Homo sapiens
gagggattcgggttgcgtgttcactgcccccaattcctaaagcaagttagaagtttttagcatttaaggtgtgaaatgctcctcaacacgatggataagtgagagagagtcaggttgcatgttcactgcccctaattcctaaagcaagttagaaatttttagcattttctttgaaacaattaagttcatgacaatggatgacacaagtttgaggtagtgtctagaattgttctcctgtttgtagctggatatttcaaagaaacattgcaggtattttataaaagttttaaaccttgaatgagagggtaacacctcaaacctatggattcattcacttgatattggcaaggtggcccacaatgagtgagtagtgatttttggatatttcaaaatagtctagaccagctagtgcttccacagtcaaagctggacatttttatgttgcattatatacacccatgatatttctaataatatatggttttaaacattaaagacaaatgtttttatacaaatgaattttctacaaaatttaaagctaccataatgcttttaattagttctaaattcaaccaaaaaatgttttactcttataaaaaggaaaactgagtaggaaatgaaatactagattagactagaaaataaggaataaatcgattttactttggtataggagcaaggttcacctttagatttttgtattctcttttaattatgctccttggcaggtatgaaattgccctggttacattccattattgcttattagtatttcactccataacccttttttctgctaaaactactctttttatatttgtaaaataattggcagagtgagaagaaacataaaatcagataaggcaaatgtgtacctgtaaggaatttgtactttttcataatgcccagtgattagtgagtatttcccttttgccagttgacaagatttttccaccctcgagcagcgtgagagatgcctctttaacacttgaaattcatttctatctggatacagaggcagatttttcttcattgcttagttgagcagtttgttttgctgccaacctgtctccacccctgtatttcaagatcattgataagccctaaattcaaattcttaagatatggaccttttattgaaaatatcacaagttcagaatccctatacaatgtgaatatgtggaaataatttcccagcaggaagagcattatattctctttgtaccagcaaattaatttaactcaactcacatgagatttaaattctgtgggctgtagtatgccatcattgtgactgaatttgtgcaatggtttcttaatttttttactgttatttaaagatgttttacataattcaataaaatgaaatgacttaaaattgc

SEQ ID NO: 10653 - DNA, 725 bp, Homo sapiens
tgcacagcctcacgtggggcttggacacaggctgggggtgggcgcatgctagggagactagcctgctgctctctgcattccttagcgtcttgtttgacctgcttgcttccagacataacctgcatgaatcagttttgggggaatggacctggcatggggatgggttcaggccaggtcttttgatggccaggagtagatgacagggagttgccttggggaacctttggtgtgccaagaggaggtgggtagatgggagtggggctcggtcccccaggcccaggggactctctccactctttcctgggctcggggcatctgcctggagttaccttccatcatggctacctgctgtggtttgaatgtttgagtcccaacaaaattcatatcaaaacataatcccaactgggtgcagtggctcacgcctgtaatcccagcactttgggaggccgaggcgggcggatcaataggtcaggaaatccagaccgtcctggctaacatggtgaaaccccgtctctactaaaaaaaaaaatacaaaaaattagccgggcgttgtggcgggcacctggagtcccagctactccggaggctgagggaggagaatggtgtgaacccgggaggtggagcttccagtgagccgagatcgcgccactgcactccaggctgggcgacagagcgagactccgtctcaaaaaaataaatacataaataaaaaataaaccaaccat

SEQ ID NO: 10654 - DNA, 3657 bp, Homo sapiens
ggtccccaggggggccgggctggggctgcgtaggtgaaaaggcagaacactccgcgcttcttagaagaggagtgagaggaaggcggggggcgcagcaacgcatcgtgtggccctcccctcccacctccctgtgtataaatatttacatgtgatgtctggtctgaatgcacaagctaagagagcttgcaaaaaaaaaaagaaaaaagaaaaaaaaaaaccacgtttctttgttgagctgtgtcttgaaggcaaaagaaaaaaaatttctacagtagtctttcttgtttctagttgagctgcgtgcgtgaatgcttattttcttttgtttatgataatttcacttaactttaaagacatatttgcacaaaacctttgtttaaagatctgcaatattatatatataaatatatataagataagagaaactgtatgtgcgagggcaggagtatttttgtattagaagaggcctattaaaaaaaaaagttgttttctgaactagaagaggaaaaaaatggcaatttttgagtgccaagtcagaaagtgtgtattaccttgtaaagaaaaaaattacaaagcaggggtttagagttatttatataaatgttgagattttgcactattttttaatataaatatgtcagtgcttgcttgatggaaacttctcttgtgtctgttgagactttaagggagaaatgtcggaatttcagagtcgcctgacggcagagggtgagcccccgtggagtctgcagagaggccttggccaggagcggcgggctttcccgaggggccactgtccctgcagagtggatgcttctgcctagtgacaggttatcaccacgttatatattccctaccgaaggagacaccttttcccccctgacccagaacagcctttaaatcacaagcaaaataggaaagttaaccacggaggcaccgagttccaggtagtggttttgcctttcccaaaaatgaaaataaactgttaccgaaggaattagtttttcctcttcttttttccaactgtgaaggtccccgtggggtggagcatggtgcccctcacaagccgcagcggctggtgcccgggctaccagggacatgccagagggctcgatgacttgtctctgcagggcgctttggtggttgttcagctggctaaaggttcaccggtgaaggcaggtgcggtaactgccgcactggaccctaggaagccccaggtattcgcaatctgacctcctcctgtctgtttcccttcacggatcaattctcacttaagaggccaataaacaacccaacatgaaaaggtgacaagcctgggtttctcccaggataggtgaaagggttaaaatgagtaaagcagttgagcaaacaccaacccgagcttcgggcgcagaattcttcaccttctcttcccctttccatctcctttccccgcggaaacaacgcttcccttctggtgtgtctgttgatctgtgttttcatttacatctctcttagactccgctcttgttctccaggttttcaccagatagatttggggttggcgggacctgctggtgacgtgcaggtgaaggacaggaaggggcatgtgagcgtaaatagaggtgaccagaggagagcatgaggggtggggctttgggacccaccggggccagtggctggagcttgacgtctttcctccccatgggggtgggagggcccccagctggaagagcagactcccagctgctaccccctcccttcccatgggagtggctttccattttgggcagaatgctgactagtagactaacataaaagatataaaaggcaataactattgtttgtgagcaacttttttataacttccaaaacaaaaacctgagcacagttttgaagttctagccactcgagctcatgcatgtgaaacgtgtgctttacgaaggtggcagctgacagacgtgggctctgcatgccgccagcctagtagaaagttctcgttcattggcaacagcagaacctgcctctccgtgaagtcgtcagcctaaaatttgtttctctcttgaagaggattctttgaaaaggtcctgcagagaaatcagtacaggttatcccgaaaggtacaaggacgcacttgtaaagatgattaaaacgtatctttcctttatgtgacgcgtctctagtgccttactgaagaagcagtgacactcccgtcgctcggtgaggacgttcccggacagtgcctcactcacctgggactggtatcccctcccagggtccaccaagggctcctgcttttcagacaccccatcatcctcgcgcgtcctcaccctgtctctaccagggaggtgcctagcttggtgaggttactcctgctcctccaacctttttttgccaaggtttgtacacgactcccatctaggctgaaaacctagaagtggaccttgtgtgtgtgcatggtgtcagcccaaagccaggctgagacagtcctcatatcctcttgagccaaactgtttgggtctcgttgcttcatggtatggtctggatttgtgggaatggctttgcgtgagaaaggggaggagagtggttgctgccctcagccggcttgaggacagagcctgtccctctcatgacaactcagtgttgaagcccagtgtcctcagcttcatgtccagtggatggcagaagttcatggggtagtggcctctcaaaggctgggcgcatcccaagacagccagcaggttgtctctggaaacgaccagagttaagctctcggcttctctgctgagggtgcaccctttcctctagatggtagttgtcacgttatctttgaaaactcttggactgctcctgaggaggccctcttttccagtaggaagttagatgggggttctcagaagtggctgattggaaggggacaagcttcgtttcaggggtctgccgttccatcctggttcagagaaggccgagcgtggctttctctagccttgtcactgtctccctgcctgtcaatcaccacctttcctccagaggaggaaaattatctcccctgcaaagcccggttctacacagatttcacaaattgtgctaagaaccgtccgtgttctcagaaagcccagtgtttttgcaaagaatgaaaagggaccccatatgtagcaaaaatcagggctgggggagagccgggttcattccctgtcctcattggtcgtccctatgaattgtacgtttcagagaaattttttttcctatgtgcaacacgaagcttccagaaccataaaatatcccgtcgataaggaaagaaaatgtcgttgttgttgtttttctggaaactgcttgaaatcttgctgtactatagagctcagaaggacacagcccgtcctcccctgcctgcctgattccatggctgttgtgctgattccaatgctttcacgttggttcctggcgtgggaactgctctcctttgcagccccatttcccaagctctgttcaagttaaacttatgtaagctttccgtggcatgcggggcgcgcacccacgtccccgctgcgtaagactctgtatttggatgccaatccacaggcctgaagaaactgcttgttgtgtatcagtaatcattagtggcaatgatgacattctgaaaagctgcaatacttatacaataaattttacaattctttggaa

SEQ ID NO: 10655 - DNA, 1420 bp, Homo sapiens
cattggacttgacatcaggatggcggctctggacacccattcaacccttcagactccctcctggcagctgtagggaaggaaccattctcctctgctctgtcatggatggatgcacagccccactgcttccaaactctgcctgtgtcccatgtggctcaggacatgagcttaacccctgcaaagcctataccacatcccacagcccgggtccccagtcaagcacttggatgcggcagtgatgttcatcgctacgtgagtttctaaagatcactcccaatttttctactttcctcatccttggcagctcgccaacaggtgcagtcagggggccacacggaacacccccatcccatgttccccccagttcttcccatcctgacccttgggattccaagatgggagcaagaggagatcctgaggctctgcctagggacgaggcctacagttctgccatgtctgtaggttgttgtttaaagattattaattcgaatttagcaatacgatctctaagtggtgccatgaattaaagatgccacttcgggctttcagtgcttctcagcttttgggcaaagggcttgtgtcttcaggggcagctcagctttcctgagtcctgactgctggcattcgtctgcatttgcctgtgcttctgcgagtcggacctcaagctgccaacactgcatgtggataaatccagttttcccgggccagcatgcaaaatgaagaggactccatctaagctgagaagcatggcctccccagagcagcctgcggcctccaagccttcctggcccaggcaaatgccagtgtgcaccaggctggctgctgggggcaggtctttggaggggagcagcatttccagccttctgaacatagttaatagtaatgacagccgtaacactaacgcgctctgcaattcgccctgcccagccatcctcggttgccaagattgcctgtgcctgcctgacaaaggaagagaatctccgaatgtgtatctttgggcccaccctagggagaggtcggggtcaccaggctacatggcgacatctaggcagctccgccttgcccagcctccttgccataatcctaatatattggtgtcctctgctcagaggggactgtcatcatggtgggaacaggctgtgcctccccagggactctgcccatgttcccagggcctcatctgtacactgtgaaattaactggcatcctggtgggcccaagggttttcaggactgggggccaatgactcaccccctccttcctcctcctgatccctatctctagctcttatcacagattttgaacaattgtctgtgaggttaatgatggtttcagagggaagcccttttcctccctgagactgtgtggggttcagtcagcctgctgaaattgcttccacttattacccatccttcctctt

SEQ ID NO: 10656 - DNA, 463 bp, Homo sapiens
ggccatgtcactagaagcgcagtttaagaaaaggcatggtgacccatgaccagaggggatcctatggttatgtgtgccaggctggctggcaggaactggggtggctatcaatattggatggcgaggacagcgtggcactggctgcgagtgttcctgagagttgaaagtgggatgacttatgacacttgcacagcatggctctgcctcacaatgatgcagtcagccacctggtgaagaagtgacctgcgacacaggaaacgatgggacctcagtcttcttcagcagaggacttgatattttgtatttggcaactgtgggcaataatatggcatttaagaggtgaaagagttcagacttatcaccattcttatgtcactttagaatcaagggtgggggagggagggagggagttggcagtttcaaatcgcccaagtgatgaataaagtatctggctctgcacgag

SEQ ID NO: 10657 - DNA, 163 bp, Homo sapiens
accctgactaaagcttgaaatgctacatttccaaggtgaagatgtgtgggcacatgttatggcagattgaaaaggatctcattccatgggaaaaaaaaaaatcctgtcttgttcataaattgacaatgtcaataaattgaaatatggttcactgttactcttg

SEQ ID NO: 10658 - DNA, 1861 bp, Homo sapiens
tcgtgacagttggtagacaacatcgggtactccaggtctctccaaactgactatatatttatttgttattttaaaaatacaactatattttgggtagtttttttttttttttttttgataagttggtgtaaggctatgtgacttgatcaaaacagatgcagggcctctaaataaaagggatcatctgaaattaatgttgtttgaaattactatctgattttgagggttccagtatttctgtgaaaattcaacaagaactccttggaaactggtattgatattcagtctccttaaggtagatttttcaagcttttcatacattggaactccacctgactttggaccaaccccagaacagagcagagccacctcctatagacgcccattgccctgctgctgtacacttcagcagcttgcacaagggagctcacttaaaaggagaaattgtgtagttttaaaatatattttgtgtaaaataccttactatgctataaaccaccattaaaaaccagtgttttgatttggtacttaaatatttttggagtgaaaattatcactaaagtaacatgactccaacaaaagtatggtttcattataaaagagtactgtattgatttgcccaagttttgtaacttagtaaaggtattaacttccttggatttgtactttgtgatttagtatgctgtatcgtgggctggttatgttaactgaaaaaaataaagtcattacctgagttttgcagtgctctaacttaaacagaagaacagctgttcacatcttttagcattttacatttgcctaacttaaaaattgccatgtgtcaaaatcatggttttgtaattgctaaggcatgatatgtcaggttatttgaatataattactttttgaagtaattgtgaccacaaaacatcttttttacatgaaggagctgtgtatcatttgaaattactcaaatgatgtcttgctctgaggcataaatcccaggtacttagtgtttttaataatatggtgccactgcaggatttgggggcggtggggaagaacaagcataatggtagggggaggcttggcctgaaactaaccactgagtgaattgcactgcaggttttacttaacgggaattccttatttgggatgtcaagagggcagctgcaaactgaaaaacaatccagtaaatgtactttgttttatgtattgtagcaggcaattaactactaaataatagctttgacatttgcaattgttgcatagagactatttttgctagaagatgattagctcttgcctttattttacagtgcttagtgtgataaacttctagtcatgtttcctatccaagagaccagttaatatatgtacataaaccacagaaatagtataacacactatttttaaattatcgttttcctacttaaattttgtttagcttaagacttcttaggacatttgtaaaagcaggttaaatttaataaggtttctgatttttttttgtaaccggagatagtttttacaagtgaaataacatttcagctaaataaaacatcgctaaataattgatatttgatgaaaatctgctttgtataatttctgtaaattatccttgttctgaaaaaggtgtaatgccctaatatttttaaatccttatcctttgattttttaaaaactgacctattgataaaactataaattttcattttccagtgcagttagttacctttttaaacataaatgcacaacaagcaaatgaatttaagagaactaaactggaataagtgttcataaatgaaacccttggactatttaataaagttgaaatgtgaattaaggaaaacttttgttaataaaaactttcttttaagtg

SEQ ID NO: 10659 - DNA, 747 bp, Homo sapiens
aatctagtttttatcaccatactttatctaattattattctctgtatataactgaggaaataagaatagtcctacaaagagaaaaatatacatgtcaccgaagcaagtgtaccctttataggaaccctcaaattaaaaaaaaatgtcttttaatggatgagagggaaccactataacatgagtccaagcccagaagacttctgtctatacaatatttttttttaattttggagataaaagctttaagaaactttttgagttaattatactcataaaatgagtttctttaataaattaaattttattgtgtaaaatgtattattacataaaatgtgtttttgaatcaatgcagtttggggatgaatataattaaaatatgtttaataacttagaattcaactaataaaaatttagccacacttacaagggggaggaagtccctagtttaaaatgtataactgagtggtagatcagtactttcagcacactgttggaaacatttattcagatatggctctaatgtattaggaagcactaaatggcctaaaaaagctactacattgcctaaatatgttaattcaatatagaagtcctatttcataaccaggctgtttgacaaatacttttaatctagtagtcattgtaatatcttgctagattaatttataaaaatgagtatacatttgatttgcttttaatgaagttgaaataaatgcttatgtcacttgaataaatataaatcattat

SEQ ID NO: 10660 - DNA, 2195 bp, Homo sapiens
gccgcgcggggaccggccacctggagcctccacacctaagctgcgcctcctgtcatttccctgctgggctctcacatctatctggttgttcttcaccaccctccaagtcctctgacctaattttctgctgcaaggtcccctggcagtggcccatcctgtcttctacttgaaacgtctgagtcacttggtctaaaaagtagcctcaggtggccagaaggccgagttgtgtaatgagttggggcagggtggtggggtaggtgcatgggagggtgggccctctggggaggcccaagcagcttgttttgcaaaggcccaagtcctcctgctaggaaaagcttttgcatgtgtcctgaatgtgtctctgtaaacatagctgttatttattattgtgatgttgggacctttagcccatagcggatgcctcctcaggaatattctcgatttaataagctaaaaaaaaaaagttctgtgtttgtgcccacagtaaacagaatgtacagtgtgacccacatcgtggtccctccaggcattcctgccccaggataaggaaaacctgagcccacatctgattgccaacggctgtagccttctaacagtgggaaactattaataggcaagaaatttctgctttatcagtcatcacacaaccattcctgggcattgagactgtcctggttaggctgtgtgtctcctacattaacagctggggaggagggaaaagcttcagacttttaaactagcaaaacagttatttctctgcattcacaattctgatttcatgtatttctctgtacatgtttgatcattatcaggccattctgtttaagtttgaaactaagcattttaagaagtcttgcctcagttatttcagttttcaggtgactagagaatttcaggcaacagtgccctttgcaattacctttttgatgattaaggtgactatttttatttcttgttaagcatcagaagatgtcagcattcatcttttgggagtccagttacaaggtggaactagaaggtgttttcagcaatagccagagcactggaggaaaaataattgacaaatatttatacttttaaattgttttgaactgtatttacatacatcatgttttatcaggtacccaccaactttatactttctgccttcagatagagtttctaacattttctagtttgtcagttttaaaatataaaattcttttatgtttttaaaccgtcaaccaagaagtcaagaccactgtcccctgctgagttaggcaatcacttaaaactccaaagaactccaggctgaggagttcttttggtgctgaacagtggtctgacaacaggtgctagaattaaggtgtgggaaaaaaaaaaaaacagccaggaaggacaagatctccaatttgtgaagcttatgatacagctgaaaccagtctgatcaattttatgctacctgtcaccaagaaattaactctaaatttttgaatgcttgttggcatctgtcaaatcaatactgaaaggatgcatttcggcttttaaccagtttggttctgatcattgcaacctctgtgcttttataattcaaagaacaaggatagctttcttcggtatcttttaatataagaacactgaattttggcttgaaatattgtgactaaattgcacaatctctggctattagcactgttcactacattaacatgcaagagagagagaagccttgttacatttcctgctatttaacaaactgtccaattaggtcagcaagcctgttagggccttcactgctacgcccctggccccaaaacagagagcaagacagttgtccagagaatttagatatgagttaagagctgccagatttattttaaggcatgtagagaatctcataatctatgtgaaagtcacttgccaaaaaggttttggttatgaaagtgaatgttatatatttaatattaagtgaacctcccgtgccttttaaaaaataccaacattatgaaatttaaaagcttaaatatatttgcctagttgataaagaggctgtggaacaactgaaggagaactttcagaccctaaaacagttatattacttagatgttaaaattttctagtgggctgtgcaattgctgggttgtccccccaaacatattttaatatgttatttaaaatgattttacccaagcctaagtattaaagtatatgtgcaa

SEQ ID NO: 10661 - DNA, 1369 bp, Homo sapiens
cacaggaggacgcctggggactttttatatatttgcagattacgcctttttgtaacgagcaaatgggatattgtttaaaaaacagccacctctttacaatggaacagttttatattcctgtttctaaatcagctcttcagtgtgaaagaaaacacgtttctgtaacagagagaacacaaaggcctgtggatactcttaaaggacaattaaatcttaactcatcttgattgagtggccttcctgccaaacaagccatatataaagactgatggaatcgttagcaaataattagctgccctctgtcaactcatagcagtttctgcattatttgtgcattttggtttagttctacctaacttactatgtaggtgtatgtctacagccgatgacctcatttcgtttattttatttttgtaatagtcagttggcaaagcaaactgattttttagactatttatcttccttcccttcccctcccaccccgctctcctctctgccccctgccctcccctcccctcccttcccctccactccgctgagaatcctggaggaatacacaattcatcgttgcacccccacctcagagtgtaatcgcatttctgcttggtagaggccgagcccagcaaaggtggctccttctgaatgtgtggtcagcatctgtacaaatgcattttatttgctatagtttgtaaagctgtaaagttaaaagagatgaaaaccttttcagcataaatatattttacttgcactgtgttttttagctaaaagtgaaaacctagattaaataaaatcaaagttgagaagaatcatcaaaagactgtttctcggtgtgaatcaagtgttgaaaaatggttggtgtattttgtcagtaattgtacataacttttggcacatgacatagaaatggctatgtaaactataattattttgctaagagactgtatgcaagccttgggccgactttacagacgtccagagcaaagccccttctttgtacctatttttttattacaaatatactaattggttctttctattttcagaggttattgtatgaaattgtctattgatagtacttttatgactgtaaatactctggctttctccgtgtgaattctcacattagactttaattcgagcgcgtgtgaactgaacgctgatcagtattttttatcaacacctgagaactgttacaccttttattttgtcttttaggaaatccctgtctttccattttttcatgtaaattttgcacagttacttgttcatatgtaaatattttactttcagaaatgaagtttttaattgctattgttttatataggattgaaagaaaattaactcctttattaaaaacaaatttatctgt

SEQ ID NO: 10662 - DNA, 122 bp, Homo sapiens
tgaataaaatgtctttgcttgtaatttttaaattcatatcaatcatggatgagtctcgatgtgtaggcctttccattccatttattcacactgagtgtcctacaataaacttccgtattttt

SEQ ID NO: 10663 - DNA, 1035 bp, Homo sapiens
gtggcccaccagagcctccctcagccacgcctctctcagcccaggtctcctgggcatctggccctgctgccccctacccggctcgttcccccaggggtgagccccgccgtgtctgtggccctctcttaatgccacggcagccaccctgccatggaggcgccttcctgggttggccagagggcccctcactggctggactggaggctgggtggccggccctgccccccacattctggctccaccgggagggacagtctggaggtcccagacatgctgcccaccccctgctggtgcccacccttcgcagttactggttggtgttcttcccaaagcaagcacctgggtgtgctccaggcttcctgccctagcagtttgcctctgcacgtgcacacacctgcacacccctgcacacacctgcacaccgtccctctccccggacaagcccaggacactgcctttgctgccttctgtctcttgcataagcctcaggcctggccctttcacccctcttcccaccaactctctctgcccccaaaagtgtcaaggggccctaggaacctcgaagctgttctctgcttttccattctgggtgttttcagaaagatgaagaagaaaacatgtctgtgaacttgatgttcctgggatgtttaatcaagagagacaaaattgctgaggagctcagggctggattggcaggtgtgggctcccacgccctcctccctccgctaaggcttccggctgagctgtgccagctgcttctgcccaccccgcctctgggctcacaccagccctggtggccaagcctgccccggccactctgtttgctcacccaggacctctgggggttgttgggaggagggggcccggctgggcccgagggtcccaaggcgtgcaggggcggtccagaggaggtgcccgggcaggggccgcttcgccatgtgctgtgcacccgtgccacgcgctctgcatgctcctctgcctgtgcccgctgcgctgccctgcaaaccgtgaggtcacaataaagtgtattttttt

SEQ ID NO: 10664 - DNA, 269 bp, Homo sapiens
gacacagccaaccccggcccctggtcaggcccctgcagctgcctcacaccgccccttgtgctcgcctcataggtgtctatttggactctaagctctacgggtgacagatcttgtttctgaagatggtttaagttatagcttcttaaacgaaagaataaaatactgcaaaatgtttttatatttggcccttccacccatttttaattgtgagagatttgtcaccaatcatcactggttcctccttaaaaattaaaaagtaacttctgtgt

SEQ ID NO: 10665 - DNA, 2341 bp, Homo sapiens
cagaggccccacagaaggctcagggcaccgaggtgcacttgccggcctgggaggtgtcccactgaagccccgcgcctcctcctgccagcacccccagcacctgctagcaggaggcacctggcctccgctggtgcagctttcctttttgcctctttgccatttccttggaaagagacgtcgctttcatccccaagtgcaccgtccctccgaggggatttctgagaattctcctgcatttttacataaactaaatgtgaggtttgttactggtatttttttcacgtgcctgagaccagcctggtaccaggaccttttgttcacagcgtgcagcagcgagccggctgcagtgtgtctcccctggcctcgccttctgcaaaccaccgcagccaccacagcgtcagggtggagatctgggtttctagacctcactgaacacactggaatggctgagtttaacttatttaggcattcatcttggagatgtggtttttcgggttccccagcagcatctcccgacaccaactgtgccgctggctccctgccacctgaagccgagctcctccagagctttctccgcccacctcactgcatcccaagtggagcttttggtgtccagttaggccagcgggagcagtctcctgatttattttgatctcattcttggactcttggacctctctgttcttcaagcatcgtgtcactgtgaaatcctaacgcccctgtgtcctacagaccgacggcacaacagacagctgcccatcccatgccatgctctaccctctgcctctcaccaggagacactctgggcctccaggacaattgctgcttgccggctcttatttttctaagcaatattgtgatggagaaaaataacatatttattgggatttggttttttgggtcttttttttttaagggaacaaaaaatggttaaatgaggtctgctgaagttgacttgaaaacacacttgaccctcaggcaggagggcactgaccacaccccacacaacctcaaagggtcagtgcgtcagtgccttttcttctgaggcaggaaacaggtgccatcttggccacctcggccagggcagcccaccatgctaaaaggaccccaaatggtggtcgttgtcccttctgtgcaggccagcagggccccatctctagtttttccacgtctgtctgaagttcttgcaacaaattctgcatggtccagcgctccagctagctgcctcatcaaaaacactgaataaccaaggactgctgagtttttcttcatggggggtcagctggtctcaaaactggccactgcctcagccaccaagctttttcctaccactaccttataaacctgcctggccctggaggggctctgggacgactttgtctctagcccattaatacaatacatcctatgctttctgtgcagactggtgcttccgcagaaaggagatgccaattctgctatcacagaactccaccagcaactccacccgaccccagcagtggtgcaggacagctgccagcacccacctggccctcctccttttccacagccactcactggggccaccaaaacccagagatggcaggtgtgtgggacagactggaggatgaggacaaaccaaagcctttgttctttcttattgtggagcgtccccttccatcaagcagcctgccctcaagccaaggatcatcccctggaacccagtatgcacccagaggggactcagcttcaaagctgctccaccatgctgggtcccaggcagctttcctctgaaaagcaacctctcctgccacccagatcccatctcaagagctcgcccatgttacgagcatgtaaaggactgacttcctagtaactgttgcagtttacaacctgccctccagggacacgtctccatggtttttcctacacatgaatgcgagaaatggctgataagcacagtaatttaagattgcgtattcatgtagtgagatttagtcattaaccaacccggtctttgtgatgtgtgaagccttcccttcagttatgtcccatttttatgatgccaaaagctgccactgtgtggtattcgaggattattgcaacaaagccagtagttaaaccaaactacagtctcagcctgtcattctctagaacacatccaggtgtcggagctaaggtgttcagctcggctgtgactatacagaaccaggcctggcgttgcttccgcaccggtagcagttgtggatgtcagtgtgcataagcaagtatcagacctcagaatgtttgagttattttgtcttagatatctgtttttaaatggataatgtatttgtcctttaaacctcagttttgcaatatg

SEQ ID NO: 10666 - DNA, 641 bp, Homo sapiens
ccagcctgcaccagggtccacagcgagcccggggcagccctccacctgcccaccagggcctggagagggcacaccatccaaccagcaggcagccctgcacagaaccctgggagaagacctagccagcctcagctgaacccacagtgagcccagggcagctctctgcctgctcaccacagcctggagagggcacaccacccaaccagcaggcaaccccgaagagccggtgacgggcacatcctggcccacttcaagaggggctggaggaccgagaggggtctcaggctggcgattcaccccgtctccacccacctgggaaatgctctgcggcccctcccacagcccagcacctgctccctgaggggtgtggggactggaggcgggatcactcaggctccagcccagccctacccctgctgtgcactgcagccgttcccaggcagtgcccacgctctgggaggcaacggaccactcggacccccacccctgcccgccaagctccaagcacaatcttggacgccccctcgtgggctgacagcaaacagatgtctggcagtgagggtggagggagacagtgggcggcagcaccctcgaagaccgggtcccctgagtgacggagaataaacacttgaagaaccgtg

SEQ ID NO: 10667 - DNA, 1338 bp, Homo sapiens
gtccccaggccagcccatgtcaggggaacagcctggaacagaccacccactgagtcacctccgtgcctgctttgctccagcacagcagagaccagcaggccccccaacccagagactgggtctgctggagtctccacacagtggtggggaggccttctggacagacggcagtcgggccccagagcaagaaggctggtgagggaagggctcagcttcccaccccacgtacagcaagggactccccaggtgcggcccaaggctccggaccacactggccccctgcggcggaggccaacgcagggcaccaccaccaccaacttgaattccgtcatcaatgctcaccgtcaatatgtttacaagttgtagcagttgggggaaaacagtcaacctcccagtgtaaaaccaagattcccagtgaagcacctgaggccaagcaggggagaggaatgaggggagcagctggacatgggcctcctgaggcctcggggctgtccttcattgcccacatggatagacggagctgtggtgcagagaacttttcccgcaacaggtgcaggactgccagggatcggagtgcgggccgcgcacggtgccaggattccgccgaggggaagccgctcacattgcagtcatcacagacttacgcacttgtttggacagtttttccagaggggatgggaaagggccttgttctagctgaatctgtgtatcatgaccatttctgacaggcagaatgaattgtctggtagccctgtcctgacccatccaagcgctgttggggctggtggtgacgtggtcacatgtcctggcatatctggggccacgcagtttagtctcttgtcccaggagaattgttagtgacccctctttctcttgcaagccccctccacactgggttggatgataccttaatgagtgacgctggcgagaggcaccctacccgacgcagctgtgaatggccggtgatgtatgtcaggaggccacagggagcagaggagcggggcaggcagccacagggccctgcggggagcacatcctcgcctccgtccggctgctgcccttcaacaacaagccctgatttttccagcaatgccagaaacctggattttaagtcttccaatttgattcaaaaatatttttaacattgtgagccagctagacccccagtgcaccaccccatattgaaaaacagttgtctggcatcagcttcaggagcgggtccggtcattctgaaactgtccctccagaggttcttccagccccacttctatgcgatgtcatcttttctaaaagagacaaatgaagccacagggaaagtgaaataaagccttgaacctc

SEQ ID NO: 10668 - DNA, 1689 bp, Homo sapiens
gggtcccaggagcagctgtgaccaggccccggctgccagggagagggggtcttcagccgacggggcagacaccctgagatggacccttgtccaggggagggccctgccacccacaattccttggcattcctgcaccagcaggacgggctgagggaggcgcctcaccagtgccagcgcccagcatcactgtgccccggtggagggggaggcccttccgagcctgggcctgggtgtggatgagggcaggtctctcacctctctgacctcagcttcctcaactgggaaggggggccacagcacccccttaggggtgatgaggaagtgggagctcagggaggaccccgggcagggctgcctcctcacctctcttcggcctttggacactggagctcagaggaccaagtgaatgaatgaatgactcgatcaatcaactgatccatgaatccatggacccctgaacagctggacagctgggctgtgggcaggacaggggactctggctgaagccgcgttcatatgtgttcagctttgtgagtggggcgaggttgagggcttattcagtgggggaggtgcacggcagggccagtacccttggagggtcaggccacaggggcggggacacctgccaggatgcccaaccccagaggcagtgggagctgttggggagccgtggtcccagtcagcggtggcttgatgagggctgctcccacttcatccgcaggattccagccgcagctaccccacacccgagctgtccctagtcgcccaccgcggccggacaaagccccagcagccaaggtgctccgtggggagggtttcttgggtttcttgaagccagtatttcccatagtatcttacgtcccagcagaggcctccactgtgcccggaccagcggcccactcagtgagtcgagtgtgcacctggcacccctctttctggaaatccacgaacaatgggctcccagcagaggactgaggctgagcaggccacttccctggagctgaccccacagctgtgtaggtacagggtggccgtgaacacttagggctctctcgggctgtgcgcttcttgttcactgcaaggagcagggtgttggctcctgaccaagccctgtcactgctgcccagccacacgtggggccccttcacccacccctgaccacctcatgcaggtgaagccactgtggaaacagcctggcagtcccttgaaaaatgaagtcataaaccccagcaattgcactcctgggcctctgacagagcttgcacgtcccctccaaagctcgtgttaagctgtgagccccagtgccggaggtggggcctggtgtgtttgggttctgggggtggatccctcatggctgggtgccatgaacccactcaccacagtgagttctcacgagatctggttgttgagaagtgtgtcatacctcccccacaactctctgtcttttgttccggctctggcaatgtaacaagcctgctcctccttcgccttctgccatgactgtaagctttctgagggctgaccagaagcccagcagatgccagcaccatgcttcctatacagcctgcagaaccgtgagccagctaaacctctcctcataaatcaccgagccccaggtttatctttacagcaatgcaagacctgactaatacagcaccagctccccaaaataaaaagaaatattcaaac

SEQ ID NO: 10669 - DNA, 859 bp, Homo sapiens
tcggactgaacaggaatcctcggggggtgaacagccattccttcgtgacctgtgcacgccttctgcaaccctggagctctgctcggctagtctgactcgaaaagggcgtgactcaagctgacgggactccagtagggactttgagagcacattttgtaaaaatatttatctagacgcaaatgcttatccatgaatgtcctcttagaccatttggggatgaagccatcttaataattagtaataattaattagtaataattagtaagcattttctcaatgctctgattccatcatgttttcttaacatgataacttaaaaaattgacatcctttgtactttctttaatcttaaaaagtacacggctttttacttatttaccttttaaatatgcccctttagcaattggaacaagttaaattgttaactaaaaacagtttggaaattttatttcattcgttatatcacacccccttgtcatgactctgagtcacgtgctgctgtattgcaacgtgcaggaccattttaaacctgtgtgctaaaaattttccagatacttgctttaaagctacttttgtccacaaatgaaatactgtcacagtagacgcttaaatgccacgttttcataccaagagtcattcattacttcatgtgtcacaaactgtggtgtttggaattgggtttttcaatgagtggctttacttatcaatcacaacaggtaatagcaatagacgttagtgcaatacaaagtcaccctcaataaatactgttaattggagatgtgagtttgtacacaaaacatcagactagacctttgtatgggagagaatttactgtacattaaattctttattttttgtt

SEQ ID NO: 10670 - DNA, 3714 bp, Homo sapiens
ggcccacctgcacctgcacccctcctcccactgacatgccctgctgagtcctgaccagcccagggctctctgggagcaggagttaggagcacagacgcagcggttagcaataggattcatctttgagggcgtaggactgtggcacgagaagtacccctgattcacagcataaattgtcttaggagagttttttagagagggaaaaacccacagcctgcaaccagctcatcttggcctcaggtcagagaagactcagtgcccagaagcccaaggctcagccagaaagggaggtgacactcccagcggccctgctctttcctctagacagactcgggagccagcacacaccgggaagtggctccatcagggatcacttctctaacagggatggatttccaggagacttaacaataatgacatagaaaactatttctagaaataattattttaaaatctgcagctcaaattgtaataggttcattcatctttggcaagctattttgtgtttgcacgttccttggaaagtactgtatttaaacgattatttacaaatagcctaaaatacatctttgtcaagggttgagggtgattccaggggccacgtgctctgttagtgaccagctctttcatagccccttagaagaagctgatgtgacttcagttaggggttagtatctgatgcccaactgaagtgtctccgtggccatgcagtccccagaggattggtgttctctcaaagcgggtgtgtggatcacacagtgtcctctgaagtgcttcgtcataaaggcaggtgctgtctggaccctgtgcctcagtgccctctgtccctgtcaccaggcctcggcgggtgttcctgccatagctgtgcagggtgttcccacccacacccctcatgccgcaccctagctagctggggtcctgtaggggccactccacatcttgggcgggacttctgtcgccccaggcacagcccacgttcctactggagcccattcttcacagctggagtgggctcagcctatgcctgtgttgtggaattatatgtccataaagggattggttggtatcagtaatttcagggttaaatatttgctggcgtggtgcattaaattattttagtgccagataaatttttaaaagcaaagtgctttagtgtgtcccctcaaatcctacttgggataaagagatgccacctaatgggtggcagaaaggaccctggtagaggttcttggtgttgcttgtgaagagctctggccagctccacgtgaccagggagaggaaaagcccggccctcctggaggtgaagaccgagaagctggcctctccgcacctgtgaagacccactggtcagttgcaagtgcgacagtgtgtgcactcagtgcagacactgcagcacctcagcacctccctaccggggtggaaagagcactttttctttacagaaacatgattcttagatagcgagcctcccctttttaaaacaattgaggcgatatttcatcctttcttgagcttctctccctgctcatctccaaacttggagctgtcaggtgagcacggttgtagggtgttgagcgagccccggcgcatgccgggcaccgggttccccacactgggcagtgacggggcccagggaggccaccagaggagcggcgcctccattctccccacagcaagggctggctgtgcaggtgcagccccggggcagagggaaaggacaggtctcccagcacctcccggatggcaccgggacaaggagggctgggctggggtcactcaccttgtctgctgagtgcgatggcaccaaccacccacactgtcagctccgcgaccagctgggggaacgtcacactcgcccaccaaggcacttgctgaggccacgacgccgcctgacggggacacacaaaagccccagggactttgatccacgataaagagcagaggcgtctgggtaaagtaacacagggcaagggactttagaaaagtaacagctagtgaaacctttccatacacttcagaaatgttttaacttaagacttcagtataatgttaacttctcctgatgtccttgttgacatgaatgcgtgtgcgtgaaatctcacacacttccatggtcactaaacagccttcaccccgggccaggccatcgggtactcggcccgcttcacgtactgattacttgacttggcgttttctagatataaacatgtacatgtgtgtcctggctttgtggtgtaaatgtgtagtgcgtgtgcatgtgcgcgcgtgtgtgtgtgtaaggctaggtcctggcatgtttcccctgtctcagcggaccctgtcctcacggagatagcccagaagcccttggacagcacaggccacacctgagggtgctgatggtggtgactccacagagctgtggtcaggggtgagcgtgtgctgcgcagcttggagtcacgcccccagaagtgctgggtgagggtctgcaggacccagctccattccacagcctcagttctctgcggcacatgcagcacaggcctgaaggagacctggcgccccagccttgagctgcccgtctgcatcagggcactgatgtgggagcatcttcccctggggatgttaaggagaaggtcctgttgggggtagagattcacgcagaaaagagtgactgactcgtccatgtgcctcagtttataccacacaattgcaggtgtccatgcctcccacacatggggacctagtgggttttgacagcgtggtgtccagtcctagccccctcagtgcttgctgttcacacttaagcaagtgaaggcctgaaggtgcccagctgtgccctcaggggaaacttaagtcacccgccctgtcagcacttggcccttgtcgggcagtgagagtggagctgcccccgcagcaccctcaggagccatgcagttcacagcagtagctggatctccctgaggacatttgtccttgcatatcttaatgatttgtccacagaaacaccgggttgtcttcctctgcccctctgccccgcagtgggggcactctctgtaactcagcatcacggtggggggcagctgggaggcctggttccaggtgaccttctccacctagatgttcaccccactcagttccagctttaccaacagggccccccgcagggacttggggtcgcagagtcccggcctgtctcagggccttgttcatggaagggagatgagtcaggttgaaagctcatcgtgtagggttctgtgcagggcccttacaggactggaccgcagccaagatgcctgcctgttaaccatgcccagcccccgtcatttccgcgtgaagccgcaggcctcggagccttggtctgaaatgcctgtggagtaacctcggtccataaacatgggtgcacagtctgttctccccaagtacagggcaggaggaaacaccgccctctgtagctgctcgaatggaaagggctcttttctctgaggtctttatacattagaaagctcttctgggaagaatgtttgaatccatagtgtctttctgtattcacttttaattgctttctaaattagctgagaaattctgacttgaaatattgtcaggtaagcatttcttcagttttcatgtgtgtatgtaacagtagctttgcatggaaattgtaatcagagtcaaatacagtattgaatggaatgtactgccttctcctcctaaatcaataaacatctttcatgg

SEQ ID NO: 10671 - DNA, 1495 bp, Homo sapiens
acgccccggccgggcagagaccctttttaaagccacgttcgtaagatgcgttgaacaaatagcttttgaaatagccacgatcttagattcaggatagaatattctggacttaaacattactgtaattttgtgtaaatggtttcttacaagatttcacatctttacaattctgatgcttttttaaaaaaactaaactttaatatttccatttaaaattaaaagaaatgggaaattgcctacggagcatattgcttttcagatcatagttatcttttccaataactttattgtaaattttaagggagtttcgttggaccctagagccataccttcactgacatctcatccgtttgtgtttccaaaagctgcttttacaggtcttagccgccgccccggaggccggtgtgggcgtgacctgcaggcgtccaccctgcggctacgggagaagtcttagtagcttgtatctggagtcttgagaaacacaaaccttacaaatgcatctttcttttgtcataaaattggaattacaattttcaactgggaaacagaaacacatttcttagcgtgctcagattttatatatcaccttatcaattttttccaaaacatgatttaaagcaacatctgtcctagtataattgttgcattttaaataacaatttattgaaaaatgttaagttttaccagcctaaaaaaagtaacaaaccaattaagtgtactttgggggcagggaggagtccttgatttgaataatcaggagttttgttggtccagtttcgccttctgagcagttcttctgtatcccgggaaaagtacgctcggccccaaactggtatttgtcagacgatacatgtaaaagtttgtccttgaacgtggaacaagacttgtgtaaagtctgagacgggaactagtgatcactagctcaagaactgcaaatgagacaggaagctgttcactgtgaaacagtctcttgcttgtcgtgtatttttcgagtacttctgaagtgtgaagtaaaaaaatctggctaatttatttgtacaaatacactttgataattttttatattttcataaacttttacagatgtaaaattaaagaacttcacttgttctttggagtctgttattccattgtacgtcactacagatttttcactttatagcacagattttttaagttaagaaaacattgagaatgtatcagtttgagatgtttggtgttgaaagccaagtgtccataggttaaattacattaaagtaggtgtcacgttccaacatctagtacgatgagaaggttttgtttgtttaacatataaagcaaatttttctaatttaaatacacaaatgtaaaaatcaagtgtgtttctttagtttacttgatagagattcctgtacattgtattttatattgcggaggcttatatcactgtacatgagaacatggaacgacctaggttttgttactcgcagtagaataaacagctacaggaagtttc

SEQ ID NO: 10672 - DNA, 783 bp, Homo sapiens
gctgatcacagacaccggctgcaccatcagcgggaagcagagcccatgtccaggatgcctcctgctgccctgtgtccatccctagtctgtcaggacttcctgtcactgttttccaaagctgtaaacctcactggtgaacgttcaccttaatgattgattctttaatctctgttttcactctcaggctctggtaagtattcgtattctcttcatcccagtctgattgcatagccacactgcccggcacgccacatccacccctgtctgcacatgagttgttctgacaacagcgctgtatacgcttcagtttttccacattgtccacggccagcacatgaaagcatcacttcttttttatgttgtgggaatctttgcaagttagtgttgcatctgattttcaggtgtacatttatttttgactgggcagataggggatttttttttttccatgtccgattcacacgctacacacccacatgaacacattcgaacttcgaaggccacacactcctgcttcataggccccacggtaagtgagttcacacctagaacactgtcctgaccgcaggacgcgtgccttggacttggtattctacatgtgactggctttcttgccctcgtctcttgaatgtttagactcttaagatcatatcctgccccaaatttcaaattaatgaaatgaagatatttcaaacagatctttgaaacctcagattctgtggtgcaattttaatgttttcttgtttctcagttttctgctataaaactattttcaattcagtc

SEQ ID NO: 10673 - DNA, 1276 bp, Homo sapiens
gggcgaaccagtttcttacatgttctaacgtttgactttgaaaacagtttaaaacacgtgtgcttggtcagctccagtgtgtcgtcccgtgcgggggttgagtgttgcatctttgcctttcttgtcgttgatttttgcccagatggatctgcatttatttgtactttttctatgtattataatcctgtagaagtcactaataaaggagtattttttttgtcagcttatcaatcagactgatctaatgtgaaatgtaagtatccttaaaaacaaagcatctattttggcagaaattgtgttcttaaattcagtcatttgatattctgtgagacttcatatttctcatccctttattgctttttagcaaacataagaaaccatgagtcattttgtcatttagagtattctgataaaatctcttgaaaatactgaaatcaaaaggttaatgattttttgttcattctgatttgtcattttattatctgttatcggtctaaagtgctaatttacccatttgatttttctgctagacagataacttttaatttttcaaatttggcagacactttttttttttttttgaaaatctttccttccagatctgttgcccactgaacagccacccgtccctcactgtcctggtgtccgattgggctggatggtgttggggcatgatgtgtggaggaactggaaggtgctttaggtctggttcagggtcgggcattctttgttgtttgcacatctttttaaattttacaccttttcttaagaattctaatgccgtcttaagtttttataccaataatgctgagctttaagtgtaggatctggtagtacagacagtgtgatggatgatgctgctggttgtaaatttcatcgtgtgtgtctaattttttttcctgttgaatgggtaaaaacaaaacaaaactttttttagaagatgaatttgctgtcatgttttgtggaatgagggaccgttgagctcactaccacctggagtttgagttgaagcatgaaaatggtgcccatgcctgacgctccagcgcctggatctgcacgtgcccttgtagaggatccttaccgtcctagagagcagacgctttctgaaaactacttgctccaaaagaccctctgagttaacgtttcagctgtatcattagacttgtatttagagcgtgtcacttcctctgaactgttactgcctgaatggagtcctggacgacattgggtttttcctctaggagaatacaagccttaataaacaatactatttagc

SEQ ID NO: 10674 - DNA, 710 bp, Homo sapiens
gtgaggaaacagctgatcctgctcctgtggcctccagcctcagcgaccgaccagtgacaatgacaggagctcccaggccttgggacgcgcccccacccagcaccccccaggcggccggcagcacctgccctgggttctaagtactggacaccagccagggcggcagggcagtgccacggctggctgcagcgtcaagagagtttgtaatttcctttctcttaaaaaaaaaaaagaaaagaaaacatacaaaagaaaaggcaaaaccccacatgcccacctcctctggcaacatgggggtcacagctctgcccccaggctgtcgtctcgtcgaggagcccctccctcaggtgcccacctggggctgctggaccctcgggctgcaagcactgctgctgggatgcagcctccccaggaagtcaatgtgaggcccgagacccctcaagcggtgagggcccctgttgaacatggagggttcctaaccccaaactcgtgccagaagaacccccaccccacccaggagctgaggctgatggagccctagggtgggggctgggcttgaccaggaacagcagagccaggccccaaggcatagggcagggcacatggtggtgacgagcaggcagtactcttgtaaagggggctcttgggcaaacagtcccaaaggctcccccaggtatcatcaagttggtaaataaacaggaacatggccc

SEQ ID NO: 10675 - DNA, 3425 bp, Homo sapiens
gaagggaccgggagcctgcgtggcctggggctgccgtgcacggggccagcatccatgcggccggcctggggccgggctggcttctccctggactctgtggggccacacgtttgccaaattttccttcctgttctgtgtctgctgtaagacggccttggacggggacacggcctctggggagaccgagtgtggagctgcttccagttggactgtggcctcaggaggcagtggcttggagcagaggtgggggtcggcgccttctacctgcaggactcgggctaagtccagttcaagagtctcctgagctcccctgcagatggaactcactcctcccagtctctcagcagatctggtgatggtcccgaccgccccaaggggcccttgaagggagttcacgccccttcagccccaagcgccccgtcttctggaggcccggccgcctctcccacccaccgtgtcctgcgcctgtgtgggcttcaacttctcccccagggtccttgagcctctcgggccccatgagggtgagccagcagcgctccaatctgcttcgctaggagagggtccaggcagggattgtgtttggttgtgttttgggtaagttagtgagaactcaagtcttgtgcctaaggagccttggagaacagagttttgtggagctggttccgcgtggggagaatcgggaggcccacgcgggaccagctctcccctgcgcaggccctccgcgggggacaggaacacccagccccagcgagtctggagaccaggactctgccttccaggcgtagggccagggctctggcaggtggccagggctccacgggggcctagtggcttcagcccctggggtacttctgtgttgtgattccccggagctgggaaggtcccgaatggagtccagacctgggccctggttcccccaggaccctgagggtttccaccttggcgcgcagcccgggagatccgccctgggctctgggttcgggaagaaggacttcctgctacagtagctgtggggagctggtgggggcatccttgaggacctccacctgggagatgctgggaccctcggggcaggaagtccctgagaagcctcatgggagtcagggagccctggggtttccacacaggcccatgccctccgtcctggcagggcaggcagagctcagcacagcctcacccctgcaggcggtatccagaggtgagggaggcctgaaatgtttccaggcatgaccctggagcccggcagtgcaccccctaaagatggcgcacccggcagccccccagtgtccccaggggcacacttccccttgggatgggcacaggctgccccacccctccatgattccaagggcccagaggggcggggccaggatggcgtgtcccctgcctgtgagtgacatcggttcaggaggagacagtcaggaagcctcctgctgagtggtccacattctgctgcccccagaccccatccagccaggggtggggatggggttgggctctgcgtcccactgagtctcattcctctgtccccgagccgagctctcctgggccagggtctcgtcaggaggtgcctgagagcagaatgaataattgaggttaggaacccggcatgccgagtgccccagaaatgccgctgtgtccccgcgggcagtgacgtgagtggggaggagactcaggcccacattgcccacacctgcctctgaactgctgctggtcacccccacccccgggtgcctgtgaccggggtcctgaggctggggcttttgtgccaggagtgggtgggacacagagacccccgtgccaaatcctgggcatccccagccccctggcccctcccacatcccccgtgtattcaggaccccatctgctgagctctgacctgcccccgctctgccatcagcccctgctgctcctcggccagagctcccaggacgcagggagaccctgggagagtgaggtcatcccggggccatggaagctggcaggagacactggtctcagaggagggatagagacgcagatttcagatgtaagaagcccgatccacattgcataagtggacccagctgccagatgtgtgggcagctgcagggagtggcccggggtgctgggcccagctgtggttgttcttttctgggtcaggagtgactgcggagtggctgggacgctcctgccgggggaccctcctgccgggggtggccgcttgcctgggggaagacccctttccctttctttttttttttgaggctcaaaaaaaaaatccaaataaagcaccatattcccaccacgccaaattaaccttgacaacaatgttggcgtatttgcgtccagtgctgtttttattaattaaggtaaaatttacatatggtgagatgcatgctcttcagtggagacccagcccctagaaggtccctccagcccttcctgtcggcgtccctccccatctgtggctctgacttaagcaccgtggattgacctctccggctcacgaccttcgaggagtcagaatcctgcagttggagcctttgatgtctggcttcttcatcctatgacttagagcttcatccgtgctgttgtgtgtgtccgtagctccttgctgtctgttccttcgtttttaattgtgagcagtgttcttctgtctgaataaactaagacgcagtttgtccatcacctgttagtggactttgcttgcagctgtcggtgattaggaatggaggtgccggtgtgtgcatggcactctatccgttatgcatgtttattttctgcatctgttaatgttttaacatctttcagacccaggactgctcctcctagggccagttagttcccgggggtggacagcttgcctagaacccaccttgccagggctgtgacccccgaccccctatcaaagtctcacactaagccaacgtttccccgccctgtgccaggcaccaggcagcgggagacactgctgcagctcgaagcctgccggggcgccggcccctctgcggctgcttgcgccatcctgccccctccttcccaggggaggccccagtgaaggccctggccagggcttcccagccccttctgcctccggaccggcctgggtgcttcccgtgtggcccggcctggggcgacgtggccctcctctcaggaagcgtggtaatctctcaatggctggcctccggagttgtcactcaggctcccttgtaagttaaggccgggcccaggacactctagggcacgcagctgctgtgggactgctgggttaggtgtcccctggagcagaggcggcttcggatttctaaagtggctgagtcctttcaccttgcaccagaaatgctggatcaggcgcagcacacacagcacctggggatgcaagcccggccagccccatggaccaagccccgccgaccgtgtggcccgccgagcccaggtgcggc

SEQ ID NO: 10676 - DNA, 455 bp, Homo sapiens
ggcggcgctgggccagtggacccgcccgcggccctcctcagcacggtgcctccgaggttttgaggcgggaaccctctggggcccttttcttacagtaactgagtgtggcgggaagggtgggccctggaggggcccatgtgggctgaaggatgggggctcctggcagtgaccttttacaaaagttattttccaacaggggctggagggctgggcagggccctgtggctccaggagcagcgtgcaggagcaaggctgccctgtccactctgctcagggccgcggccgacatcagcccggtgtgaggaggggcgggagtgatgacggggtgttgccagcgtggcaacaggcggggggttgtctcagccgagcccaggggaggcacaaagggcaggcctgttccctgaggacctgcgcaaagggcgggcctgtttggtgaggacctgcggccttgggtc

SEQ ID NO: 10677 - DNA, 66 bp, Homo sapiens
accccactttttgttgttcattattttgattgattttttttctttaaaatgtatttttcacaaagg

SEQ ID NO: 10678 - DNA, 285 bp, Homo sapiens
agcgcgggcgcccgcggcgcgaccctccccggcggtgccgcgctccgaaccccgggcccgggcccccgccccgcccccgccccgcgcgccggtccggcgccccgcacccccgccaggcgcatgtctgcacctccgcttgccagaggccctcggtcagcgactggatgctcgccatcaaggtccagtggaagttcttcaagaggaaaggcgcccccgccccaggcttccgcgcccagcgctcgccacgctcagtgcccgttttaccaataaactgagcgaccccag

SEQ ID NO: 10679 - DNA, 1111 bp, Homo sapiens
gctgctgtggagcgggcatggccgggccctgctgaggaggggcctgggcagagggcctggacctgggatcaaggcccacgcgcttccctggggtttactgaggtgatgggtgcaggaaaggttcacaaatgtggagtgtctgcgtccaatacacgcgtgtgctcctctccttactccatcgtgtgtgccttgggtctcagctgctgacacgcagcctgctctggagcctgcagatgagatccgggagactgacacgaagccagcagaggtcagaggggactctgaccacagcccgctctctggctgtctgtctgcagtgcccggctgagggtgggaggcaaacacgccttgttcctgctcttcccagttcagcttggtgggagaaagtcattcgcgtggctcgggacgctcatgtaaatttggttttggtgctcaagggttctttcctcccaggggcaggtgtttctttcctgtttgtcttgtgtcttgagagcttggccttatgaccagtgagaactctctccctggtctctgccagcccaagcatcactgcccgaggcgccagctcagtttcaccgtccacgtccacaaggggcttttcccaccttcacctttgtcgctgggtcagtgctggaaagcgcccctcactcctgcgctgacaagggcccttctctactgtctgtggggtggttccgggctgggggggctgcctcctttgcacctgattttgaaggtgtctctttcatccatggttaagtcataaaaagcttattggttttggttttgactcacctgaaagtttttttggtttaaaagaagaataggcggggcacggtggctcatgcctgtaatcccagcactttgggaggctgaggcaggtggatcacgaggtcaggagatcgacaccatcctggctaacacggtgaaaccccgtctctactaaaaaatacaaaaaattagctgggtgtggtggtgggggtgggcgcctgtagtcccagctacgtgggaggctgaggcagcagactggtgtgaacccgggaggtggagcttgcagtgagccgagatcgcgccactgcactccagcctgggcgacagagcgagactccatctc

SEQ ID NO: 10680 - DNA, 1160 bp, Homo sapiens
agagccctctccacctgcaaggtgccaggactgggagggaaagtccagggcccccccaccctccccaccaccctccgccatcagcctgcctgggccagcctgcctcctggcctcaggatctccctggggcaggaagtgggtggacttggaggaggaacggcaagggccggtccccacactcttgctcctcctgggcatctggggacaggaacacctctcagggtggccaagaggggcttccttgggaccagtgcaaggaagttctgctgtccctgggaagtctcagaaccaggaaggaaaccctgtggaggctgccctttgacctttggacgccacctgtaatcactctggatggtgtctgtggagttcaggtttattttctatttaaatgaactaaaagccagcatcctgccgggcgtggtggctcacgcccataatccagcactttgggaagccgaggcgggcagatcacctgaggtcaggagttcgagaccatcctggccaacatggtgaaaccccgtctccactaaaaatacaaaattagctgggcgtggtggcgggcgcctgtaatcccagctacttgggaggctgaggcaggagaatcgcttgactccaggaggcgcaggctgcagtgagctctgatggtaccactgcactccagcctgggtgacagagcgagaccctgtcttaaaaaaaaaaacaaaacaaaaccagcatctgttactggaacagagacctcagcccaagctcaggacaaggaggcctccctgggagagggggcctttctcccaccatcaccgcctgtgtccttcaggggctgctggagggcagcccaaagccaggggcccaccccgccccaccccaccccaccccaccctctgaaatgtgaaaagcctgcactcttcctgtgggctgcgcagtgggctcgggggttggggggtgccggggcgatgcttccaccctggactgagtgttcggggcagcctgctcggctgtatgtttctcgcacgctcacccgcttcagtgcggctctgtccctgctgccgcctccagtcctgagggaggggcttgccccaccttctacattccaatttttatatctttgaattatgtgattagatattaatttaatgataaaaccactctgaaagctcttctca

SEQ ID NO: 10681 - DNA, 2487 bp, Homo sapiens
ccgacaggagggcgaggcccctgggacggacagggctggctgtctctcagccgcggcagcagggagcgggcagaggccgcagggctggctcgggcaggtgggtcacgtggtctgcagaaccaaagagaggaatcgccaaaacaaatcacgagaagagagaaggggacagaacagcgagagcaacctggaaaatcggtcttcaggtcccacgtttcctcccccttttttcttgggaaatatatttttccatctgttgcttattaatactgtttacacattgggccttgatcaggagccaggtgggcgggggctagggggagcctgggtgcagcagagacagaggaagcagagccaggtgccgagcgcgaccctgcaggtgctggacgcggtgcagcaggtcacgaggcccccatgtctgcacccagccaggtccctggggacgttactaactcatgacttgggagctaagcccaagtgtgaaacctctggatcctatggatttggtttcttcccacagttttctgtaggtttagtgtggctggcgccccgttctcctccagttgggaacatgcacccggagcttggggtgcagatcctgatgggtgcctgcctcccccgcccccagccggtgctcaggtggcccaggggccgcacagacgaggcgtggtccaggcattgttgcacatgtactgagggtgtttttaagtgaattgcttagtaggcttctaggaagagtcagatttatagcattttcaaccaaaataatggtgagtgcctaggcttcccgagttagctctttgggtggcccctgagcccctgtgagtgcacttgaccgggtgcggaggtcctgggcagcctgtccctgagccggcccctcccaggggtctgagatccatgaggtgtgtccctagggcttcagtcctggggcagaggcataaacagaaccagtcactatggaggtcgaggattcccatgtgggcccttcagcttgggctgcttggccacggaacagcccttggctccctggcccccggcccccatgcagcccctgggctggcccttggtggtctctgtccaagggagagcccctgggtgttcaggaggctgccccgggtgggctgctcagggcagctgccgaaggtggagcccagagcctgtctggaagggctgtctgtggctgtcctgagacctggccttggactcacaaggaagaccaggctgaggcccctccaggccagggtcctggggcaggcatctcagggagcagccagcccaggcctcctgccgtctccaacagggcatgtcccgggaggaccctgagtgccagattcccctggacgctcctgctgattctgtcggcagttgaaggcccgtctgaggccccgcaatgcgagggtcctgtgtcccacttcactgctccgaagggaactggctggctgtccgtccagtgagcggcccagaccccacctctgcgccattgtcaccagggccctgtcctggctgccctcacccatgtcaagctactgaggctgtgtcttgtttgttttctctgttacatttttgtttgctgttgtcacagtcagctggtttcggcgtgatgttgatcttttgatgtacatactccgttttaaactcatttccactctagttgagttctgcagcatgcagcggtatgaccctacgggggtcaggagagccctgcggcccccacccaccagctcagaacctgtcactaatacagctgcctgtgaccctgggacccgcaaccttccagctgcttccctttgtcaaagtcacgagtgcgtctgccttgacagccctcgtcaacagaacttccagtgggttgtgggttcatttcctttctttttaagaacagggttgggaccttttctgcccctgccccttagctactgaggcatagggagaggaagttaatttcagagccatacaaaaataagccacaaccagcttcagaattaattcccaatcccccattccaccagggctgggagcccattcccagtgcttcccaaggccctcggggacatctaccgccaacccagctgcttctggcaggggctccaagccccagcgtggggaagggccctggagaagccctcatcctcatgggaaccacactgcagtgggtggggaaggttgttgtcagcaccgcccccggctcctccaggtcctgctggctcctcgggggcagggttccctggacctcccagttctgcgccttggggccagccagtactcagagaggaggaccttctcaaccacgtacagaacacgggttttcatggctgcctttggtttggttttctgagaagataggattggattggattttgcagagggtgagaacttctctgtgcctgctcagaggcgccctagggaagggccatgtttgagttttgctttgtatgttgttttgcaagtatctgcctggtactttgatttaaaataaaaacaattttcatagtt

SEQ ID NO: 10682 - DNA, 1630 bp, Homo sapiens
gggcccgggacgggcggcgcccatcctgcgacagaacacgttcgggttttggttttgtttcgttcacctctgtctagatgcaacttttgttcctcctcccccacccccgcccccagcttcatgcttctcttccgcactcagccgccctgccctgtcctcgtggtgagtcgctgaccacggcttcccctgcaggagccgccgggcgtgagacgcggtccctcggtgcagacaccaggccgggcgcggctgggtcccccgggggccctgtgagagaggtggcggtgaccgtggtaaacccagggcggtggcgtgggatcacgggtccttacgctgggctgtctggtcagcacgtgcaggtcagggcaggtcctctgagccggcgcccctggccagcaggcgaggctacagtacctgctgtctttccagggggaaggggctccccatgagggaggggcgacgggggaggggggtgatggtgcctgggagcctgcgtgtgcagccggtgcttgttgaactggcaggcgggtgggtgggggctgcagctttccttaatgtggttgcacaggggtcctctgagaccacctggcgtgaggtggacaccctgggccttcctggaagcctgcagttgggggcctgccctgagtctgctggggagtgggcattctctgccagggacccatgagcaggctgcatggtctagaggttgtgggcagcatggacagtcccccactcagaagtgcaagagttccaaagagcctctggcccaggcccctccccaccagggctttgcagatgtccttgaaagacccaccctagagccctttggagtgctggcccctcctgtgccctctgccctggtggaagcggcagccacaagtcctcctcagggagccccaagggggattttgtgggaccgctgcccacagatccaggtgttggaagggcagcgggtaaggttcccaagccagccccaacacccttcccacttggcacccagagggggctgtgggtggaggcctgactccaggcctctcctgcccacaccctctgggctgagttccttctttcccttggacgcccagtgctggccttggaggacggtcagctggaggatggcggtgggggaggctgtctttgtaccactgcagcatcccccacttctccacggaagccccatcccaaagctgctgcctggccccttgctgtaaagtgtgaagggggcggctgagttctcttaggacccagagccagggccctcaacttccatcctgcgggaggccttggccgggcactgccagtgtcttccagagtcacacccagggaccacgggaggatcctgacccctgcagggctcaggggtcagcagggacccactgccccatctccctctccccaccaagacagccccagaaggagcagccagctgggatgggaacccaaggctgtccacatctggcttttgtgggactcagaaagggaagcagaactgagggctgggatattcctcatggtggcagcgctcatagcgaaagcctactgtaatatgcacccatctcatccacgtagtaaagtgaacttaaaaattcaatcaaatgaacaattaaataaacacctgtgtgtttaagacatg

SEQ ID NO: 10683 - DNA, 986 bp, Homo sapiens
gcgcagccgcgctgccgtcgggacggctggtcccctggtgctggaggagtggcctcctgttggctcccatgctgctgatctggggggtgggtttgctttgctttggggttcttctatttactttgttttctcgaagacaaactttcctctatgtctggaaaagcgtaggcatccggaggctttggaggggagtctggcagcccggctggcccaggccctgcagcggcagcctttccacagggcgcagcggcggcctttcgaggccctttctggggggtctgagggagacctggttgggaattggggctccagtgctcaggctggcttgggctgcatgaggacagccctgtgggaccctcgggagaccccgtggctgtctccgccccatcgaggaggaggcccgtcagccatggctgccatctggcttctgccctgtgaccccgtgaccccgtgaccccgaagtggtctggggctgatcttgccttgaggaagacccaggccatgttcccaaaggccagcgggggccctggattgtgatgcagcctcgggacagggctgaggcctgcgggggaagacctataccccacgcctgggcctggcttcacctcaccctaatcccccgggagggagctgactgatgcaaaaagctgagggggcctgctgggagtggctgtttttatgccccagccccgcaagttggggagtgtttgtgggggtccagagccctcccccagccaggagagaacctcccggaggggttctctgtggggccctgtgtcccctgctcgggagtaaggctggtcctggggtcctccctgcacggaccccactgggcctgccgagtgctgtgttcttcctcagtctggctgtgggcaggagcggcctgcccagtgtcacccagggtgagtgcaaaataaagacggcgagtgtggctctgtccatcccttccctcctggagggtggaggctcctggctgttggacacgg

SEQ ID NO: 10684 - DNA, 2405 bp, Homo sapiens
gcccgcccgccggcagggtcggtggctgcctcgctccgtccacccgtgtgtgtgtccggtgggtctccactgcggggccagggccacgctcacccctctcgcggcccctcctctgcttccccctgaacccaccccccacggaaaccagccctgcgggctaagcaggtgcgaccccagcaagaggggtgctctgggaccagacatgaagtgagttgggggagggcacagggtgggtttgagtgaagggagagcacggtcctaagtccccagcaggtggtgcgggtgtgtgagtggcccctgtgatggccagcctggcttggacacgtgatgggcctgtggccgggtccagtgggcactgggcggggtggtgtgttcggcccagaggcccctggcctgagcaggtgcagagttttacagacacccggtcagcccggctggagcccgccctcccctcccctagcagccaggtcactgcctgtggctgcagccgtggcccgtggtgcagccgtggcccatggcagcctgtagaatccaggtgcacagagagccctgccaccgtcttacctctgggctttggtgcttaacacacaacacagctgcagaccctgctggaggccgagggctccaggtgctatcttaggtggacacagccctgggggctccttccaggaggggaccctcagccctgtgccccccaccacttcaggccacaccaggttccctctgcaagggcctcggctcagtcgtgtgcacttcctcggagagccttgggctgccacgtccaccccgggctctgcccgtcctgttctgcccatggcccagcccggccgctcctgctgacccctcctggacgggctggagctgggctcctgcctttgctgctaacactggaggcggtgttcctaactgcagtgtgctgcttacacctccccgcgtgggtaaccaaatttttaagtagtcagagacatatcgaggtagttacataaaattattttgtttggcattatttttctcactcgaagaaactatatagggttgtttttcctttagcttgtgctcaagtcctcttgctgtgttttcagaagcactcacatgttctttcttttcctgagtgaaaagcaaaggtcccacggtgtgtgctgtggtgcaccgcctggctttgggggtcccggaggcaggctgcctagactcacagcctcgggaccgttgccacggcctgtcttctcgttcaggcctgcctctgacagcactcaccatgaggacattccatccttcaccccctcctctggcacaggccaccactgcggtgctgtgccttcagatgggaggtgggcgcggtggcctcctccttccctccaggacctgcccgtgtgaagaccccccggagtgctgagcttcagggctgcgtggaaagagtttttactctctttttctagcctgtataccaggcttttccccacattgtcaggtagagcaccagcttccctgaccgctgctgctcggggagggctggggctggccgggggtcctgtggaggagtacatggaggactccaggtacagcgcaggagtcacggcttttgttttttgacattggcccccggttctaccaatgacagggtgccctggctggagctgtcatcacacacacccctcagctcggaggctgtgggctcctcaaagctggagaaagaggccaagatttttctgcacacggagtgtggggataggagccgggccaagcgctggcccctcagcggtgagccctgcccactcttaccgagcaaggtgggtggctctggcacgagtcccccagggggagagcatggctaccagggagctgcagcggagccctccagccctcaccccaggccagccccaccccggcctctttgagaattctcagaactttgtacctttcccctgatttttaaaccctttttctaaacagactgactttcttacaaaatgcatttggaaaccagacctttgctacccaccaatgtctctgggttttgtaccagtccctgctctcaggccaccctgcccaggacccaggcccgcctccccctccacactcaggatgtcctgctccatctggccggctcactccgtgtggcctgcctttgctgaccgttttggggttccccgccggagctacaggggcattttcttccctaaaaccaacagtgtcccactgacctccccaagtgtttgctgcgtggcagatttcctgttcttgttcgcagtttgccgactgaagagtgtgggatttccgaggcccaggtgagcacgtccatctcaggaggcgtggagggaaaagacatgtcatgaagggttttttttatgtgactgatttttttttaaatcgatgttcaaactaataaatatttttttatgaagagg

SEQ ID NO: 10685 - DNA, 141 bp, Homo sapiens
ctgcccagtgagccatcccgtccccaccaccctcctcctgcctcctgacccaggactgctgaatacaaagatgttaatttttaaaatgttactagtataatttattctatgcattttataaaataaataaagctttagaaa

SEQ ID NO: 10686 - DNA, 3186 bp, Homo sapiens
gcatggtgcgtggggcctggcccccatgcagccgccacaccgccctctgttcaaggcagggccagctccgggacctctgtcctccagttctccatcccccacccccgcctcttcatccgtccagtggggcagccagccactctcccttccctgaaggtggcccttcccctgttaaggctgccacagggcacacctgggttggggctccccaaggtgtgcccagcagaagtgcaatagccaggagggttgcccctcctcatgggaatgtgtctggggtcttggtgccacaggggctgcagcgcagagtaggcagatggcctttggccccccggctccgcttcctcaggccctgccgggtcccttccctggctaccccaaggctcaggcatccctggtgacctgtggttctgggctggtgagggcacctgagcaacctggcacgggcagccaccatcctggcctcacctccacccaacactggaactccagcacccccagctacctcccaggacagacccctgtctgaccactgccatgctgacctgacaggctccggcctgcccttggccacccacttggtccccttgcttctgttttctacctctccaggcctgcccactacccccacccctgctcctcctttgtcagtgcgatccctgctgtgctcaggccctgccccccaggcctgtctgtaattctcccagcttggggcaagggaggggttttgcttcttgtacctacagggcagcagaagcttgatgcccttcaacacagctgccagccctgggggtgtggggcccctggagtgtgctctcctccagtgttcagccttctggcactgcaggcctaggttggagcagcctcgtggagtagggacggactagttcgggccctggggtcttgctggggcccataggcatgtggggcaggaagctgggcagagctggcctggctctgagtggccactgggggaaaggcagccttctgtctgccaatctgggtaggcccagtggccaagctctcatgggagccccctccccacttttttttttaacctgcccccattgtttctggttgtgtggtcatttgatatgggaactgaaggccagccaggggaggggcttggccaaagtcacagcaggttgatggcagctccagagctgtctttgcccctttgtggccctgaggacggctgggtctataggtagggcaggggtcaggcagggagtccagggtgcctggaagaggtggccacagcctgtggctccctccctggggtcctgccttccaaccacggcattgcagggaggatgaggctcagagggggtaggtttggagggaggccattttccagggtgggtgggagtgggctgagggctcggccccactgaccctggacgatgagaattttgatgtttgcccgtgtgcgtgtgtctcctgggtgtagtggatgccagtcttgttgctgtgacaagtaacaaccttttttttaaattgttttttatacaaacactcgcaatccgacatttggtgctaagggtttcctggtgcagacggtgggcctgggggctgggctggaccagggcgtgggtctctggggttggggtcccttgctgctcagggaggcagtactgactgggcactgcctctgcccccagcacccaccctcccccattccccagggagaaggggccccactgggcttggcctgcagtagtagggagacaagttccaggagcactttggggactggggttgcagaacacttcctgtctctggcttcatccttgggccagaaggctccaaccctcagcagcccttgccagatgtgccagggagtgggtgtggagacccggactccccccacccacgcacacctcggcctgatgagaggatggaggctggggcagagatgggcgtgacccagcgtcagagggtcgggggaggcattccttcctgtgtcccagagcttcactggtggagctggaggagccggaggtggagggtggggtctggcagctgctgctggggcagcctcatgaggggaggggaggggaggggaggggagcaggcactgggcgggggcctaggtgcactttgtccttgccaccaatggcgggaggagggtggacctgaacacctgcagggtgtggtgcctgccccagcctctcaggtacttggcccttggggagaagagaagagggtctggtttttgctgggggtgagtttccgggacactcccaaagcccacagataatccctggtgtgggaagaggagtcctggataccttgatgtttagcactttaaccccctttgtctttaaggtaggcgtgggggctactgccagaagtggctgttgggtctgaccccctcctttctgccctccctctgccacatgctggtccgcagagccctcctcccaaggggtggggccctgggtggagctcagcagggtctgcccactccctacgctggcccacataggcctccaggagccctcagtgagagggaccagcatagctgacccccagagtgtggtgggcgccggccctgcccgaggcccagtcggggccctttctgcagatctacctctggctcagcgcacgccccctgccctgagaacaggaaagggcccggaagggctgactcaccgggccgacgctcacacgaaaatgggatgcactttatttgctggtgcaaaggcaggtgagggtgcctcctgtgtgaccgttggccctcctgcctggtggcgctgaagggaaggagccagtgagcctgaccccgggaggggccgtccccgtgtgccgcgtttggcggggccccaggcggctcccccaggcccgggtctggggccccaggctttcccctgcctcgcggccgggcgtcccgtgctttgggtttcttggtttgggttttttaatgccagttctcagtacataagtgcattttgaaagaggttccagctatcacttgtaaccatatatatatacatatatattctatctacaaagtgtttatttgcgagatgtttcaacggtgagttcgggccccgcccgccttgtgaccatctgtccccggtcctcgtccccgccccgcgccctggtcccgagtggcgtggggacgggccatcactgtatgtattaaaatgactgtatcaaataaatgtttattgatttttttccagg

SEQ ID NO: 10687 - DNA, 1397 bp, Homo sapiens
ctgctgctgaggcttgaacccagaccccagcactgtgatgggagtccacggctagggaggaggccaagctggccccgcagcgcctcttggaccctgcgggatgccggggcggccaggctggcccaacggacagacaggaccaggatcacacctccaggcgcctctggttggacattccaggtcgtgccctggggctgggtgggtagggggctgcttgagtgtggccccacctcctgggacctgagcccaagccctcccctggtgcagctggcagcatgtggggcagctgcctggagccagaaccggtttggatgtcccccctagactcccagggagtctgtttatttacattcccctctccacgtgatgtcggtcccccatcgcctgctgagtcacttgtctgtccacccacccagcccagttctaggtcgttccccagcacctccaggttggcccacacaggtaccataagctgcctcggctccctgtggcttgtgcccatgcacctgccagggcccagcaggccaacccatcatctagagtagtggccatcagcacccgcctaacgggcaccatgccaagcactttcatcattatttatacatcgtcaccacaccccctctattcatgagaagtaaagctgagaaaggaccagattgaccaagcgccagagacaaaatgtggcacaacgagaaccccagccctgtccaggtggctccgcgcccagggcccaggcttagcagtgctccctgccctatctttgggaaaatcttgcttttatggtcttcccccctcgccctcaagaacaagggccttgtgcgtgggccttcccattgctgctttcccaagaaggcctggattcaggggagaggccttcccagggccactccccttacaccctcccagaggcctgagcaacccctctctgggtggtttggggctggtgctgcctggcggaaggacagtgagggcggccctagccgcctccaccctcttgcgcctctgccctctcccagtccccctgtggcttctgaaaatctcagggacagatgaggctgagcccctagtcccctctgtgtgctttgagcctccagactcgaggctggtcactgcaggtcccaggtggaatttggacaactggcctggccgctcccatcctgtaagcccccaccacggggagaccctcatccctgcccctgtgtggctgcgcaagtattctgcccgcctcccaccatcagccttcgcccaaggggcccttctgcctctgcttccctcccttctcctctgtcttgccctggcccacgcacgcctgtctcgtcttccttgttttgctgcactcacttttttatactctgacaaaaaaaaaaaatcagaaataaagctggttcccaagtgct

SEQ ID NO: 10688 - DNA, 438 bp, Homo sapiens
gccgccggcgccgcccgggtccctgcagcgcttcctcccgcagcccccgcgaccgatccgaccgcgtcgctgccgctctgctctctcatacgcgtgtatgtttggttccatgtcacagccccctaggagccagtgatgctcggccttgcgcccgttccacctcccaggccacccttcctgggcttctgggccacctgccctcggggggcccctgcgagggtgcctggagttcccacgtgtcccggggcttttccaggaagcccgagcccaggacctgttggcagagttgccagggttacatttttgaagcacctgctccttttcttgcagtgtattttctacaaccagattgtattaatattttttactttgcccttttaaaaaatatacctaatacaatatatttaatttttaattaaactcttaaacttttcttcc

SEQ ID NO: 10689 - DNA, 669 bp, Homo sapiens
gccgcccccagcagcacagaccccgccgcctcctacggccgactctgggttcccttcaggtgttgttgtcggcagggctgtcagggcacatgcctggccggctggggtccccacccgcggagacggtcctagacccagtggggagtgctgtgtctcctgggtctgcccacccgtggccaagcaggaactccaggtgcagggcgggcctccaggtgcagggcgggccagaagccccctcatcggcccgcagctggctggcccagtgctcctggctgggggctcttgcgtggtgagagtaggggtccccccaggagccatgctggacccatgagcctcgctggggcctcctccccaggcagccaatgggccccagacaagcctttggtggggaacagaacctccgcatcgtgtagttttgtgacataaggagacctcctacttgagctgtctgtaccccagaatcaaacacagaacctcagaaccagatttaggacctcagaatcctgcactcaaggtggcaggacccaatttctgttttatatgttcatgaactttaaacctggaaacatgtccttactaggtgttttatcaaaaaaaagttttcatatttatctctatccctaaccccccaaaaataggatgtcttattattgaagatatttttaaagc

SEQ ID NO: 10690 - DNA, 19 bp, Homo sapiens
gtacagtggacagcttagg

SEQ ID NO: 10691 - DNA, 1067 bp, Homo sapiens
tattacctacaaatgaaacttacctacactgatcttagttctcttatgaaaaaaataagatgttatcccatcaaataaacaatgtcatggctatcttgtcttttgaaatatgtagtaataagacttatctctggtttgctgttcaatttttgccttgaacgacaaaagctttctaaaaatagtataatgtaccactttttgtatttgtcatgatatttttgacccattggcaacaaatagactattgtcattttattagtaccaatgatgaaatttcaccaaactattaatcaaaagtcacttattgaacacattgataaagcatcatgttccctttgattatcccctataaccaacactcaactacaaataggctgggattcaatgtggagtggtggatttcctgaaagaaagtagtgcagatatttaaggattgcatattgttcctaatgaggatgtaataaacaggcattagtacccctttcttttagtacctaaatatgttgtttctgagccatattcttcttcaggtttattttataaagtgaggacatatgataatgataccaaaggaaagataattatcatgaaaccaacttttggatcattccctttttatacaattgtgtatttatagggataccttcctcttctcacatattaattgtatgtcattaaaatcagttggctatgtcagtgtgtattattcacctcttttgctagcaaggtttgagatgctatattaacatttaaatcatgaaaatgagcaagtaaatagaataatattttattaatgtatgatatgtaatacttattgtctaaatcaagtttcctatttttggtttatttattttagaagaaaaataaaattatttgggcatttttgtttatagctcattacaaactagagtgatgaatatatatatttactaaagctaattgaaagagtcatgcaactcagttgggaattaaccactcaattcaatagtaaaagccatgcttggatgtttcttttgcatgttgcctagcattttatagatatttattatttaaaaaaataaagatat

SEQ ID NO: 10692 - DNA, 1583 bp, Homo sapiens
actgcacactttccctgaacacactgtataaactctttttagttcttaacccttgccttcctgtcacagggtttgcttgttgctgctatagtttttaacttttttttattttaataactgcaaaagacaaaatgactatacagactttagtcagactgcagacaataaagctgaaaatcgcatggcgctcagacattttaaccggaactgatgtataatcacaaatctaattgattttattatggcaaaactatgcttttgccaccttcctgttgcagtattactttgcttttatcttttctttctcaacagctttccattcagtctggatccttccatgactacagccatttaagtgttcagcactgtgtacgatacataatatttggtagcttgtaaatgaaataaagaataaagttttatttatggctacctatgtgtttgtaagcaggtatattgtatattagtgtattagtaatactagataaatgaattttgtctggggattaagattggatagttaatagattaatacaatcttttaattctgctctaatgctagcaaattggaaaatgtttaagtctttgacacttaaatttatctatatttttaacaaagttcttgaacttagtatggcaccggaacctgttttgaattcagtcaggtttttactcaagtaagtggttgattttttttaagtcaaactacactgaaacttttatccttttcttagattaatcttactttttaaatgtatttacaatatacagcaaggtgattatttcaagagaatcccaaagtacttgaataagggctattgtaaaatttaaaagaaatatttatatatacacatatatacacatacacacatgtatatatatattcttcataatggaggacaatgttttgcaatatataaatcattctatttttgtaaattgtatatcactttaattgaaaatgttctctactaattaatactgtgaaacaaaattgatgttgtttaactagaagttatgagtatcttaactgcctttattccttttcaaaaaggaaaaagctgtagaacattttgtagatgaaactactgtttaagattaatgaattaatattgtgaatgaaaatcaaaatccatactttaaaggtaatcatgttactaacaacctatttttgaattcataaaaatttctttataaatgatgttttgtgaacatagtaaaatagaccattatactatgtgtatgtttgatacagcgtcgccaaaactagtgttctttattagtgcctctcacaaaagatcctggatggaggagtaagatgaaatattatgctattatatgatgctgtttgtaaaggtattaatgtactagtaaggtgttaatgacaaggaattagtactattcctgttgtaaagttagattttgcatattgtatctatcaaaatatgtttgggtttagattttaagttgtctactgagcagatttctgcattggttttccagtcctgttaaaagtttagaaacttcatatgtgtcatcacagcttttgtaaagaaagtatccttaatattttatgacattct

SEQ ID NO: 10693 - DNA, 229 bp, Homo sapiens
atgacaagagcacctcaaaggcagcagcctcaaggagcagccatggccccagacttgtcgcacggatgcagaaaacttaatggaggaggctgaggtcagaatgggaagagtttttaaaaaataaaaaggggagctaatatgtgaggaactgattgctgtgcattattttccactgaacagaccttcttttaacttctaatctcaagcacatagcagctgttgttttcat

SEQ ID NO: 10694 - DNA, 1254 bp, Homo sapiens
agcctccatatgtctcatctgtgctctccgtgttcctttcctttttttgatatatgaaaacctattctggtctaaattgtgttactagcctcaaaatacatcaaaaaataagttaatcaggaactgtacggaatatatttttaaaaatttttgtttggttatatcgaaatagttacaggcactaaagttagtaaagaaaagtttaccatctgaaaaagctggattttctttaagaggttgattataaagttttctaaatttatcagtacctaagtaagatgtagcgctttgaatatgaaatcataggtgaagacatgggtgaacttacttgcataccaagttgatacttgaataaccatctgaaagtggtacttgatcatttttaccattatttttaggatgtgtatttcatttatttatggcccaccagtctcccccaaattagtacagaaatatccatgacaaaattacttacgtatgtttgtacttggttttacagctcctttgaaaactctgtgtttggaatatctctaaaaacatagaaaacactacagtggtttagaaattactaattttacttctaagtcattcataaaccttgtctatgaaatgacttcttaaatatttagttgatagactgctacaggtaatagggacttagcaagctcttttatatgctaaaggagcatctatcagattaagttagaacatttgctgtcagccacatattgagatgacactaggtgcaatagcagggatagattttgttggtgagtagtctcatgccttgagatctgtggtggtcttcaaaatggtggccagccagatcaaggatgtagtatctcatagttcccaggtgatatttttcttattagaaaaatattataactcatttgttgtttgacacttatagattgaaatttcctaatttattctaaattttaagtggttctttggttccagtgctttatgttgttgttgtttttggatggtgttacatattatatgttctagaaacatgtaatcctaaatttaccctcttgaatataatccctggatgatattttttatcataaatgcagaataatcaaatacattttaagcaagttaagtgtcctccatcaattctgtattccagacttgggaggatgtacagttgctgttgtgtgatcaaacatgtctctgtgtagttccagcaaatcaagctgagctttgaaaaagtttgtcttagttttgtgaaggtgatttattctt

SEQ ID NO: 10695 - DNA, 1330 bp, Homo sapiens
taactcattgacttggttccagaattttgtaattctggatctgtataaggaatggcatcagaacaatagcttggaatggcttgaaatcacaaaggatctgcaagatgaactgtaagctcccccttgaggcaaatattaaagtaatttttatatgtctattatttcatttaaagaatatgctgtgctaataatggagtgagacatgcttattttgctaaaggatgcacccaaacttcaaacttcaagcaaatgaaatggacaatgcagataaagttgttatcaacacgtcgggagtatgtgtgttagaagcaattccttttatttctttcacctttcataagttgttatctagtcaatgtaatgtatattgtattgaaatttacagtgtgcaaaagtattttacctttgcataagtgtttgataaaaatgaactgttctaatatttatttttatggcatctcatttttcaatacatgctcttttgattaaagaaacttattactgttgtcaactgaattcacacacacacaaatatagtaccatagaaaaagtttgttttctcgaaataattcatctttcagcttctctgcttttggtcaatgtctaggaaatctcttcagaaataagaagctatttcattaagtgtgatataaacctcctcaaacattttacttagaggcaaggattgtctaatttcaattgtgcaagacatgtgccttataattatttttagcttaaaattaaacagattttgtaataatgtaactttgttaataggtgcataaacactaatgcagtcaatttgaacaaaagaagtgacatacacaatataaatcatatgtcttcacacgttgcctatataatgagaagcagctctctgagggttctgaaatcaatgtggtccctctcttgcccactaaacaaagatggttgttcggggtttgggattgacactggaggcagatagttgcaaagttagtctaaggtttccctagctgtatttagcctctgactatattagtatacaaagaggtcatgtggttgagaccaggtgaatagtcactatcagtgtggagacaagcacagcacacagacattttaggaaggaaaggaactacgaaatcgtgtgaaaatgggttggaacccatcagtgatcgcatattcattgatgagggtttgcttgagatagaaaatggtggctcctttctgtcttatctcctagtttcttcaatgcttacgccttgttcttctcaagagaaagttgtaactctctggtcttcatatgtccctgtgctccttttaaccaaataaagagttcttgtttctgaag

SEQ ID NO: 10696 - DNA, 936 bp, Homo sapiens
caacaatattacaggggcttgaacaacactacgaagagtatttggattgcgtgaccctatgaccaaaactattccattgaccttaatttcttgggaaacttctagcttggaatagcttgtacacatatacatatgatcaaatactcctgcccatgatccattcccttttgttattgttgttgttgttgctgttgttgttaattttgttaagaatttcaatatcaagactgactggcaccaacactttggtattcaatttgattctatgactgaagtactggaatttattatgtggctaaagtgctctatttattaagaactatatttaataccaccaacaaatataggggttaaggaaaaaaaacgtgagctacatgtgtaagaaggccctgcatgtgtatgagtcctattctgggcaaatagattcttaaagtggctttcaacttcaagatgaaggagcttaataatggttactcattttatcaggggaatttcagggaacgtaggcgtcaaagagccagttatctttagcagatattaaaaattgaaaactttggagaactcatttcaagttatgattcagtgcattttcaacattgatttttgatagactgaagtgccagatcaaaattgttacccatttgaaagaatattagttgtatataaaattagattagaaagactttctaaatctctatctctttatatatgtcctattcattcacaatggattatacaaaaaaaagtgtattgcaagtgaaataatattgatttctgccctcagcttcaaataaagtaaattgaaatgggaacaatatcaatatggtgtcttgatatatttataaatatgtgattatcatttatttttaaaataatttatcaaaaaacaagtctttagtgttcaaatacttcaaatcatatcctcagatatatttt

SEQ ID NO: 10697 - DNA, 251 bp, Homo sapiens
agactccactttagagatacaccaaagccaccgttgttacacaagttattaaactattataaaactctgctttgtccgacatttgcaaagaggtacacgaggaaatggaattggtatttcattttaattttcatgactactaactcacctgaacttgctattttaaacaaatagttctgtcgacacctaaaatataatctggcttcttgtgtctggactaagttaaaagaattaaaatactttgtaatgtc

SEQ ID NO: 10698 - DNA, 2796 bp, Homo sapiens
gccccaggacattctgagactccaaagtctttcttaaaatgtttagagcaagtatagctcttacctttattactgaatttgaatcttcttttatttctaggctgtacagtctgatgcatgatttttttataaatatttcatactcttgtgaatttggatctttttactttgagcatatattttagaatatgtgtatgttaaaggatctccacaatgtctgcagtgtgaaggcaggttcattgtggaatagtttaacagtcaggaaggctaaactggtcagtattaatgtgtagccctaccaaaaatagccagtagtatctgaaaatgaaaaataaatgaagtatctctaggaaacagtctggcttaactatttttgaaaatataactgtttcccctctctgctgctttagatgttgctttacatagaaccagaaaatggaatttctcagctaaagcatgtgtgcctgtttcatctaatcaagcagagctaaaatgttcataccgaataaatttatattaataaattactaaactaagagtatcaggttatttatatatttgcaagcaaaggacagtaagaagttgactggcaaaagagcagtgctgaaggaggagatccaggtttaaatctggcttattaactcaagccaattttaaggattttctgtatagattactcatgtcagaccaagaatttaaattattttgagagaggcatttaattctaataaaccagctgttataaaaattataaaatgatctctgtttttcctgtcagagatttaaaaaactgaaaaggtatacctcaacccaaaaataaaggtttgttttggtttgttatggcttccttttttaaaaaattaccctgtagtgccagtttattatgcaaagcagcttatattcctttgtttctgataaaatgaagactttaaatcagtcagtagtactttacctttcaaggcattagtaaattacttgcaaatagttttaaaaggaaaatacgacctttgttataggcagtcttctctttaagacaatacttttccacttgttttccttttccatattatatatgtgtattcatatagctgtatacatattcagttgatcattttataaacatatgaaggcataaagatatacagaagaaaaattattaaacaactcattttaagattcaaattaactaattcctgcatatatgacattccttacataagcgaacactaaacaaaaatggctagaaatgtctttttctttcttttctctctttgttgtttaaggtattaagcacgaattattacatgagactggcagatagctattaatcctcttacagatttgagaaagttgattctcaaatatttatgcaccttctccttcattgttttctttaaatctgtcctcttaaaaagcttcttaagagctcagttaatgcttttgacttaactaggagaaaaaggcatgataatacaggcaagatggcattgttagcaattctggtagtggtttggaatgaatcctaagaggcagggatcttaaggacaaggaagagaagagagagagggagggatctttgatctctttctctggtaatcttaatgcataattttactaatacatgttctcaattcattcatattattaagctcttcctgcagttgatatctgagcagagtaagatttgtatttccatttttacttttttgaaagagaatatatggacagattattagtacaatttgggcactgtggttttaagaatatctgagtaaaataacaatatgaaataataaacagaagctctaacgtcaggtaacaaatagacagcaagaaaggttttgcaccatcctcttacggcctagagagttgacaagttgcttgtagttttaaaaaaataataaagtatacccttctggtatatcatcaagagcttaagaatcttggctttcatatttaaaatgcttttggggagacatatattaaaattttagccaagatgatagacatgtctcaattatatatgtgtgtgtatgtttttaaagctaaaaacattacttttagatccctagaatgaaaatttttttctcatctatgcaattcccatatggtttttttttaaatcatattttattcattttctccctttagcaattttcattttatttctcataatttgaacagagacagttctcatacatgatcagatgctttttttttcttcttaccatcatttatgcatgacataggtaatgtgactaatttctccagttgattcaagaaactcattactttgcctcaaattatatgtaaaatatttgttttacttaggttacagttatcagaaaggtagtttttttcttctattaaaatataacattgtgaaagaaaataaaatttatgctattctttgctttgtttttataaatgaatttttcatagaatttacagtatattcaaaggaagaaagataaaattattggtcatcatttgtaccttagaagtacaagaatttaagtaaaagaaatgttcatttttgttttaaaatttgttttccatgtgaagtttttattgagccaactttcatacatatcttgctagcctaaagtctaaatatttgtgttggcatcagaaaaacaaatgaggcagaattgctatgtgtggttgatcttcagataaattgactgatcacagttatttttgtatcagtctatgttattaggaaaaattgtttagttgttttctcccctgattaatggtgatattcaagtatgatacaaaaagaattgtaccacc

SEQ ID NO: 10699 - DNA, 297 bp, Homo sapiens
taatatcaaaagcactttttctggaaacacatttatggcttttataatggctgaaataacgataaaaaaagactaattaaaatcatgttcacttaacattaaatacatgccagaagaaatcatgtttatttaaatattgaagggaaaaatacctaaaaatgtacaaaggttttatattgtcatagtggtttttattcctgctttgtttctggaaaggaaatcctgaattacttaagtactttgtgtttaatatatctgggtgatggatcacaacacatcaataaactgacttaccct

SEQ ID NO: 10700 - DNA, 987 bp, Homo sapiens
ctttaaatttttcagtgtgagcatacgaggctgatgactgccctgtgctggccaaaagatttttattttaaatgaatagtgagtcagatctattgcttctctgtattacccacatgacaactgtctataatgagtttactgcttgccagcttctagcttgagagaagggatattttaaatgagatcattaacgtgaaactattactagtatatgtttttggagatcagaattcttttccaaagatatatgtttttttcttttttaggaagatatgatcatgctgtacaacagggtagaaaatgataaaaatagactattgactgacccagctaagaatcgtgggctgagcagagttaaaccatgggacaaacccataacatgttcaccatagtttcacgtatgtgtatttttaaatttcatgcctttaatatttcaaatatgctcaaatttaaactgtcagaaacttctgtgcatgtatttatatttgccagagtataaacttttatactctgatttttatccttcaatgattgattatactaagaataaatggtcacatatcctaaaagcttcttcatgaaattattagcagaaaccatgtttgtaaccaaagcacatttgccaatgctaactggctgttgtaataataaacagataaggctgcatttgcttcatgccatgtgacctcacagtaaacatctctgcctttgcctgtgtgtgttctgggggaggggggacatggaaaaatattgtttggacattacttgggtgagtgcccatgaaaacatcagtgaacttgtaactattgttttgttttggatttaaggagatgttttagatcagtaacagctaataggaatatgcgagtaaattcagaattgaaacaatttctccttgttctacctatcaccacattttctcaaattgaactctttgttatatgtccatttctattcatgtaacttctttttcattaaacatggatc

SEQ ID NO: 10701 - DNA, 3313 bp, Homo sapiens
acttgcattcacttccttcaaaccatctaattttctcctgaagttttggcagcgtcttgaaagcctaatatgaccatctgttgctcaacaatactgtttttttcctttagtagtttaccataagggaatttcctttaagtcaaccatgatttctccttgatttctacaagagacaaagaaatgattttgcctcctggatatcagaaaaatccatgtgaaaatgtagtaaacctttaaaactcatgttttaaagaataataactctagtaataactcttcctgctattcagaataagtaggagaatgaaaactgcagcatatcagacagcaatttaacagcttgaaacatctacagatagttcctactaaaagaagtggcctgcagaagtttaataatttgacttttttctaatattttagtttgaaagaaaatttcttcccaagcaatgctaatagagttctattcttagaagcagggtgtcagctactgggaatatttttgtagagctgcattgtgaaaaaaagatggtcttacctgaatcttagggctttgttcttcggctcctaaaatcaggctttaagctacattgggaagatttagtaaataggcaagtggttggcctaagacgggggctgcttctcctcttcagtatggactctagaaagtctggctacatgaatagatttaagtgtcactttccctccctgccccccgcttcagtctctaccatatctggtcccatcatggacttcctatttcctggcatttttgtccctttggaagaagaaataggactcagaatacagtggcatgagtgattacactggcagcattatctcaggctccctagaatctggagagcttaccaacatgtaaagctgttcatttttccaccgtgggtcaccaatgccagaaaaccagacatcacggggaaagaatgttgcttactttttaccaggagtgcagttcatttttttcaccctgtttttgaagtcgtattattcacttgtaaaaatgattgtaacagataaaaaatgtatctgcagcaactctgcaggtttgtgaaataggatgaaactcaatctttttctattgtgggtttgcatttgaaaagcaggttgaatccttgctctcttctccaaatttggtgtggtataaagacacacaaatcattttaacttggacatttaaagatcagtcttagtgtttgttcagtcctgttacaaaatagataactgagcacctatcgcataacattttgcggtggcttttagccatgctggggttagatgtgtttgagagtcaaatgaaagctatggatcttctcagcaattaaaaaaaatgcatatattcacattcacagaaacattggcagaacccagttttaatggtacagaggagtagtttatagtgttgatttcaccaaaatcagagggctgaaagagacacttctatagactgcatcctgagcctagtgcagggcttgtctagctaatgtgggcagccaccacccactgtgtatgaacaagtctgaagcaagttggccttgcccttgagagtatatggggaccagtcttcatgtcttggagtaatttgtcaaatgttaccctttttgatcagggtgtagggggaggatattgctagtatattttcagtggtttgtatgttctctctgtcactgacttatttgtaagagaaaattagttggacttgtttattttctagtagcttttataagtacactcaagaatttgtcagggagaataattctgatagtgcatcccatactgcaaaagaatttgtgtgtgtgtgtgtgtgtgtgtgtgtgtgtgtgtatgtgtatgtatacatatatatctctccatataggtatttctttgatacttgtaattttaaatttcagcttcacgatataaaataatataagaacttctggtttacaaaatgtaaaatcttaagccaatggaacccttgatttcctacctcagtgtacacccaactattggttgtatcagtttgtgtatgtgcaaatgtcaaataatcttttgctttaattgctactgtacttgctttgaaagattacctactattttatgataaaatgtagttgtctccagagcttaaatataatttgtaaagcacttggtttaaatttctctctacctataaacagtttagcattaagggtttctattaatgacacagaattattggccaagtgtaatttcttaaaatttagcattactttaaatagccagcatgtaatacaagtaactacactacctcatatctacatgattttcaagttgtaatgcagatggacagataaaaaagattttacgtttgtcttttggccataagtgggaaagttttctgtatattgcatagcattacacatttatgcctattttaacattaacttctaaagaagttttttctaagaaaatgtttcaaggcaatattttttttgaggctgccgaagacaaatgacaggattatgagtatacagtgtatgccttttccttcatgcagaattttgaaatgttttcagtttgtatattgcatattcacatgatcattgttcactattttatgaactggccttctcaatgtttgatgattttttaaaagctgttatgttgaattcagtaaaataacattaccttattttttttcttattcaaattctggaactatagcaaataattcgttaaattgtcatattcaaaacaaatgtggatacagtcttggttctccatctgtaattttttttaacagtttgctatagcttactgcttaactaattttaaataaggaaataagtatgttagatgcagtagacgatacaggttgcatgtggacactcagtcacattaacaacttgggaaaaaaatggcaatgttacggtgaattctcaggtgaacttttttcagttataaaacatctattttgaatctgtaaatattttaaatgttttattaaggcatgtaataaactattctttgaaacttgttgggtagaatgaaaattaaagccataatggtagaagatggcatactgattataaaagaagcagaaaaacattgatttttttatatctttcataatataattttctaacaatgcaataaaaccactaaacttttgtgtccatattttactgagaccatgtttcattaaaagcatagtttcatagtatttaatttacatttctccctaatgttcttacccaaatgtacctgaactaaaaaatgttagatgttggtgataagttgacagttaaataaaattctctaaaattgcttctaattg

SEQ ID NO: 10702 - DNA, 343 bp, Homo sapiens
ctatagatggcagcacaccactacctacgatccgatcaccagcctgggtttgtaagtcagagctgttggtcaggagatggcagctaatgagtaatcagtccaaactgaatggcaaattaatgtcttcattaagtgaacaaaccagcttcctccataaacaaggtcagagtatttataacccagtgtatttcataaaagcaaaaacgcatctccatttacataactttactatggagctcatgatttatctgcacaaagcatatgcaaaatctcacttgtataccgtctttaataaggacccatgccattctgatgtaattattaataaagtcacacttgataa

SEQ ID NO: 10703 - DNA, 213 bp, Homo sapiens
tcatcttgttaaattgctgattttgttggctaatgccttcaatgcctctactcataacctttattgtcttcatcatgtacagaaagaattagcctcttattctataattatcaagttctcagtttgtctttgtccccaaatactggctggcaggcttcatctgaaaaactgtaattggagaactagctcaaaataaatcttgaaatacacatt

SEQ ID NO: 10704 - DNA, 38 bp, Homo sapiens
ccagcctttgggtctcgcctttttggatcatcttactg

SEQ ID NO: 10705 - DNA, 277 bp, Homo sapiens
ggacaccatgggagactctcaccctctatcctgtgacattgcaattcaccaattctgaagcccacatgctctgagcctttcccttgattgatgatatcctgcagtggaagtctaatatgatctgttgttgatctaccatctaacccaaaaataccctgagtttccatcatgaagtgggataaggtgaagttcacctgtcacttctccttttatcaggatgatggtgtcacagtgactcctttgatgactttcatgctgtagtttgtttctctgctga

SEQ ID NO: 10706 - DNA, 350 bp, Homo sapiens
acattcccttggatgtagtctgaggccccttaactcatctgttatcctgctagctgtagaaatgtatcctgataaacattaaacactgtaatcttaaaagtgtaattgtgtgactttttcagagttgctttaaagtacctgtagtgagaaactgatttatgatcacttggaagatttgtatagttttataaaactcagttaaaatgtctgtttcaatgacctgtattttgccagacttaaatcacagatgggtattaaacttgtcagaatttctttgtcattcaagcctgtgaataaaaaccctgtatggcacttattatgaggctattaaaagaatccaaattcaaact

SEQ ID NO: 10707 - DNA, 4879 bp, Homo sapiens
cttgggccagcggggtttggggtatctctagaaaacagcaactgaacagagctccacacatctgtcagggtgtgagcactccaaggcctcgcgtggagcatccttagtcccacctgtagctgaatccacagacccaaagcctgcacaacccaacctcgcttagggacccccagagatgctggaatcgctaggagggttggctccaggggcagccaattcctatcattcagatcttccttcctcccaagtactcaccaaccccttccacttcccacttcccccaggcttggggggaaaacagggcatgagccttctggggcactcagattatggactgttaccagatctttcttcacgctgtgctacatgtgtgcctctcacagcagttggccacagttacagggagagaacaatatcacagtcattcatccaggccacgtttcctctgcggagtgtagcagccctgcctttcatagcagggattacctgaaggccagcaggagccgggggcaggcccaggatcctcagaggaagatggagaggagcttcggaccaagatcaaaccaaacagtggggaccccaacagaagagaaagactgaaggagacactcatttcccaagcaagattttgatagatttttgttgttgttgttgttgaaacatgctaatgattgaattatcttttccaaagattttttttaaatgtgatgtcggtaaattgaaataacataattttttaaaacttggatggagagatgagaagcaattccaccaaactcatgttttcacaggagggttcagtgtggagagcaaaaaagctgactgtggtgatttgctgagtgctgtggcccacaggcagggcaagtctcggtggccctgtgttcatcctgttgtttaaggcatagccctgatccttctggaaggcatagaacacggttacagctggttctgtagaaagagggaaaagatgattgtgacaattcagagcataactcagatggcgagaaggcagcattatctctgtgcgatgctgatttcaagctgcccacagaactggtgcggctcagagctcggcgagtttgctgggagctgggagcaggcttgcctggcagagaacctgttcagatacaggccagtttcttcttcgaggaaagccaagctcctcaaacagggttcagtccacgttgtgttttcacacctttctccaaggatcgaaccaaagatgtgtctccagtattgtgtctgtgcccctgtgtgtgttttgtggacagccgtgttgtctgactgtatccagctggcacttgacagggtgcagtcattggtgagaagaatcagaaaaagaagacccatcagcacaggttggataggggttagtgtaggagaccagttacagaatggcctggagtcttcaacttttgaccggtgcaggtgtgaccagagaccacctctgtggccacctcagatagtcatctcagtccaaggatcccaaaacacaaatctagaattgcaaagccagcctttatttccctggcaggcagccttgccagaaggcagagaggcagttctgaatcattctctcattcaccagtggtgacatccttcagtccctcacatctctgacagagcgggacagaatggatatttggctgaccttggtgagacctggagctgcctgtttcttccctaggggatcaccacggctctagggcattctaggatgaggtcagaccccttggccattggtgttattttttgtatagcttcagactgggttccagaacttaccattgaaaacagagcttttaggccaggtgtggtggctcacacctgtaatcccagcactttgggaggccgaggcaggtggatcgcttgagctcaggagttcgagagcagcctgggcaacatggtgaaagcccgtctctaccgaaaaatacaaaaaaaaatagctgggtgtggtggtacgtgcctgtagtcccagctacttcggggactgaggtgggaggatcacttgaacctaggaggtcgaggctgcagtgagccaagatcatgctactgcactccagcttaggtggcaaagtgagaccctgtctccaaaaaaagaaaatagagctttataagcagagagaagaaaataatcatctaagaccatctctccattcgacatgaagtgtaccttttctaaagacggtttccagctgcaacggctccactttgcaggcttgcagggtgtatacctgcgcattgggaacttgctggaacccctgatgcattttccttgagagcaggggtacttccgccttgccgttagcttgtggagaacgtgcttcttattcctggcaggcttcaagaacagctgcacatgtgccgctaactgaccgcgttgccattggcgacctggactctgaactcaggtttattctaaacccagtgagaggtgagggggagtgatgaaaggggatcagctgtatttgtgtgtgtgtgtgtgtgtgagcacctgacaaatctatgaaaccgagtgaaaggagaaatgttagattctttattattttattatatttatatggaaagctcgactctccctttggtaagtccgaagcatgttgtctgttcgaccgtgactgtcttcctcagtctgtgcctgtgattccagtcaccctgtagttactgacagaaattgactggactgtcattgtgtgaagtctaggaggaaatgtccattttaattgtatgatttggtcataagtaaggactatatttatgtcaccattattagatatatgtacttttgtaatgactgtgaaatacacttttccctcactacgactgcttctttatttgctgataaatcttaaaacaactaagtacgttgcaaataatagtacaggtaccatcttttatgtgaagttctttttctttttttgagacagggtcttgctctgtcacccaggctggagtgcagtggcacaatcacagttcactgcagcctcaacctctccagattcaagtgatcctcccatctcagcctcccaagtagctgggactacagttgtgcaccacaatgcctagctaattttttttgtattttgtagaaatggggtttcgccatgttgctcaggctgatctcaaactcctgggctccaacgatctgcccaccttggcctcccaaagtgctgagattacaggcgtgagccactgtgcctggccttatgtaaagctcttgacctagcatctgactggaaacaagcgggaattgcattggggggcattttctgggccagtttccctgccttattttacctgcaataggtgtgcctacaaaagtctttctgacatacacactgcaggtggcagttcaagaagaatcaacctttttcatttggggatattaggatcttccttggagactctgaaaatggcacacaaagaatggcagttatgaacgtgacttctagattttgtccttgtaggaggccttggtcatggataggggaagagggatgatgggatggaatgggagggtgggatctagatgacctcttgaaattgtcccagttactgcttccttcataactgttcacaaaacgtttttcatatataccaccttgtttcccctgggaagtgaggggacgaagccttagagggtgacatagctagaaagtggagaagctcactgttcactgtgcaaagccccagtagtcggattccggggaaaagaacaagtatctagttttgatgacaatgttttcttgtaagaatcccaacactttagaatagaaaaggacctaagattctctggctcagccccagcctttctgaagaagggaaaactagggacccagatggtttaaggacaccccagagtccccagatgagctggcatttgagctggtctggagcagagtttctccctcaaagaacacagagaaatcagagagtggctgccatggtcagagggggatgtcaacaacagatcaagccgtcatcacaacaggtatttctgaagttcctgcagggactaggtcttgcatttttaagtccttttcaaaactgtgcagcttcctgaaccttatgctgtttgtcccatccactcttgaagctggggaaagacagctttctttgggaactctgtctttctcagttgacttcccaagtaagcagcaaacccctggatagccttgttatctactttaggtattaagaggctattgggttttactagattaaatcaataaaacatttcctatagagccatatcatacactgaagcaaattcagaaagaatgcaaaactgctatcttttgggggagtctggaagcctgttggttagtgtatttattttctttgtggggtcttctgtgagctacaggcacagtaagaataattcagagcggtactgggagttggttcaatttcatgtcatcacttttcaatgaagggagtgcatttcctgagtagtaaatgagtatattatttgtggcagcttttctgttaagggagctttccagacatctggttgcaaagacaaataggatatatatttgtacttcttctctgtggacatgtttttgtgacacacagttatctctaggagttgacgtctgtgggcactaagggactgaggttgggggagaaagctgaggaggctttggaagagaaggtgaggagcatttcaggatttgcagtccccctccacatgtatccacatctgagctggtggtgttccaataatgaggcatttggggcaaccaattttggaaggatagaatagctttatgtggagcaaacttgaggatcaattggagttgagtggtttaaaacttaaagatggcacaggaagctgtatcatttacaggtgaaaaaaataaatgggtctgacttc

SEQ ID NO: 10708 - DNA, 290 bp, Homo sapiens
tgtcagtaaatcgtggccatagctgagtgaactggtgaaatcaagccaacctggacacatacgttcctcgttcttcttagaggccatttgcatgtagcagaaagggcacctaggtcaagtgcaactagagcaggagcatcctatgcctttgacaaagattgcagtggcccctcgagtgcagaggtcatcccaggtgttgctgagtttattgagcacacctagcctgcttgcttactgcttatatttgctcagggaagagtaggaaaataaaatatatgcaaatcaagagg

SEQ ID NO: 10709 - DNA, 128 bp, Homo sapiens
cgaggcactggatgggcctcatggcctagaagtccccacattccttgcaactctgatgctgggcacctacaggcccgagtttatcatttactgggcagttcaataaagtcctctcaacttttcttgtc

SEQ ID NO: 10710 - DNA, 537 bp, Homo sapiens
gtagttcttgacccgaggtcgccctgaaggtgtcgcatgaagagcttgcttcacacacaacaggattcgatactttgccaattcaaggccctggtggctggccgggaaggtggattcgccttggctaggtgccaggcaggtccgcctgtgcgggtgcccctgacttcgacccctagcttatgtcacagcccgaaccagatcgactggtctggtagcagcctgtcactccagactgtcctccaccccagacttccgcaaactgatgggctctttgcgccgtgcagggtgggaggagaagaccaaacgaagtaacgtctgtaaaaccccttcctggacagcgtaaggcctccacatctaagttcctgtcattaaaatggagacagcaaagccgaccctatccagtccttgggactgttatgaacagaaaatgatgcaatgtatgaaaaactgctttgaggagaaaaacaacacagtgtgtttttggaagatgtgattgatttgtaaaccgcattaaatgctctgaaataaaatgaaagt

SEQ ID NO: 10711 - DNA, 197 bp, Homo sapiens
aaaccacatgcatcttgatgcgatcgcactttctgaagaaggaaggatcccaaatgcccctccagttctggttcacctgtaccttctatgaaggagaattcgtcatgtcattcaacactcgtgaggccaggaagctattaaagggatgtttcaagctgtttctagcacattccaaaataaatgaggagggaagagtc

SEQ ID NO: 10712 - DNA, 1358 bp, Homo sapiens
gccgactggcgccggcgcgttctggcgacaggggagccaggggccgcggggaagcgaggactggcctgcgctgggctcgggagctctgtcgcgaggaggggcgcaggaccatggactgggggtggggcatggtggggattccagcatctgcgaacccaagcaatgggggcgcccacagagcagtggggagtgaggggatgttctctccgggacctgatcgagcgctgtctggctttaacctgagctggtccagtagacatcgttttatgaaaaggtaccgctgtgtgcattcctcactagaactcatccgacccccgacccccacctccgggaaaagattctaaaaacttctttccctgagagcgtggcctgacttgcagactcggcttgggcagcacttcggggggggagggggtgttatgggagggggacacattggggccttgctcctcttcctcctttcttggcgggtgggagactccgggtagccgcactgcagaagcaacagcccgaccgcgccctccagggtcgtccctggcccaaggccaggggccacaagttagttggaagccggcgttcggtatcagaagcgctgatggtcatatccaatctcaatatctgggtcaatccacaccctcttagaactgtggccgttcctccctgtctctcgttgatttgggagaatatggttttctaataaatctgtggatgttccttcttcaacagtatgagcaagtttatagacattcagagtagaaccacttgtggattggaataacccaaaactgccgatttcaggggcgggtgcattgtagttattattttaaaatagaaactaccccaccgactcatctttccttctctaagcacaaagtgatttggttattttggtacctgagaacgtaacagaattaaaaggcagttgctgtggaaacagtttgggttatttgggggttctgttggctttttaaaattttcttttttggatgtgtaaatttatcaatgatgaggtaagtgcgcaatgctaagctgtttgctcacgtgactgccagccccatcggagtctaagccggctttcctctattttggtttatttttgccacgtttaacacaaatggtaaactcctccacgtgcttcctgcgttccgtgcaagccgcctcggcgctgcctgcgttgcaaactgggctttgtagcgtctgccgtgtaacacccttcctctgatcgcaccgcccctcgcagagagtgtatcatctgttttatttttgtaaaaacaaagtgctaaataatatttattacttgtttggttgcaaaaacggaataaatgactgagtgttgagattttaaataaaatttaaag

SEQ ID NO: 10713 - DNA, 1357 bp, Homo sapiens
gggcgggcctgggcctggggcgcgacctcggcccggcctcccttcgctcagcttctccgcgcccctgctccctgcgtctgggagagcgaggccgagcaaggaaagcatttcgaaccttccagtccagaggaagggactgtcgggcacccccttccccgcccccacccctgggacgttaaagtgaccagagcggatgttcgatggcgcctcggggcagtttggggttctgggtcggttccagcggctttaggcagaaagtgctcgctctcacccagcacatctctctccttgtccctggagttgcgcgcttcgcggggccgatgtagaacttagggcgccttgccgtggttggcgcgccccgggtgcagcgagaggccatccccgagcgctacctccccggagcggagcacgccggctcccagtactaggggctgcgctcgagcagtggcgggggcggaggggtggttcttttccttctcctccgccagaggccacgggcgcccttgttcccgccggccaggtcctatcaaaggaggctgccggaactcaagaggcagaaaaagaccagttaggcggtgcagacggtctgggacgtggcagacggacggaccctcggcggacaggtggtcggcgtcggggtgcggtgggtaggggcgaggacaacgcagggtgcgctgggttgggacgtgggtccacttttgtagaccagctgtttggagagctgtatttaagactcgcgtatccagtgttttgtcgcagagagttttcgctcttaaatcctgggggtttcttagaaagcaacttagaactcgagattcacctttcgtttccctttccccaaaagtagcgtaaccaacatttaagcttgcttaaaaacgaaaaccaaccgccttgcatccagtgttcccgatttactaaaataggtaaccaggcgtctcacagtcgccgtcctgtcaagagcgctaatgaacgttctcattaacacgcaggagtaccgggagccctgaaccgcccgctgctcggcggatcccagctgcggtggcgacggcgggaaggcgctttccgctgttcctcagcgggccgggcccttgaccagcgcggcccgcaggtcttccttctcgccgtcttgcagttgaagagctacatacgtagtcagtttcgatttgttacagacgttaacaaattcctttacccaaggttatgctatgacctttccgcagtttactttgattttctatgtttaaggttttggttgttggtagtagccgaatttaactggcactttattttacttctaaccttgtttcctgacggtgtacagaatcaacaaaataaaacatttaaagtctgatttttt

SEQ ID NO: 10714 - DNA, 1013 bp, Homo sapiens
ctccaaaactattgaatgaacttggacagacaagcacctacagggttctttgtctctgcatcctaacttgctgccttatcgtctgcaagtgttctccaagggaaggaggaggaaactgtggtgttcctttcttccaggtgacatcacctatgcacattcccagtatggggaccatagtatcattcagtgcattgtttacatattcaaagtggtgcactttgaaggaagcacatgtgcacctttcctttacactaatgcacttaggatgtttctgcatcatgtctaccagggagcagggttccccacagtttcagaggtggtccaggaccctatgatatttctcttctttcgttcttttttttttttttttttgagacagagtctcgttctgtcgcccaagctggagcgcaatggtgtgatcttggctcactgcaacatccgcctcccaggttcaagtgattctcctgcctcagcctccctcgcaagtagctgggattacaggcgcctgccaccatgcctagcaaatttttgtatttttagtagagacaggattttaccatgttggccaggctggtctcaaactcctgacctcaagtgatctgccctcctcagcctcgtaaagtgctgggattacaggggtgagccgctgtgcctggctggccctgtgatatttctgtgaaataaattgggccagggtgggagcagggaaagaaaaggaaaatagtagcaagagctgcaaagcaggcaggaagggaggaggagagccaggtgagcagtggagagaaggggggccctgcacaaggaaacagggaagagccatcgaagtttcagtcggtgagccttgggcacctcacccatgtcacatcctgtctcctgcaattggaattccaccttgtccagccctccccagttaaagtggggaagacagactttaggatcacgtgtgtgactaatacagaaaggaaacatggcgtcggggagagggataaaacctgaatgccatattttaagtt

SEQ ID NO: 10715 - DNA, 40 bp, Homo sapiens
gttttattatgtagaaaataaagagcaaacagtacagctg

SEQ ID NO: 10716 - DNA, 858 bp, Homo sapiens
gctctgagaaggaaacacactcggctgggcacagtgacgtactccatctcacatctgcctcagtgagggatcagggcagcaaacaagggccaagaccatctgagccagccccacatctagaactcccagaccctggacttagccaccagagagctacattttaaaggctgtcttggcaaaaatactccatttgggaactcactgccttataaaggctttcatgatgttttcagaagttggccactgagagtgtaattttcagccttttatatcactaaaataagatcatgttttaattgtgagaaacagggccgagcacagtggctcacgcctgtaataccagcaccttagaggtcgaggcaggcggatcacttgaggtcaggagttcaagaccagcctggccaatatggtgaaacccagtctctactaaaaatacaaaaattagctaggcatgatggcgcatgcctataatcccagctactcgagtgcctgaggcaggagaattgcatgaacccgggaggaggaggaggaggttgcagtgagccgagatagcggcactgcactccagcctgggtgacaaagtgagactccatctcaaaaaaaaaaaaaaaaaaaattgtgagaaacagaaatacttaaaatgaggaataagaatggagatgttacatctggtagatgtaacattctaccagattatggatggactgatctgaaaatcgacctcaactcaagggtggtcagctcaatgctacacagagcacggacttttggattctttgcagtactttgaatttatttttctacctatatatgttttatatgctgctggtgctccattaaagttttactctgtgttgc

SEQ ID NO: 10717 - DNA, 4271 bp, Homo sapiens
ccagaaatgaactgtgtcaagtataaggtttttcagcaggagttacactgggagcctgaggtcctcaccttcctctcagtaactacagagaggacgtttccctgtttagggaaagaaaaaacatcttcagatcataggtcctaaaaatacgggcaagctcttaactatttaaaaatgaaattacaggcccgggcacggtggctcacacctgtaatcccagcactttgggaggctgaggcaggcagatcatgaggtcaagagatcgagaccagcctggccaacgtggtgaaaccccatctctactaaaaatacaaaaattagccgggtgtggtggcgcgcgcctgttgtcttagctactcaggaggctgaggcaggagaatcgcttgaaaacaggaggtggaggttgcagtgagccgagatcacgccactgcactccagcctggtgacagcgtgagactctttaaaaaaagaaattaaaagagttgagacaaacgtttcctacattcttttccatgtgtaaaatcatgaaaaagcctgtcaccggacttgcattggatgagatgagtcagaccaaaacagtggccacccgtcttcctcctgtgagcctaagtgcagccgtgctagctgcgcaccgtggctaaggatgacgtctgtgttcctgtccatcactgatgctgctggctactgcatgtgccacacctgtctgttcgccattcctaacattctgtttcattcttcctcgggagatatttcaaacatttggtcttttcttttaacactgagggtaggcccttaggaaatttatttaggaaagtctgaacacgttatcacttggttttctggaaagtagcttaccctagaaaacagctgcaaatgccagaaagatgatccctaaaaatgttgagggacttctgttcattcatcccgagaacattggcttccacatcacagtatctacccttacatggtttaggattaaagccaggcaatcttttactatgcattaagacctctgattcaaaacttattagaacagtagcttctgctggaatttgcaatcactgaagtcatagaaaataggtaactatctaattagagaaataattgttgtattttaagatctgagagtgtgtacaagttttagtatacatgccatgccagaagatagtgtatgcaagaagtcttgggaccagaaaatggcaatgataggagactgacatagaagaagaatgcttccctaggaaaaaggtcgctggctttggtgcaagaggaagaagaatgttccactggaagcctgagcacctaatcagctctcagtgatcaacccactcttgttatgggtggtctctgtcactttgaatgccaggctggcttctcgtctagcagtattcagataccccttctgctcagcctgcttggcgttaaaatacaaatcattgaactgagggggaaaaatgtaactaggaagaaaaacccaatttaagaaattacataatgctttccaaaggcacctacaacttagttttaaattacttgctactggggattacccatggatatccttaataggcaggaagtctgggaattctggtggcctctagggcagtgttctcacagcaccgttccgacagggaccagtgaaagaaaagagacaaagttagaacgtgctggggagcggccatttctaaggccagtctggtttaagtagtcatttctgctgaaaaaacagatgatcctggtggaagaaaaggttgaaggcagctgccctcgggagggctgtgatgctcggcacatcctgcctggcacatacacgtgtctgcaggccacaccgtgcatgtccccagacctgccgcctggcttctggagtgcttcaagcagagcatggtgggtcattgaggagacccaggaatctcatctgagaacccactctctgccggagaaccccatggtgacacattttcatctttctgaccagaggctgtttttttttttttttgagacagtctcattctgttgcccaggctggagtgcagtggcttgatctcggctcactgcaacctcgcctcccgggttcaagcaattctctgccgcagcctccagagtagctgggataacaggtgcccaccaccacaccccactaatttttgtatttgtatttttagtagagatggggtttcaccatgttggtcaggctggtcttggactcctgacctcatgctccacccgcttcggcctcccaaagttctgggattacaggtgtgagccaccgtgcacggccggcctgacctttggaaaagccttgtcactttggacgtttgcgtctttgaagaggcgatgggagcatatcatgactgcctgccaccattgcttttcagactaccacaactcaatcatgctgtccaggacttctggccctgtgttcaccactgggaaaacgtacttcagactggatagcctaaaaaggagcaatgcccttgtaggatgtggagaagggaaaatacggacattaacattaaaagacaccagtgaaattgttaggtctctaggaagttggagcacaaggcttcacgctttaagaccatctgtggttttcagtgaacaagcgctgagcaccagcagcagaaaacaacaacaaaaaaacacctcgtttttaccttgtcttctagacatgaaaaggcagttgcattccactctgcattatgttctacatgttgctttatcagtatatgcttagctgtaagtgacaagtattttttctgaacagaagtttacttagaaataccatgcacttgggggtaccaattaaccgcctgaaaattagcatattgatagttcttagagagaccagatataatctaagaatttatatgaaagatttgtatcattagagccagaaataattttatattaatatataatacagattaacattatatataatatgtacctgtgtcacttctgacatgagcctgtaaacatatattcatatatgtacctgcacatgtacccacctgatgtaggtcttattcctttagtatggacttaaagtacttattcatataccttgtaactaaaaattagaacagctccctagaattgtgaacttttaagagtctgactagaaatttgcaacttataaaaaagttacttttaaaaatataagttagggctaggcacagtggctcatgcctataatctcagcacttttgggaggccaagacaggaggatcacttcaggccaggagttcaagatcaaccaacctgggtaacatggccagaccccatctctatttatatatatatatataaaacttagagtttttatcttcccctaaaagaggccgtgatatttgcagcagcctcaaattgctcttaaggggtttaggtgtgcagaagctttcctttccctacccagtaaccatgtgactactaacgtggtatattgatttattttgtttgctgtctgtctcccctgccccactgctggaacagaggctccaagaaaacagggaccttattattcattactgcatccccagtaatgaaagtacttagaaaataattattgaatgaatgaaatctaaactgtgaacctgagggtgtttgtggcagtgtttgttttactgaattgtagaaggacataaccgtgttttcagtgtttctatggaacaaacttgtacattttatttcacttgtgttttgtcttaaaccctactgctggaaacaattttatgtaataagcaatgggcccaaaagtctaggagtttttttgtacttagtgaatttgtatgcaacagagatgctgcagctgatgcctttaaaaggtattcatcatggaagagctgaggcctgtgcttggtgttccagagcccagggttgagcatcctgaaggagccactgcagccgtcactgtccccagagcctgtggagatagagcctgtttgctgctttttcttcccgctcttaagacatggctggagctcagtcttcattgaatgaagtttgctgtggtattgcatagccttgctttcttgaactaaactgtttgcccttcacaagtagttcttctttcaggattagttcgttccaaggaggctcttcagtctcacagataagtagatctctcctgctgtctggacacatttcactcggaaattgaatacaatttgtattcaggctgggaacctgaacacacacttgtgtttttaagcttcccttttttacagtggacaaggacacaaataataaataaatcatccctaatgcccaag

SEQ ID NO: 10718 - DNA, 557 bp, Homo sapiens
accaaagcatgggcctagcccactggctccctggaagagatcaagccatcggagctgctagagttctgtctggactttccagagaccagtattcccttttgctgcctctaaaaggcctgtccctgcagacatgagagacagcaggtctcatgggggtgacaagctttttttttttttcttaaagaattttcaaaatcaaattccagaatgattttacggagatatcccaggaaaattaaggcttctcttaaacactaaaaaggcatgtaattgcttgttagcaaaatggatatgacacatctctgatacttttttcattattggttgggctgagcagtcagaagacctggtcgtcgtcttgactttggcaaatgagccggagccccttgggcaggtcacacaacctgtcccagcgagggacaccgagtggcccttcatgtacatccatggtgtgctggcttaaaatgtaattaatcttgtaaatatactcctagtaatttaagattttgtttttaaactggaaataaaagattgtatagtgcatgttttttaaagtc

SEQ ID NO: 10719 - DNA, 1082 bp, Homo sapiens
taaatggaagcgcttaccagcccagctttgccagccctaataagaagcatgctaaagccacagcagctactgtggttcttcaagcaatgggccttgtaccaaaggacctcatggctaatgccacttgcttcaggagtgcctcacgtagatagattgaggttttataataatcatttcagaattttactctgcatcacaatgtatttcctctttaatgttgtaaatatttggcaatttaagacattgtgtaaaaagcaatctgtaaaaacatctccaggctttgatttttgtaccatggaaattgtatttaaccatacagggttttggtatgtttatattgtttaccttagtgatgtatttgtttaagtggctaacatccaaacgactgtttgaaggcatcagagtaatcttcagtgtggaatgttaaataacgcttttatactgtattttgtactatgatgtaactccccttccttatggctaggctactgtaacacttgcctgtaatcagtgaagggctgtgcaccttgtactatttcacaatgggttctgctggacagataatgggccagtgttattgaggtgatcaagatctgttccacagggctaatgccaccatctcccctcaaaattttgtagaggttctaaaaagaaagtggtatgttgtgtgatgatcagcactaagtcctgcattcctgttaaagccacttgggtcataagaagggagtaaaaaatgaagtctgactagaattctattgcagaggccagtacatttagtatggcattgagttgtgatatagttttactttgatgtgcattttgaatttcagctacacctagatagacgtaaaatgataattaaaatgctgtaaccaacttatctaataaaattggcaaccagccactattttgttgactatgagaaagttaaaagtttatgttaatttttagggtctgatagaatatttcatgtgtattacagtggtattcatatgctatgtctctaaactttattttcaaaagcttaaggcccaaatacaaacttctctggaataaacgtggtgttttattttctgggttat

SEQ ID NO: 10720 - DNA, 534 bp, Homo sapiens
caaatttatcgggtggagggattgatcggagagggcagatcctcaggttcaacacaagaactggattggaaaaggtcattgtaggttgatgtgagcatcttgggtacatagcccattgcccttaatgatggtttcttactgtttctctgggttgtttgtcagatagcctttaattttaattatttttccttccctttgctaccttggcccttttaaattcttgtgtttaacctaatgctcagccttggtactccattcccttctccttcccctctttgctactattaaaagtcggagaagtggaattcaaacgttgaaatttccacggggctatagttgtatcttaataatgccaagtgtcaaaacaaccccattaaaatgccgcctgattaaataatgtgctgctaaatatagtgcacatgaaaacagcaagactgtatatatatgtaaatatatatatatatctgtatctttgtatgtatctctgtatctgtacctttgctgtatcttttaataaacagtttacttttattt

SEQ ID NO: 10721 - DNA, 1509 bp, Homo sapiens
atcatatgttgtccatccccccctcaggcttgaaagtcctcaaagagacccactatcccatatcactgcccagagggatgatgggagatgcagccttgatcatgtgacttccagcatgatcacctactgccttctgagtagaagaactcactgcagagcagtttacctcattttaccttagttgcatgtgatcgcaatgtttgagttattacttgcagagataggagcaaaaattacaaaaacacacagggtagtgggtccttttgtggctttcctagttactcaaattgactttcccccacctttgcacaggtgctttcaatagttttaaaattatttttaaatatatattttagctttttaataaacaaaataaataaatgacttctttgctattttggttttgcaaaaagacccactatcaaggaatgctgcatgtgctattaaaaattgttccaaatgtccataaatctgagacttgatgtattttttcattttgtccagtgttaccaactaaattgtgcagtttggggcttttcccccttaccatagaagtgcagaggagttcagtatctctgttttaaagacgtatagaatgagcccaattaaagcgaaggtgtttgtgcttgtttgtgtgtatcagctgtaccttgttgagcatgtaatacatcctgtacataagaaattagttctttccatggcaaagctattaccttgtacgatgctctaatcatattgcatttaattttattttgcacagtgaccttgtagccacatgagaaagcactctgtgtttttgttcggtctcagatttatctggttgagttggtgttttgtttggggtttttaattttgcgtgtttgcatagcataaaatcagtagacaacaccactgaggtcgttacgatcaacgatatccacagtctctttttagtctctgttacatgaagttttattccagttacttttcatggaatgacctattttgaacaagtaattttcttgacaagaaagaatgtatagaagtctccctgcaattaatttccaatgtttacattttttaactagactgtggaatttctacagattaatatgaaatggagctcatggtccgtttgtgtgttagatatgctgtagctgaagccctgtttgtcttttaaacactagttggaagctctcaataaaaatgcctgctgctcacagcacagaaaatggggcagggggagcctcaagcacaatctagctgtcctcctaaagactctgtaatgctcactcccctcgcgttctcccggcgctgtcgggaggctgtgctggtggtcgtgtagaggtccttctcctttcacatggtgcagagagcgaggacctctcctcctcgttcagttgcacttcagtattttcacggatatgaatgtaaaatatataaatatataaacctgcggctttaacaactgtaatacaaccttttgaattagttccgtgtatagataattaaattcttcatacaaaagtt

SEQ ID NO: 10722 - DNA, 1005 bp, Homo sapiens
gcagcgggctcagggtgtgctcagcagggtcccagcccacggccacacatgctgtctggaaattgtattccttttctaagaaaccaccatttggtattcagtcacagggatatgggatggcaaagacaggcccctcaaagctcctaggaatcattctcgacaatcctccctgccccgaaacaatttcctgtttcatgaaacaaagctgtgttttcctttgtcctcactacaggtctcattatggcttctagggtcgctgaaatcccatagccctcaacagggtgcagctgggagtctagccccttcccgggcttgagggatgggtctggttactataaaatagatttataaatgcaatgtctatatttttggagaactcatgtaaccctcctgtttcttacatccaccagtccccaagtagacttcttggcctacaatgcccagtccttggtgtgagtttagaaacaattatgacggtcctgtcattgcttcagaatcccatctctcctgcagggaaatgctgcctagagctgatcactcggtgagacggtctgatcaggccctggcttagctctttgaagagctggtctatggaagtttccagcatgtgcaccgttatagccgttccttccccctctaggccttgtattaatatatgtcaatgaaaacacactggtgtattgttgcgtggattcagttctgattcccagcatgcttagaatatggtcacagaaagtcattatctagaaagtcacccctctgctggatcagatcactacaggtcactggaaaggcaactttacaatgttgggtcactgggtctcggttggcagccatgttggaaaaatctcttttggctcggaggcctgtgatatttcatagcagcagtcgttgctggtgacctgttctgtgcttgaatgtgctgaatcctgattgttgtaggacatttcaacagctctttttggtacgttccccaaaaagccatgtcctagatccccaaggcgt

SEQ ID NO: 10723 - DNA, 428 bp, Homo sapiens
gaagattcgccagattttagccttatatgtaattccttcacatttgggcagcatggacgagaaggaagaatttgcaagtttggcctttatataagcatgtgttgcaggtgctgtttgatttttctaaggtatttttagcccttgatcccctttgcttgcgagaggtggggaactgctcactgacagcttctctgtaacctgcagtaccagtggatcgttcttgattttgttttcattagtgtcatttctttgtcattgaggacttttccccttacaacagtaacaccattttttgaagagcaaaacttataatacctcctgggattgtgagctagtcattcagcctgtgtaaccatgtggaaataaaaattgacgaccaatgtattatatggacaacttttgctttgagtaataaacttgattgtagg

SEQ ID NO: 10724 - DNA, 8907 bp, Homo sapiens
acttaaggatatggtgagacactaacttaagacaatactgactggtctttggggaaaaaagttatgtaactgtgcatctctcaggcattgtttacgctgtaggttttagccaaattttacttagcagaaaatcatctaattacaagactttattttcccagagatggattaaagtaaatcttcaacttaagtgaagccaaacctaacagactgaattgtgcaaatgtggttttaaattttgcataccaaagtaagaagagaccaattattctcacagagcacttagagcagaatatatgttaagttaccatgaattaaggtatactgtctgcactgccaagtcttggcagaccttaccctgaagtagaagatttgctcatttctaaagttttttttctgtctctgtaatccctcctaccattaagaaaaacttatttcttagacattgtacaatcagttatgtactgaaaatcgaatgtgcttgtgtgatacttgtttcaggacaagttcatttgccaggttcattttgttagcatgagcctacggattctgatttcccaaagaaagaatgttttcctgtaggtatttttgtaccaccagtatatggaatgttagggaaaaactttgttccagttcctttttttttttctttctactttcaagtttaagtgaaccatactgaaatgaccaacaagtctgcctgtaaagttacatgtcatgattgtgttgttaaatgattatgggggagaaaatgaagtaaatgttgctgatgatccccatatttattgatcatattaaggttgtttatatagtttggaaatgaccagccccctaagcagtgtttgattaacttatgctaatcagatgattactcatatattctgctaattttctagctttattcttgttatttggaaaaattattagccaaatgccttcctaggtggatccagttggaagatatgtccagaaacctgaagaaaaattgacgctgcctttgtgtgctggattgctctacttgattagatcatgatatatcaaggttgaatttttagagggaaaatttaattctgatatcttattgcatccttgataagtttttccctgattttttttttcctcaaaagactttccatctgtacacagcctctacatttttgttgtagtgacttagagcataaggatgtttcagtgcaaactggccgtcggtaacagaaaactcagtgcatactttgctgttgttaggttgtcaatatagtctttctgtaggatggatagcatgtttgagaggtgccaaacaagaacttttggggttagtagtgtgtcttgtggagggtattacaggactgtgtaattataggactctaacttgacatggcttggcacccacttgcagctagtgggtacagggtacaaaagatgttagagaaaagctctacagattacgtacttctgtgtcttcgtatgctcaacactgtcctttgtcctccatgaaagatgaaggaagcaaattatgtatgtactttctttgaccttctttaatctctgatactttttagattgcatgattttactaggcttgtatttagggaaattactttcataaatacttttgtagattttgaatcaaaactcagtctttttaatttttttgtagtctataaactagtttcattatgatggacttgattagtccaaagttaattttagaaattgtcaggtagcatagtgtcttcccatgatcaggaggctttctgaaggactgagtctgtaaatgaaaaaataatttatgtatgaatagcatgtatttctgaagagcttagagtgccttgtagaatttttttctcaattttattcttgaggtttataatttgggggccaaatagatagagctcatcattttcttgtttggaagttgaggctgcgacatgtccaaggttatgaagtctcttttgggaagaacagaaaccaggtctccaaatctggactcatggtttgttcagatgtgtctggacaaatggttgtcaatgttttgtcctgttttttcaaaggaactgttcttcctttgggacaaccttttggtgtttgggaaagtaataagatcttggatttttcaaattaacattaagttgtaagaactaaaattttctttgaaccacattactgtgtaattcactgataattgacatattggctgggcagcctatctcttccatatccagcgtaaatgaataggaggtgtttgtgattttttttttctccctttatttaacattgagtcctagtagtttggagaattagggtccctctaccttctttctgctcttgtcttagtaagatacataaggtacatcatcttgtgtctgtgtgtatatagcagtaggtcaagtttagagtactaaagtctgtaaataaggaatgactattagcatattcattagaattgtttattcttgccagtataaacatcattttatttagactaaagtccctgaagcttgtctttcttattgcttcccagtaatagataatgtgctcgagtaagtttgtgaattgctgattgcaacttaattcagggaccagtcttcaatctatatttcattagaatgattgttcctggaatgatcatacatggactgtcttaagctagcaaaatgttcatactttacactgactaaatgggtcctaaatgatgacattggtctttagacattaacatgtgtatatttttatattagctcaagctaaggttcagaattgaagcttgatattgactagaatagctaaaagtcaaaatgaggtgaggacactggtcttggaaggtagagaaaaataaatgtcttaccaggtgttaatggtatccccagttcttagacttttgtcttctcaggcaattttcatctcaagatctgatgagaagggcatattacattggtatgcaggatgattattgcatattttgtgggacctctaatttccctggtcatctttcagaatattctgttctgccacccccagagagtaaacacttgagccgatttcttcttccccagctattctttcctgggggtaattatgctttgtctttagattagagaagcatcaagcaatagcaatggtgctgtgtccttcggcctaaattcaatagatctcatctcctagggcttccttttcacttggctcaaaggatccattgtattttggcacaaagagcctggccagggtcatgtagccatagctcttagggatgatacctcaagaaattagctgggacccatcactctgtgaaacttcacattttaagaactgagttgagggggttgttatgcacttctgtaacttgaggctaagcaaggggttaactcttgtgagagccaatagagtgtgtctgtattcgcagtccatggctcattttctttatagtaggcatatggatcttcccctctgactttgaatatcatttggtgtggcctgtgggttattttcattctttaccaccaaataaagcggcttattagctactcagttacttgctactcaaaggttaggtcttccctgttcctgcttggcagtgttaaagcttacagggttaacttatgatgattctcctggctcattttcatcagaggcatgatgactggaaagggatcacatgggtcgttggtggtgacacctcactgtttcctaggtttggatagagagatgtatacaagacctttcctgttaaattacgtgactacagagacttgccaggacaaaattttcctaagaaatcagaaaaatgattaagtgagataagtacctgggtgacacagatattagcccgttggtaaaagacaacaaatattagcttaaaatctgcatatgtagaatcattttcattagatttagagcttgaagcaccttggctctcagctactttaaactcctccccatataaatcagggcaccaataaataagtttcagctttttaaaccctggtttgatgttaagcattataaagtacgaagtttgttaccacagtagagataatttagtagaaaaatgctttgaggcttcagtatttgtaagattttgcattagccagatgctaggttgttgaaggcatttcagtgttgataatagcctgagcagacttctttacaaatgggatctgtttctatatgtgtatatgcccacttaccattcagagagactggtctttctctttgtcttccttcacattgctgtgtcagttctacacctagtcttttcagcacttagcaaattcaaattttgatttttttgtcagcttagttcactttaaggcatattggcatggtgtgtgaaagtgatgttttgccccagtattgaggacttttagatccaaataatgactcattaaatataattatgttttaagtatactgaatttctgttagcttaaaatgttaattctcaggaatgattttctcacactttgtgttggctaataataaaagcactgttttattctcaaaactcctttttcaaaaattagggagagagcagtagtgatcatttatgtgagcccctttgaaatgatggtgtcagagtgcagagaaacaatggagttttgatgccaaaaaggtttttttgcagtaaaagtaaaaatttggaattagttggcatatagaggaacccttttgtactggaacgtatgaggctggattgtgaaaaggtaatctttcgattgctagacttggttaacttagggctgcaaatctttttcttctgtcaaggtcacttaatatggaatgtttttgtcagactgtcctttgttggaatactttagctgttcagctactttgactcctaggagagaatttagttaaggttcaaagtaattaactggctttgccagtggtgagtcccacaccattattcacttagtagtcatataaatgtttttatttaaacttctctctcttcaatgctgagaataaggctttaaattactgattcacctttaaaggaatgttgtgagaattgatgtaatttctgtttctgtttccatctaaacttctttataaaaagagggattagtttttttgttttggggtaagcacctaatttatccagtaaccaacaaccctaaccattggcatatatagtctttcactcagaaataaacaaaaactgtttggtatatctgtatcattgctaatcttgtgcactttactttttgggcagtaccatacatagtctgaggctattgacttaaaccaataactgtactttatgtaatgactcttaaatttggttacctgggttcacagcttgcttgaagagaaaggatgctagaataaagtaagcagctgaagagcgagcaaatcaagacaaaacacagtggtctcagatttttcgtagtgtgggaacagtggttttgctctataccactgaaaagcactataacataattgttgtccatgatactgaagcttttcccctcacttctaggttgtttacattcagagctctatcaataagaggaatacatattacagtgaattcgacaaccgcacaagttggcagtaggtatccccaacctaatttatcttggtaaattcaccctgtttcctagtgctgctggataaaagagtgtttactttttattgctcttagacagagtagtctagataagttttcaatttatcaacatagcctagacttctgtaagtggaatgttcattagtaactcatctttttgttgttataattggaaacagaaacgaggcttattgctattgcagaaatcccaaactggcaaaggccagtatatatggtattccataatataaccagcttttgaaatttatgtgtttggattagtgccttctggttaccagtattgactctgctagtttgcacctttccgttcttaacagaaaatttgtatttgttattcctcttaaattttgtcgtaactagtgaaggaagtaaaaaaaaaaaaaaaacatgcattacattgacatactttatgtgcagcctttatttaggttcagtgaaaccaggtagttctgtatttgtgttgtagcctaaatgttgtttcttttatatccattaaaaacttaaagttacttatgttctgtgatcttaattttgttgtgtttccattgtaggttgataggtatatcgagaacaggtacgtgacaacagtttatattccatgatagaaagctaaagtccatagaaagcacaaaatcgtgttcacacattagtgtacccacacatagaaagcacaagactaatagtattctctgtatcccacaagtgccagtcataaaggccaccaggtatttgtctcagagttgctatgagcactacagtattgataagcccaagacaatgcggtatctaaactggtcctaatggtaagggacccaaaggaataatctcaataagtttgtaccacattgatggagggagagaatataaatgtcaagaatgccaaaattatatttgggggttactagctaaaatggggtttgagggctttttactgcaacttgaaactggagaaatagggacagatgtctaggtttttggtgggtggaacaggtgacatatttctgttttaagctgtagtgtgattggggttttttgtaaaaaatcttaaatcttttaggaaatattacctcttaacagtgcccccccaaacatgcagaaagtcatactttaacagggcaaatactacttgtctttgattttttttgtgtacgtttgtatgtgagagatgaagttacctttatttttttcctatacttgactgtgcttcattttaataaaggataatttgatctgagtgttctgagcatcagactaattctgaagcatatttgctagaggagctactttgcttttcacaatggggtggagaggattctttcacttgtcccattaaccctcttctagtctagatgagatgaaatctgttaatgtgtgtgtagaagaaaacgtatgttcttctactcagcattgcccttttccacctcctcacttcacctccgagtagcttgtttatcaagaatgaatgaatgtctttgtcttaaattttgcccatgtgttaaaagatgtaattctcagaatgggagagaaatgactacctttgttcctactcttttatataattatccttttagggaaagacttggtcaactctaatatatctagaaggaagactatatctggtgtagactaatatgagatgttttagaagagttaacctgaacactttgagggagagattattcttgccagcaaaaagctagccaggaatgagcctaccacattatttgagaatatcaaacctcaggcctggggggatgaggggaagaagattaccagaagtgcaggaaagagaagtttgaggaacacccttggcttagcaacatgtgataatgcaaagctgttataacctgttaatcctacgtactatgtgttctgtacctttacatgtttttaaatttaagatagtttgtaagaactgtacaaaaaaatgcttctggagatttctttggcagaaatgcctttcatctataatttcatggagaactgctttaattagcctaggtgaaaagtagtcctagcagtgtaaatatgtataattagagttttctaatttcactgtgagatctctaacttttgagtggcaaacagatcaagtcttttgctcatagacttttctgtggggttattaaaatgcaaaagctttattttttttaataatgccatactccattagtgtcagatgatggtatggaatttgttcccttgctttcccccactgttactgcttcagtttatagattgccagcagagttcagaaatagagcagggatttacccgttctttgcttggacatcccattttcttttgtccagacccatgttggcaatcatgtatgaactgtgttatacttctcagtgctttcttttttctttttgataagatggatatcaaaaatagttgctgtgcaaaagttagtagtcttcttcaagaagaaaaccaattctttttctaataatatcctgtgaaattgcttcattcattcatttatttttaagccaaatgtcagcagagtgctgctgcttttatctagtaattttgatatgtaagtattaatgcatttttaaaagatgtctacattgaaacatgttcttcccagtgtcctgcttatgatgctttgttcagattttttgtaagagaccagttagtacactgggggtgtatattgtgtacatgtgtcattttagttaggcattgtaggccaaatgtgattataaatgaagttgatgaacattaattttgttattagtgagttttttgaattgtaaatggatttccagtttaccttctgttgtctacagcttttttaattttaaggtttgactaattgtatccatctcattgtacagtgttttagttgcaagcagaaagtagaatttggtataaagcaggttatttctatattgaaaggagtacagttgaaattgtagatttaagattgttaaaatcatgacaattctaacttgtctattctaacctattgtgtacaatctgattttttaaaattgtaaacatgtatgatcttggtttcatgtgtttttgaaagtgttattgtttaaaaaatgaaaaaagcatatctgctaaagagctgtcagttttcattactgactctgtaaaatacactgttctttgtgtactgtgtgttattttgccagctgctgcattagccttcaaaagtatttggaaacttaagatgaactacatttcttgcaaagtacattcctttctgtggtattttgtcctgtaactgaagtatagtaattattttatggaaatgttagcaattctgtaccaactttgaataaaatgaaaaatttata

SEQ ID NO: 10725 - DNA, 291 bp, Homo sapiens
taagggagaaaggcaccaagctaacatctgacgtccagacatgaagagatgccagtgccacgaggcaaatccaaattgtctttgcttagaagaaagtgagttccttgctctctgttgagaattttcatggagattatgtggttggccaataaagatagatgacatttcaatctcagtgatttatgcttgcttgttggagcaatattttgtgctgaagacctcttttactttccgggcaagtgaatgtcattttaatcaatatcaatgatgaaaataaagccaaatttgaag

SEQ ID NO: 10726 - DNA, 526 bp, Homo sapiens
attctgccatgtaaatgtcagcttgagtggactccagctgagaagaaagagaagaaagacttaattattgaataatttgtcagaggataaactcccaacctagacctttcacttaaaatagtgtgaatttgtatatgtttttaaaagaaccagtactggccgggtatgctggcttttacctgaaatcccagcactttgggaggccgaggcgagtggatcgcctgagatcgggagtttgagaccagcctggccaacatggtaaaatcctgtctctactaaaaatataaaaattagccaggtgtagtggcgcgcgtctgtaatcccagctactcgggaggctgaggcaggagaattgcttgaatccgggaggtggaggttgcagtgagcctaggtcgtgccactgccctccagcctgggtgacagagcgactgcgtctccaaaaaaaaaaaggtaaaattaaaattaaaaaaaataataataaccagtattttgtttactaaaataaaatgcctttgtaaaaaaagga

SEQ ID NO: 10727 - DNA, 1739 bp, Homo sapiens
agctgggctgttttctgtcttatttctcagttgagtgagcaaggatacgaaaacagtgtgtttgaaaacaaattaggtttgggttcaattccttcaatttttaaaaaactggtctctgagagttttttaaatcattgagagcctgtttttcttctctaaaacattagtttaattttcttcaaaatgaaaatactgctttgtaattacaaaatgagacacacctatcttgatattttaaagcaatatcagagggtgtaaagaaggacattttaacaatcgccttcaattttactccacttaattaccgaaaacttactggagaacatgttccaaatcttcagtatcttgttctctctctctctctctctctctctctctatcacacacacacacacacacacacacacacacacacacaatttcattcatatatggtattgcattattttattttaaagcactggtgaggggacctcttggtgattcctggatgatcatacacagaggacttacaccatacaaaaatattgggcaccgcagtgccagagaagatgcttgaggttagattttaaggagtggggaattgtgaagcccacagatgcgcacgcaatgaccagcaggaaccggaagccctgggtcacccccactctgcctcatttctgcctccaggatgccactgcctctgcttccaggaaaggcaagggggagggtgcttatccgtgtctctggttccagcttcctgtctttgctccctcccctctcttagagactgtgccttcagcaggactcttaatatctgctgcaacttggagaacctccctgccctgaaatgtgaaccaagcacactttggttccttctccgggcggctctctctgagacccaaggctgcagtccctcagtgctggtggtatcgtgtggggatagcaatacttctctgcccttcattgtctcatctagacatcaagcagggaaaatccagggagattaaattcatggtgacaagtcctgggcagttctggtaaacggtccagttagggagggagtagaaactattgactcaaaagagtttctggctgatctgtggctttgcctccaccatccctaaccaacctctcatcacagctttgtgtgtgggctgagtgctggccttaaccctaggcgtggaagagaaaatgtgaggttgtttagatactcatcaggacctcacaggagctgagacttatcagccagaatgtgttcttcggacagtcgtacacatcttacagaaaaccctccttgtagagttggttgtggtatgtgtttgatgctataaagctcatttttaatgtgtacacctgctctagggacgattcgtttgaaagagagtaagatgcattaacagaaactatcctgggattaggtgaaaaatgtctagcaaaagaaacaaagtctttaatagagtggcctctttcgctcttcgattatgactgctgcagttttaccccagcagtcagctgtctttgtcaaccatacgtttttggagattgggtctagcacatgtcacccttgtccacgttgtttcacatctggttagggggcagattttaaaatgtagttttgtaatgttacatttaagcatgataaatgattagactaccagatgttactagtgctaactttgtattcttagacattaaaatgattgacataaactctttgtgccttgaaaatgaaacaaattataaaaatgtttaaatgg

SEQ ID NO: 10728 - DNA, 282 bp, Homo sapiens
gctgggctcacagctccatccatgggccccattttgtaccttgtcctgagttggtccaaagggcatttacaatgtcataaatatccttatataagaaaaaaaatgatctcttatcaattagcactcactaatgtactactaattgagcaacctacgcactcagttgactacgtaaatctgtcaggtcttttgtgatttcctctgatgcaggagaggaaaaattgtaattgatgaaaataatgaatgaaaatcaacagatgaataaatggttctttataagtg

SEQ ID NO: 10729 - DNA, 48 bp, Homo sapiens
acgtctgcttcggagcttgctgcttaataaatgttggtggaatgaatg

SEQ ID NO: 10730 - DNA, 702 bp, Homo sapiens
ccatgtgagagagaatatgtttaatccatgtattggtactttactgaaaaccaggttatattctaaagaagaaagaaggcaggatagtgcttttgaacaagcctatttccattttgaaagtagatttcaggctaggtgcggtggctcacacctgtaatctcagcactttgggaggccaaggcaggcagatcacttgaggtcaggagttcgagaccagcctgaccaacatggtgagaccctgtctctactaaaaatacaaaaattagctgggtgtggtggcggcgcctgtaatcccagctacttgggaggctaaggcatgagaattgcttgaacccaggaggtggaggctgcagtgagccgagatcacgacactgcactccagctgtgtgacagaatgagaccatctccaaaaaaaaaaaaaagtagatttcagataatttactgttcagcaacaggacacacctccctaaatgccttgtaatatatttgaatctgattctgcatttcttcctcaatttatgtaatgaaaataaaattaatatatcatctaacagtagcacaaaatttgtaatatgaagtaaagtatgaagataatgaagaagttgttttctttgttgaagcagttatatgggtctttctcagtatatttctcttttctctaaaagtttaaacttattaaaagaatgttatttttaacctttc

SEQ ID NO: 10731 - DNA, 1349 bp, Homo sapiens
agtatatgttatgtaagataaaatatttgctcaattcttttggttgtacagctttcaaaatataattaattttgttttatagatatgataggcaacagactgaaaaccataatctttactgtattctatgcattcaaatgtggtcacaaatattgtggacacattatcttatgttttgaaatacctgtgaattgttggcattgagcagctgaagctaactcatgactctgttttgaatgtaaatatttgtaattaagcctgcacatatttttttattgccctagagtactcaagtgtttttcaccaagagcttttcaggttgcccctaagctttgtgcaattttttctggttccccaaagtgtatttttctctaagtcgagggctatgccataatacaaatggaaatgttacctttgattttcttataaaggagtttaaataggatttttaaataatgtagtaacactcctgatacaactctggttataagtgaattgagcattaatgtttcttttgtataaattcctgtcctgaaatattttattcatgaaaataaggtaagcaaaaaccaactccattttgccaggattttgttgtgctgagattgccaatcacggttaaacacaaagtgtttttatagaatgaagaaacagtctttaacagaaaaaaggtattgaaatattaaatggccaccaagtttactttgaagcccatttttggctgtttagtcagcatgaagtgggcatgataattttttaatatttctttttgtgaaatttcctgtacagccttttgtaggattactacaggttaatgtgagttgaggaagacagtctttctcaaacaatactacataccttttattatattacaaacctaagtgttttatatcctagagtcaaggaacaaatttccttaggattatagtattacatgccataaaatactatgctttattggtcccatgttttgtgcaattttaaagagatggctttctattaagtataaactatgtatatataagaaccatattttccacaactaaaatgtgcattattttttccaaagttttatcattgctatttatttttacctttgtttttgaacattcaatccgttcattttgtatgtatgcttaatacgtgtcggtcatatacagtattgaatttttactgtatagtaattctggaaagagcaaataaatgaagattgtttttatttgcctgataaagtaattgaaagtgtatttttggtatgaagctggttttctgtcacaattgtaatttcccaaattttaaaatatcttataataaaataaaaatatatgatggctaactgttcaaatgct

SEQ ID NO: 10732 - DNA, 460 bp, Homo sapiens
tgggacctcggcttctgctcgaagcctaccaggctcccggtgtgtgcagggagacggtaaagctggaggtgcctgagaccagggcttccatggagcgggacacactgtaaatggatttctataacagaagtgacatgtgtactgatttttctccagaaatatggatgctgttgtattcagtatccatttttaacttgggacatgaacgttttaacgtagtaaatcctctttttgatgagtttctgaaactggagcggttcaacgttatccagtgtgaaaatcagtgagtcctccctggcatcctcgtgaaagtgcacacacttcatggagggactccttttcaataagaattaggaagatgagaaagtaatttgagattttactctgtcgaattttagagtatttgaagtgattgttagatttcacttctaaggagttgattgattaaactttggaaggt

SEQ ID NO: 10733 - DNA, 1825 bp, Homo sapiens
cccgctggccgcccgcgccaggagcctggacccggcctcccggggctgcggcgccaccgagcccggcaaatgcgcacgacctacattaatttatgcagagacagctgtttgaattggaccccgccgccgacttgcggatttccaccgcggaggccccgcgcgccggtgccgagggccgaggagcgcccgggtccgggcaggtgaccgcccgcctctgtcctgcgagggccggtgcgacccagttgctgggggcttggtttcctcaccttgaaatcgggcttcacgcgtcttgccttgtccccaacgttccacaacagtcccgctgggggattgaagcggtttcactccgcaaatatcctccactttcaggagggaaaacccaccctaccacagtccgctcttccaagtggacggcagacctgggaggggacgcctgtgtcacgagcccttttagatgcttaggtgaaggcagaagtgatgattgtaagtcccatgaatacacaactccactgtctttaaaagtcattcaagagtctcattatttttgtttttatttaaccctttcttcaatacaaaaagccaacaaaccaagactaagggggtgaccatgcaattccattttgtgtctgtgaacataggtgtgcttcccaaatacattaacaagctcttacttccccctaacccctatgaactcttgataacaccaagagtagcaccttcagaatatattgaataggcattaaatgcaaaaatatatatgtagccagacagtttatgagaatgaccctgtcaagcttcattattacgtggcaaaatccctctggcccacacagatctgtaattcactaggctcgtgtttgctacaaatagtgctaataaagttaaattgcacgtgcaatacggaacactgtcaatggactgcaccttgtgaaggaaaaacatgcttaagggggtgtaatgaaaatgatgtagacattttaagcattttctacacagcgagaaaacttcgtaagaacatgttacgtgtgcaacaggtaaacagaaatcctttcataaagcaccagcagtgtttaaaaaatgagcttccattaatttttactttttatgggttttgcttaaagatctcaacatggaaaaatcctgtcatggctctgaactgcacaatgcattgaaccgccgtccttcaattttcttcacactatcaacactgcagcattttgctgctttatcaaaatggtttattttaggaaactttttccacctttctgaatggaaagaggttttcacaaatgttttaaactcatcgttctaaaatcaagtgcacctacaccaactgctctcaaaatgtgaactgacttttttttttttttttttgccaaccctgtgtcacttagtgaggacctgacacaatccctacagggtgtctgtcagtgggcctcatggtaagagtcacaatttgcaaatttaggaccgtgggtcatgcagcgaaggggctggatggtaggaagggatgtgcccgcctctccacgcactcagctatacctcattcacagctccttgtgagtgtgtgcacaggaaataagccgagggtattatttttttatgttcatgagtcttgtaattaaaccgtgattcttgaaaggtgtaggtttgattactaggagataccaccgacatttttcaataaagtactgcaaaatgcttttgtgtctaccttgttattaacttttggggctgtatttagtaaaaataaatcaaggctatcggagcagttcaataacaaaggttactgttgagaaaaaagaccctatcatagatttacaag

SEQ ID NO: 10734 - DNA, 1039 bp, Homo sapiens
ggcttgctgtgctttcttgctctcaatgcaggtgctcctcgagagtgagaaatggcagtctgcctgcctcggggacactagtgacagtataaagggcaaaggaaaaccgagtatctggccttcacgtaaatcctggccacattcaccaaccaaagggggacagtgattttcaaaaccagctcccatgtgctgagaacaccccagctgcatttcttttgcaagattcctttccactccaaccagaagtgaatatttgagacaaacggcctattggctattttcccatgccagttttggaagtggggaaaactatggtggaaatttgtgggcttggggacagaaatgccactcaccaacccagggcaaagaacacaaaccctccaggcctcagtttcttcacctgtaaaatggggtgaagctgtgatgtgcctactcccaaggacacgacacacagtagggacctgccctgtacatgctagttcaacagaaaggaatggcctttcaccttctcctggtggcaggcaagcagatgtcctctgcggagataccgccagctccccaggacgcagactgactcctgtttgctcgctggaccaaccccaggcagaaggtggaaggtgggaacagaggtttagctgcaggacatgtattcccattgcaccgagacctaactgccgctcagagtgtagaccgagatggtgcagatgcctgcagtgccactaaaatgtgggtgaaggtgacatcaggattatgtgccccaggccgggctcagtggctcacacctgtaatcccagcactttgggaggccaaggtgggcggatcacctgaggtcaggagtttgcgacaagcctgccaacaagctgaaaccccatctccactaaaaatacaaaaattagttgggcatggtggtgagcacctgtaatcccagctactctggaggctgagataggaggatcacttgaacccgggaggtggaggttgcagtgagctaagatcacatcactgcactccagcctgggtaacagagtgagactgtctc

SEQ ID NO: 10735 - DNA, 1449 bp, Homo sapiens
atcagtctctgtctcctgggccctgctctgggacctgcccctcacgttctcttggggacacccgagccaggacactacgcatccctgctgagtgtgcagaggctagaggcttctcgggcagcccctggcctgcacactactcatgacagaaagtcagcttttacttttctttcccctggcaattcgtttttggtgcactcatgcatgcctttgagaaaggattctaggagaaagagaaggtctatgtcaacagagttgttatctcatagagccagttttcaaagctccttctgcattgtcactcactgatcaggtgatgaattcttcctagatagtcgcccactccacctcctacttaacctgagactcattatttagctatttctgcttttgtaaaaataattcagatattaaactccaattttaatctatcatccaagggtagatgtagttgcttagtagcattttggaaaaaaaagaaaaaaaggtttggtttggttttgtgacggagttttgctcttgtctcccaggctggagtgcagtgacacaatctcggctcactgcaacctccacttcttgggttcaagtgattctcctgtctcagcctcccaagtagctgggattacaggcatgagctaccacgcctggctaattttttgtatttttagtagagactcggtttcaccatgttggtcaggctggctttgaactcctgacctcaggtgatccacccgccttggcctcccaaagtgctgggattacaggcgtgagccactgagcccggccaaaaaaaaatgtatttattaaaaaaaaatttttttaacccgccgaataattcccataagagtaacaaaaaggaccagcctgaccaacgtggagaaactctgtctctactaaaaatacaaaattagccaggcgtgatggctcatgcctgtaatcccagctactcgggaggctgaggcaggagaatggctagaacccgggaggcggaggttgccgtgagtcgagatcgcaccattgcattccagcctgggcaacaagagcgaaactccgtctcaaaaaaaaaaaaaaaaaaaaagaaagaaaagagtaacagaaagatagggatttttaggagacaattagataaaaatgtatgtgatgactgtataaggaggcctgtgtgtatgaatttatagggagtagaaccgtctctcttcttagttggtgactgtttggggcctggtattttaatagatgaacactacttttttaattttttatttttttaaccctacccttaacccatgaacactatttttaattaaagtatctgatgtaaaattattttgagtttttaatattttgataaacgtgtattcctgaaactttttgacttacttatcttacatgtggtgtcttcctgtatatagtacattatatcaatttctacttgaaataaatattttg

SEQ ID NO: 10736 - DNA, 1531 bp, Homo sapiens
tcacacttcactaaagtgtcatccaccagtgtgttgaatccgaagaatgacaattttctaccactggtgtaaaaaacaaacatttgaagacccttgtgcattgtgtgtcacaaagctaaatacatggaaatcgttaatatcgctgatattaagtaatttccccactctgagtgaatactttgatgattgccaacagtggctaataaaatgacggctaccacactcatgggtcactggggctgcgcagggctctttgaggtgggtggcttcttttggaaagtactatgaacgtctcgaagcagtattctagtgataagaattcttaacatagccaagcgccccacgtttgttccccacgtttgttccccttttctgtttgaaaaacctgttctggtagctccacaagagagatgatactgactttttaaattttttacaagagtctgtattcctgatatgcctatatttttcctcaaagattctgcattttaaggatgggcataagcaaactatattttaataatttatagttaatgttaaaatattggctgatttagaccaaaagattcaaatctcctctttgtgaaatcccatctgcatttgattttttattattttatgttcccccgttagattgttttaagtgtttgcttttcatcttttatagatgtaatctgattttcaaaaatcattaacactttttaattagtatcgactaagactttttccccctggaatcgaggctgtgtgtccgtcatcccagcccccggttggagcctgctctttgaactccgctgccttccttagcagcttctgtcctcttctgtgagtcagtcagcgagtgcttgggatccgcatccagccgtgctgagcacacaacaggctgtgtgtggaaatggccaccaccattctccttccccaccccaccacaaaaagagaagctgtgtctttagacaaccctgaggtatctgtgttacaatcgttctgtgtttgatatttgtgtaaagtatgcatgcagtcttgtactgtgacctaagaacaaaactgtaactgcattagaaaccatgaaaaaattagatattgttttgtgacttttagacagtggtaaatatagaaccatgaattctggtcacattccatttctctccaacatgaaggatcaaaaaatgtttttcaatgtgttctttgttccactggaaacttagagtcatgagtttatgagctgatttggtcaccttcctctgcctttgttcactgtgagttctgatgtcttagtgacttagttcttagaagctcacgccttagtttgaaacagattctccacggtggtccccaaaacactgtctgcatatccataagaattgagcgctatgggtgttaacgtgcatgaggatcagtttgcagcagcaagtacaaaaggagaagaggaacatccgttgaatgagtgtgttttgtacataacttcagatacttgtgaacatgccttatatttgtccaacaactgtcagaataaagaacattctaaaatgag

SEQ ID NO: 10737 - DNA, 193 bp, Homo sapiens
cggtagaaatggactggaaggttcgttccccttgcccaccaagactccagagcaggtgggttcttgatgtctactctgcatgaagccctgggctttccggccctccctacttttcctccgaattcacagcacagcggagccaaaatgtattcctgccaaaacgggcatttcccaaaagaaaatattgttttag

SEQ ID NO: 10738 - DNA, 3465 bp, Homo sapiens
gtgcgtcagcaatttcctgctcctcttggttggtcaggcactgaagctcctacacaggtcactgttgaaactcatcctgttcaagaaacaacctttcatgtagcccctcaacagaatgcattgcatcatcaccatggtaacagttcccatcaccatcaccaccaccaccaccatcaccaccaccatggacaacaagccttgggtaaccggaccaggccaagggtctacaattctccaacgaatagctcctctacccaagattctatggaggttggccacagtcaccactccatgacatccctgtcttcctcaacgacttcttcctcgacatcttcctcctctactggtaaccaaggcaatcaggcctaccagaatcgcccagtggctgctaataccttggactttggacagaatggagctatggacgttaatttgaccgtctactccaatccccgccaagagactggcatagctggacatccaacataccaattttctgctaatacaggtcctgcacattacatgactgaaggacatctgacaatgaggcaaggggctgatagagaagagtcccccatgacaggagtttgtgtgcaacagagtcctgtagctagctcgtgactacattgaaacttgagtttgtttcttgtgtgtttttatagaagtggtgttttttttccaaaaacaaagtgcaaagctgcttgaatcaggaggagattaacacactgaaccgctacaagagggcaaagctgattttttttttaacttgaaaagattgcaaagggacattgaagtgtttaaaagagccatgtccaaacccatcttcatggatagctcagaggtatcctctttttgctcccccattttaacttgccacatcccagtcacagtggggtttttttgtctttctattcagcaaaagttaatattcagatgttggtcttggtcatttgccaactaattttaaagtaaaaggcactgcacataatttgcataaagggccccatgagggtgttttttttttttctttttgtcccccccatccccctttttttttgttttgttctgttttgttttgggtgggagggtgggaaatttgggtttttaagtcctctaaacacacttgggcacggaaatgcagtactgtaaggaagagggacctccagcttccacaaacaccatcttcagctgtatgaaagggacggttgtggtgaagtttgtcaggcacagtaagcatgctgagtggcggggatcagaactctcctatctgaacctactgaggagcaaagcagcaattacatgggatcctgtggctctcccgttgcagaggccacaggaagataggatggaacgtgactggtctcctaaccaaggtgcactgagaagcaatcaacgggtcggtcgtggccagtcctggggaggtctgagtggtggtctttgggataacctttggccttatggatttggactcgaaattagaagagcctaccatttcagatgcaatcacttttggacatgcttttgcagacagtccttaatgctgaaaacacagagaatgggtaattcaagaggcctttcttttaaaatagacttttgtgacccactaattgtaaggtattgcaaggtcactttgcgtgtgtcataaagttgacttccttattggttgaaggtcacagaagtagtggtttgctttgatggaaatagctacagctgtgtcccttcctgctttttactttttcttttgctttttctcggcacgtggtatctccaccatttcttctgcacaaagatgtcttctgttcatcctgaacatttttaaaaaatgcagaattttatgtgactgcttttttgcctcacaattatgctgtgaattttacaaaaatttattttcttttttgataatttattgtaccaaagctgtttttatagcacatagatgtctgtaaccaataatgtagcagttctgcactttgacacaaggtgtaactagaccatttttaaatgtcagttgaaaattatggctgtactattgcttaaacaaaactggaactgttgttgaatccatagccaatacatttacagcaatctgtgtactgaacatagtagattgacatctaattcaagattacaacatctgttacattctaagtgtgttcaggcttctgaaggtaaagggacactggatccagaagctatggaaccagcagttgattcttgtattcctgattaacctacttgtaaacttgaaagcaagaccttgattgcaccaacaggtccagagtatgagtgcaagcaaagcagaactctcatgcgtgacctgagcagacaggctggtatttaacaggtgcctcgtgttgagattacgctgccttaatgtaacacagtctggcagttgctaaatttgtgttcccattttaaattgaccaattttggggtgtgacacttttgagcggttgaattgggagaatgaagataagtaatttacctgtccaggatcaaaagaagcctagaaaagaagcagtaatctacctctgccgataacctgtttaagatgactcagcagaacaccgcgtttcattctattggtcaattccatgtggctgactaggtcaattttttttctgaacaaaagcaggtttttatatgtaaacagtgagaaaagaaaggctaaacactatgtaaatgtgaatggaaacttggaaatactcgtttttataaactacaaaaactttttgttgtttatcaggaaatccatatttattttgtaattaactgtcaagcctgtggatgatttttttgaacttggtagttcataaaggtttacagtgaataaaaggatatcatcttgagtatagcaatatcaaaaggaattcagtagttactgctgtttaggaatataaggttaagatatcatatgggtcaggtcattttttttttctgtgctggttgccacatcttagcaagcaccaaaaaactaaagcagtttttaaaccgatatttacgtaaagaaaatcataaaatccaatgcttctgcatactgtgttatgttacagtccagttttgtgtgctttactacacagtttggttacaggacttctgtgcattgtaaacataaacagcatggaaaaggttaaatacctgtgttcagattgtaagatctagtccggacttgctgtgtatattgtaacgttaaatgaaaaaagaacccccctttgtattatagtcatgcggtcttatgtatgataaacagttgaataatttgtcctcagactctttactatgcttttttaaaaattaatttaagaaaaatgtaaacatagtaaaaatcttcctatgcaattaaactggtccaggtctggtaggtatagtatcaaagttgagttaaatgtgtaaaaaggaaactatttgagatacattgacataggcatcagcaatctctgaaagtaaaaattggaggtttaacag

SEQ ID NO: 10739 - DNA, 210 bp, Homo sapiens
gaatatgtgtgtgtgggtttgccatcgaaggaaaacctttattttggctgctaacatttggaaacatttagagaacaaacaatatcttttaaaaaacatcaaaggttcaaaaaaacaagacaagaaacaaactgttgtaaaatttcaactcctctaaatttgtcttaaattgaacttagaactaatctaataaaaatagtatgaagtttc

SEQ ID NO: 10740 - DNA, 1433 bp, Homo sapiens
tcacaggggcgccatccaggtttaaccctgcaagctgtttccacatcagaactcccttcaaacacaaagattgctgtgaaaacgaaaatgtgtagacgcactctcaaaaactgcacggacatacaaaatcaatcttttcctttgatcttgtggctaaaccagcatttctgtgtttgagagatttcctgttaggtgcttcgtctgaaagtgaactctcataattcaaattgtataaaataaagctacatttctaagagcttggtgtagggcaattggaataatgtcctgttagataaacagacatttagcaatcctgacattaaaaggaaatgtatttctatacaagattattagctgtaatacaagatatttatttaaccaatgaccttatggctgagagttgaattgtggttcagtattcattgatctcactgctttaaaacatgctctttttgttcaagcaggaaaaatattatatctaattatgtctatgtggtaatacctaaaaagaggtagagagactctatgttcacaaaatatagtaatttcatttttacctttcttcagtggactgaattgtatggaaggaaattgatcagatctgtaattcacaactgtggaaacctacacaaatggggctgatgccattgtttcctctattttattttatttatttttgaatccactatctctttccattcaaaatatttccattcaaaatgtggttcacagacccgccacatcagcaccatccgagagcttattagtaatgtgtagattctcatgtcccagccagacttacagaattggggtctgtatcttaacaagaaccccagatgatttgtgtacaaatgaaagttcgaaagctgtgctctggacagtgttctcaaagcaactttctgaagccgtgtggaaaactgactctgtgtgggtcccgtatccctgtggcatccagacctggcctctcttcatttcattattattggccaatatttctttcagccatttcatttcttatctattaaaatggcttgcccataaaggaactgcataggattatcccctgacattccaagagcaaaataaagctcttgagagtaattgttgtctcagtcatgcttgctgattacagttagcacaaaagaaaaattcagctgcctgacaatacaggaaatgttctcagatgctgatgtttgtaaggtccggtggggccatgaggaagaagaggagctgaaggtaagaaactcataaacaagatgactctttgatgcatgaacaagatttgaaaatctcaagcctgtaaagaatacccctgctatttaaataaagctcataccaagaggtaacattttgccccgggccaaattcaggggtctagtgccctgcattcctttgaggcaaaaaataaatgggctatgactggttaaatgtcc

SEQ ID NO: 10741 - DNA, 2063 bp, Homo sapiens
ggtcgccgggaccaccctgagccggccccaggctcgtggactgagtgggaagcccatcctgaccagctgctccgaggacccaggaaaggcaggattgaaaatgtccaggaaagtggccaagaagcagtggccttattgcatcccaaaccacgcctcttgaccaggctgcctcccttgtggcagcaacggcacagctaattctactcacagtgcttttaagtgaaaatggtcgagaaagaggcaccaggaagccgtcctggcgcctggcagtccgtgggacgggatggttctggctgtttgagattctcaaaggagcgagcatgtcgtggacacacacagactatttttagattttcttttgccttttgcaaccaggaacagcaaatgcaaaaactctttgagagggtaggagggtgggaaggaaacaaccatgtcatttcagaagttagtttgtatatattattataatcttataattgttctcagaatcccttaacagttgtatttaacagaaattgtatattgtaatttaaaataattatataactgtatttgaaataagaattcagacatctgaggttttatttcatttttcaatagcacatatggaattttgcaaagatttaatctgccaagggccgactaagagaagttgtaaagtatgtattatttacatttaatagacttacagggataaggcctgtggggggtaatccctgctttttgtgtttttttgtttgtttgtttgtttgtttttggggggttttcttgccttggttgtctggcaaggactttgtacatttgggagtttttatgagaaacttaaatgttattatctgggcttatatctggcctctgctttctcctttaattgtaaagtaaaagctataaagcagtatttttcttgacaaatggcatatgttttccacttctttgcatgcgtttaagtcagtttatacacaaaatggattttattttttagtttaactgtgtttctccgacagctcacctctctctgaccacccagccatttccttcctgtgctccacgttcttctgtgtgattaaaataagaatattatttttggaaatatgcaactccttttcagagatcaggagggatttatgtagcagctatttttactgcaaaagtaattcactggaaaaaaaatgtaatttgtaagaaagctttatttttatctcagctctatgtaaagttaaagttactgtacagagctgaaggacggggggcggtaggggtcttgatgaaacctcttgaacgaagcacagtttgtcccatctttgttcactcgtgtgtctcaaccatcttaatagcatgctgctcctttttgctcagtgtccacagcaagatgacgtgattcttattttcttggacacagactattctgaggcacagagcggggacttaagatgggaaagagaaagcatcggagccattcattcggagaaaacgttttgatcaaaatggagacttttgtagtcgtttcaaaagagcacctgagtcatgtgtattcccggcctttataaatgacccggtcaagttggtttcaaagtccgacaggcttgtctgtttactagctgcgtggccttggacgggtggctgacatctgtaaagaatcctcctgtgatgaaactgaggaatcgggtggccgggcaagctgggaagagcaaagccagagctgcgctgcctcaatacccacaaaagaccattcccagtatacataagcacaggatgtttttctcaagagggatgtatttatcacttggacatctgtttataatataaacagacatgtgactgggaacatcttgctgccaaaagaatcctaggcagtggctcattgtatgtgaggttgaaccacgtgaaattgccaatattaggctggcttttatctacaaagaaggagtttcatggggttcagcctaacagttatggaaactacagtccttataaaccattggcatggtaataaacagatcttaagtataaaaattttgtaattgggcctttactctctcaataataaagtattttgtttatat

SEQ ID NO: 10742 - DNA, 751 bp, Homo sapiens
acaggaggatggatacagccgcgaggctaaaaaacggatttcctcttcctagcttaaaatctgatttacactgttttgttttttaagaaacaaaagtgcatagtttagattttttttttgttgaatatgtttgttcttggactttatgagagagtcttataagaatcacgattttctacacctgtcattgagccaagaaagtccagtttatgacacgtatgtactagtgaacaccgtcctcgatctgtacgaaatgtgaaatgtttagggacatctccatgctgtcacttgtgatttgccctcttatgtattttggtcatattgccaactggaaagtcaaaattttctaacaactttaagtaagttctttgaagacttagtgctgtttttaatccagtttagaaagtaacttaattttaataccactactaaaaattcgaaaatttcttctttaatcacattcaatatggttaaaagaacaacactaattgacattgcgtgggctttttctccctttgtttaaaatgtcatttgttgagcaagagttgtatagtattatctacttacttgaggctgttaatttttcattacagtgttttgtaaatgtatccacgagaccatgatgcattgttttgtgctcaacttgtgttttgtatttaaagcattttgaatgaagtgtattttataagcatttaatatttatgctctttagaatggaacacagaaaacaaaccttataagtcctgattaa

SEQ ID NO: 10743 - DNA, 412 bp, Homo sapiens
aaaatggaagctatgaagcaacatttcaaatgtctctccacaaaccaaactcaacagaatactttggcttgaagccggcacacccagggttactgaggacttatgctgcctgacctggttagatgtacatggaggtatctcccgaatcatacaaaattaaatgtgaagaccgtttatgcataccttcatgtgcctgacagtcttggcttttgaagatttttttttcttttttgctctgcatagctagaccatcttattaataatactctgaaaaaaatgatttcaaggcatggaagttctctgtgatacaacaatagtatttcttcaaatgcgccttatgctacttatctcagaaacaggttttaaaatgaagtgctttccagagaaccatcatataaataaagattaatag

SEQ ID NO: 10744 - DNA, 1396 bp, Homo sapiens
ggggagcccagaggcacatccggacaagtttcagataacccgtggggatagtttttgctagattttggaagagggggcgggacagaggatgctgttcttcagtgctgaaatccacgccagaatgtcggtgttcatgaagtcactgattagttcccacttggtgccccaggcaataataggcccgtctcttgggcacgcacactcttcatactaagtgtttgacatacacctggatttttgcatttcaggggtcagtatcctatgacatgatgggtgttaccatcctaattttacaggcaaggacacagcagctgcgagaggtacagaaacttgtcccaaggctcacagccagtaggcataggagcgggaatgaaaatcgagcactgtcagaatctggtgggcagcccctgacttgaaccactcccacgtgctgcctcccttaggaggggacactgatgatgaggtctcggagccggcatccttccatccctgtcgagtcccctccacctcagctcccagtccttgtgctttttggagctaagcctgggatgaccaaattcaccccagctccttcattcacagggctggatgtagctgggattgagtccatgttatcggctcggtactcaacacaacccaagtttcatccgaggaaatgtccccgcagtggatgcagctcacatgctgaggaacacccagctctggacagagttcttataaatgtataaattaggctcagaaaccactgcattctgacctgctgtacagactgcccacactgctgacctgcctagcgagcaggacatcccttctgagccatctgctgctctctcatttcatcaccccaactgtcccttgtttttgatcaatggggaccagccactgccccaggagcactttagggctctcagttcaaactgaaggacagttgaactcagatggggttcatgtgggattctgggagctttctgggaattcagttggagtcaagtcaggatgctctcaaggacccctcgggctcagagccctaaagtgggccctggtgaagcagggtggtcctgcgtccacttcccaagcctgagccaagctcatcttcattgaatgtctcatttggccgaggaacaactgaactttgtggtttgctgtttagccttcagtttgctccgctgcctcctacccagaggtttgtgcgagcctgtgttgcagggttgtataaaaccaaggtacttcgttagttttgcccattcagccatggtcacgtgacatgcaaagtaatcttgctcctaattatagaaatgatttttcttttaattttttactttaccagactttactttgtactcagagaagaggcctcacatggctgtgtcacatataaatgttggactaaactctt

SEQ ID NO: 10745 - DNA, 284 bp, Homo sapiens
tgggagaaccccctcctagtccacctgaaaacaccaaattcaaccatcatctgtcaagaaattaaaagaacaacaccctagagagaagtcatccacacacaatccacacacgcatagcaaacctccaatgcatgtacagaaacctgtgatatttatacccttgtaggaaggtatagacaatggaattgtgagtagcttaatctctatgtttctctccattttcattcctcctgcaactattttccttgatgttgtaataaaatgaagttacgatgagtgaattc

SEQ ID NO: 10746 - DNA, 1169 bp, Homo sapiens
ccagcaactgtgtccccgctcagtctttgagcgagcccattttgtggattgtgtcctatgcgctcatgagcgtctgtggagccatcctccttgtcttaatcgtcctgctgctgctgccgttccggtgtcagcgtcgcccccgtgaccctgaggtcgtcaatgatgagtcctctctggtcagacatcgctggaaatgaatagccaggcctgacctcaagcaaccatgaactcagctattaagaaaatcacatttccagggcagcagccgggatcgatggtggcgctttctcctgtgcccacccgtcttcaatctctgttctgctcccagatgccttctagattcactgtcttttgattcttgattttcaagctttcaaatcctccctacttccaagaaaaataattaaaaaaaaaacttcattctaaaccaaaacagagtggattgggctgcaggctctatggggttcgttatgccaaagtgtctacatgtgccaccaacataaaacaaaaccaagccttggctcgttctcttctctcttcaatctctggaaaaataagtacatatagttgataacccctcttagcttacaggaagctttttgtattaattgcctttgaggttattttccgccagacctcaacctgggtcaaagtggtacaggaaggcttgcagtatgatggcaggagaatcagcctggggcctggggatgtaaccaagctgtacccttgagacctggaaccagagccacaggccccttttgtgggtttctctgtgctctgaatgggagccagaattcactaggaggtcatcaaccgatggtcctcacaagcctcttctgaagatggaaggccttttgcccgttgaggtagaggggaaggaaatctcctcttttgtacccaatacttatgttgtattgttggtgcgaaagtaaaaacactacctcttttgagactttgcccagggtcctgtgcctggatgggggtgcaggcagccttgaccacggctgttcccctcacccaaaagaattatcatcccaacagccaagacccaacaggtgctgaactgtgcatcaaccaggaagagttctatccccaagctggccactatcacatatgcttactcttgcttaaaattaataaatcatgttttgatgagaaaaaactattct

SEQ ID NO: 10747 - DNA, 530 bp, Homo sapiens
cactgcagggtcctgagtaaatgtgttctgtataaacaaatgcagctggaatcgctcaagaatcttatttttctaaatccaacagcccatatttgatgagtattttgggtttgttgtaaaccaatgaacatttgctagttgtatcaaatcttggtacgcagtatttttataccagtattttatgtagtgaagatgtcaattagcaggaaactaaaatgaatggaaattcttaaagggaatgatgtgattcaagctggaaagagggttgggagaaacagcttgtccaggtggagctatgttatgatcagatcgaagtgtgacccctgtgtggtccagacagccctgcagagagaaaacctttattccattatcaccaagcacctcctagtttccgacagtcatctccttctgctgggagaattagcagcagttcagggggcttatgttatgtccttgttcaactcaacttgagctcttgaactcctcctgtgggcctgtgaatgtattcattcattccacaactctgggtg

SEQ ID NO: 10748 - DNA, 709 bp, Homo sapiens
agggcggcgatgcctgtggttgttttcttgtgcgtactcattcattctaaggggagtcggtgcaggatgccgcttctgctttggggccaaactcttctgtcactatcagtgtccatctctactgtactccctcagcatcagagcatgcatcaggggtccacacaggctcagctctctccaccacccagctcttccctgaccttcacgaagggatggctctccagtccttgggtcccgtagcacacagttacagtgtcctaagatactgctatcattcttcgctaatttgtatttgtattcccttccccctacaagattatgagaccccagagggggaaggtctgggtcaaattcttcttttgtatgtccagtctcctgcacagcacctgcagcattgtaactgcttaataaatgacatctcactgaacgaatgagtgctgtgtaagtgatggagatacctgaggctattgctcaagcccaggccttggacatttagtgactgttagccggtccctttcagatccagtggccatgccccctgcttcccatggttcactgtcattgtgtttcccagcctctccactcccccgccagaaaggagcctgagtgattctcttttcttcttgtttccctgattatgatgagcttccattgttctgttaagtcttgaagaggaatttaataaagcaaagaaactttttaaaaacgt

SEQ ID NO: 10749 - DNA, 453 bp, Homo sapiens
ccacactctgtccagccccgtagacgtgcacgcacactgtctgcccccgttcccgggtagccactggactgacgacttgagtgctcagtagtcagactggatagtccgtctctgcttatccgttagccgtggtgatttagcaggaagctgtgagagcagtttggtttctagcatgaagacagagccccaccctcagatgcacatgagctggcgggattgaaggatgctgtcttcgtactgggaaagggattttcagccctcagaatcgctccaccttgcagctctccccttctctgtattcctagaaactgacacatgctgaacatcacagcttatttcctcatttttataatgtcccttcacaaacccagtgttttaggagcatgagtgccgtgtgtgtgcgtcctgtcggagccctgtctcctctctctgtaataaactcatttctagcag

SEQ ID NO: 10750 - DNA, 900 bp, Homo sapiens
gtcgccgtgagtcaagctgcctccagaacctcagagcttccctggtgggctcccccgggatccccagtgtctctctgcacctccacccatccctcggttcttaactcttcaagccttaacggaggtctgctctgacgggtgggctctgccagagcccgggtgagcccagaaaggaagacagcagccaccgtctgtcccgaagaggcaggccgtcctgtaggtcctagaggagccacagcccaggggcagatgaaggggctgcggaagacgggggcagtcctgggggtgctgcggctacaccaccacccgcgcggcccccgcagcctagacctcccaggcctgtgaccctccacaccagccctcagaaccctcctgggcttgccctcccttggcgtccgtcaccctttggcaaatatagaatatttcacattctcagagagacccgaccgcgctcttgatgctctttcgaaaataggtcagtcttagaaatacactgctaatgttatttttagtggatgtttatgctgtttgacttttctcctgtgtaccaaggtattgcttttatttacacgacagcgactcaaaaggcactcgattaatgtgacaaccttttcaataagcagaaataacgtaggtacacatcactctttacatttttctaagcattttcacagccgtttcttcatataatccgaccacagtgggaggtgtgatttacccattacacaatgagaaaccagaggagccgatgagttacttaattgaggtcacagaatgaattagcaagaaaatggttctaaaatctaagtattttagtctagaattttctccattacatcatcctaagagataatgctctgtacttcatttgaaataaactggaattgtattagatagctc

SEQ ID NO: 10751 - DNA, 850 bp, Homo sapiens
aacacctgaatgccaggaaacaggaagattagacactgtggccgagggcacgtctagaatcgaggaggcaagcctgtgcccgaccgacgacacagagactcttctgatccaacccctagaaccgcgttgggtttgtgggtgtctcgtgctcagccactctgcccagctgggttggatcttctctccattcccctttctagctttaactaggaagatgtaggcagattggtggtttttttttttttaacatacagaattttaaataccacaactggggcagaatttaaagctgcaacacagctggtgatgagaggcttcctcagtccagtcgctccttagcaccaggcaccgtgggtcctggatggggaactgcaagcagcctctcagctgatggctgcacagtcagatgtctggtggcagagagtccgagcatggagcgattccattttatgactgttgtttttcacattttcatctttctaaggtgtgtctcttttccaatgagaagtcatttttgcaagccaaaagtcgatcaatcgcattcattttaagaaattatacctttttagtacttgctgaagaatgattcagggtaaatcacatactttgtttagagaggcgaggggtttaaccgagtcacccagctggtctcatacatagacagcacttgtgaaggattgaatgcaggttccaggtggagggaagacgtggacaccatctccactgagccatgcagacatttttaaaagctatacaaaaaattgtgagaagacattggccaactctttcaaagtctttctttttccacgtgcttcttattttaagcgaaatatattgtttgtttcttcct

SEQ ID NO: 10752 - DNA, 468 bp, Homo sapiens
gagccacggtgatgttgtcataacctcagagtggagaggcagaaaccatgtgcagaggctgggagatgctgctgtttccagaggcgtcttagtctcacccaatgtgatttgtagaagcacgagacgcacttttatatcccggaatatttccctccggctttcgcctttgtaactcccatctgtggacccatcgtccaccagcccagctgcggggagcacagggcaggtggctgggtgaggatgccgccctgcagcatgtacaccgagtgtctgcagctggggacacaactgcccgggactctaacttccaggaattaaagactcaccacacacgaaggatctaaccacttcattttccatggtctaatcattaaattcccaatcgttttttctttttctgggtccatcactctttagccatatccacatgggctaaaacaggtgtaatagtcaataaaatggtcccag

SEQ ID NO: 10753 - DNA, 1079 bp, Homo sapiens
caccccaccccagtcccgtggagggggtctgggcccacccttcacaactgcctttcaaggacagttcagacaaagggccctgcatggaaagagtgacctccctttgccttttgcacacgcacctggaaaagacacagaagccaacctgagaacccctggtgctattttaaaggagacatattgctgaacagcagtgagaaaagtctgcaggaactgctgcctgagccaagccagagaaccgaagacccggccggccctggcctcacaggcgtgtgcccatgcagccacccaaatgcacgcgtgacaacaaggccgggagggtggggggggtgcacaggtagccccgaccctctcaggcattccagccacagaacatcaaagtgagcgagtactgcgctggctgtggcttcagagaacctgtatgtgccacatggaaaaacaggacaccagagcccaccagacagtgccggccagcagagaagcagagagccagcgccacacaacatcaagaaggccgacaaccaggttggaaaccaagacggagctcagacccaccacatcgccccagaggcttttccagcacccatgatgtttcggactgacctaaaaactaattgtcgagaagccaagggtgaggaggcaggaagcacctccggttggaggcacccaggcttgccagccacagagcgccccaaagtcaccgtcatcccagcccctggccttcctgctgccctccggggccatggcactgctgttcagctcaggcacaggggcacagcagaggtttgggaagcggtctccccaccggcactgggattggcgggtccaagcccagcaaccggcttcgctccacaacacacaccacacctgggactgtttttaatacatagcaacagactgggttatttatttaagatgtgtattgtgtcatatgaagtttaagagacataaatggcattttgttatttattaagacaaactccaattgttctctggctgtttttttcagttgtgtctagcaaaatacttatctgccctttgaaataaaatgtttttgtttaaaaaatctcagaacactc

SEQ ID NO: 10754 - DNA, 213 bp, Homo sapiens
ggaaagcggggggcgtggctgcagttctggacgggctggccgagctgcgcgggatccttgtgcagggaagagctgccctgggcacctggcaccacaagaccatgttttctaagaaccattttgttcactgatacaaaaaaaaaaaaaggaattcatgatgctgtacagaattttatttttaaactgtcttttaaataatatattcttatacgg

SEQ ID NO: 10755 - DNA, 641 bp, Homo sapiens
gggccctcggtgtgaagatgaaccttccaccgtcttcactgcatcctggagtgcaaaaataaaatccactcaagagtcacaaggcccgctgtgcataatcggtttcacttttacctttttttttttttttttttttttgagacagggtctcactctgtcacccaggctggagtgcagtggcacattctcggctcactgcaacttccgcctcctgggttcaagtgattctcccacctcagcctcccaagtaggtgggattacaggtactcaccaccaggtccagctaacttttgtatttttagtagagacagggtttcaccatgttggccaggctggtctcgaactcctgacctcagatggtctgcccacctccgcctcccaaagtgctgggattacaggcgtgagccactgcgcccggccactttcacactttttacagtgagtggtgaattagcaacagtaacactgattatccaacatatattttggaatatctactatgtgcaaggaatttttcttaaactctaaggttatgaatcactgggcaaatccatataattagagaattttaagtgctttagagcggtgtgattctactgtgctcagcctagtcaatttcgcattaaactgattatcagctg

SEQ ID NO: 10756 - DNA, 3477 bp, Homo sapiens
gggcaggagcagacgcacctgactttttggagtttgcacagcaaacattttacacagttttatttctaatatgttttatatgtagatatagaagagtgcacttttgtatttcatagtaagcttaaagcgcgtctttgccggtgcagcgacttctttcaagtgtgtgtgtgtgtgtgtgtgtgtgtgtgtgtgcgtgtgtgcgtgtgtgtggatttttaaagaaattctttaaaggtttaacgctagattgtgaggaatgacacaccactccctccccaccttgaatccctaattagattaaggaatagcgctgccattttctaaaccgtgatgcggttgtcacttagttctgtggttccagcagatctcagtgggctggttgatttgtgtggcccatggatttgaaagaagctgctgcacccgaaactgccagtgtgcggtgacaacggcacacgcctagactgagtgtggtttcgtcgtgagtggatggacggcaagcttagcaagcctaagtcccctcatgttcagtgagcctgtttcatttgctatatagaaaaagaaactcctatttttaccttgctggaattattggataaaaaagctatttttataaattcgttatgaattggatgatgactatattgaggataaaatttctagagaagaaacaatacatgcttgctattaatatttcaatttggaatgttctgaattgaccaaatttaatgaacctgcccaaagttagctaccgttccatggttctttgctctccccgggtagtgatgaacatttactactataaaagaaacagctatttaatgaaattttgatatctgcaaatttttgttgatatgtaatgctcagattgcattttacacttgatctaaacatatatcgaaagatatctgctaaacaggacttcaggtaagtgaggtgaaatggtagccagtgacccgttaggagctctcaccgtacatactccagtctaatttaaatctgaccacagttgcatggtcgctttaccatgttagctgtgtattgttttaaaagttttaacttcaaaatatgttatgcacagaatgtttattataaactaatataaaatgtgctctaccccattggctcagagctagggcaaacagcagatattcagactttattacttaactagcggacatccctggagtcccagcagcgagctggtctggcgagggcacctcggcagcccccacgggttggctcctacgtttgcgtttgtggctggtctcctggtgtcagtgttctcttgtacgttgttgctttcgacttttcagagccctcctgctcacttgaccacgtgagatttggaataactgtaggacttctgtttcctggtaacaagatgaaccgagagagtgggctgggttctgttttctttggttttgatttgttttcattgtttacttaggagtggtgctttttctcagaaaacaggccacggtgtttcatacagaatgtcttcatatcatctgaaatggtatggctgaagttcatttgtttacagggtcgggaatgtcttcagttcttgagagtcaacagtaatgattggttgtaagccaagggacattttaagctagtgaagagttttttctggaattgatttttcccaaaagaatatattaattgaggttaagaagtcagtgggaaacacacagaaatttgttttaaaatctttcaggagctttactgaaagacttggttatcaagtcttttggggagagaatgacattttttttttgagacagagttttgctcttgttgcccaggctggagggcaatggtgcaatctcagctcactgcaacctccacctcttatgttcaagcaattctccttccttagcctcctgagtagctgggattacaggcatgcgccaccacacccggctaattttgtatttttagtagagatgggtttctccatgttggtcgggctggtctcgaactcccgacctcaggtgatctgcctgcctcagcctcccaaagtgctgggattacaggtgtgagccaccgcgcccggccgagaatgacatcttaaagccaccattgcgttcctcatttgtgaactgtcttctcatattttaagtcaagtctataagatcatttttaacctaagttccaactttgttggactccttaaaataagcacccatgaaagccagccagcccttcctccttccctcaccaccctccgtctcttcggctgcttgctctttagtgtagattagtggaagccattcacagaatgtagactcatgtataggtcaccgtttctttcccccactagaaatcacattcactaagcagtggattgaatttaagagtgctgcccctgcccggcgcagtagggcgtgcctctagttccagctactcgggagtctgaggcagaggatggcatgtgccaggagtttgaggctgcagtgcactatgcttgcacctgtgaatagccactgcactccatcttgggcaacacagtgagacccccatctataaaaagagagcactgcctgaacctcggtggcactgggaagctctggcctgagagttaaacacccatgctgaatgatacagtgtgcattctctccagctgcaaactttcttcaactttcctaaattcttactaaattcagaggaataggataaagatcacttagagaaagggtgcttatggacatagcctgagtttcctttaacctctctgcaatgggtgcttttaactagcttctacatggcaagctgtttcagtttgcaaaatcactgcccagcatgtttgaggtcagttggcaccttaaaacacctgttctccagcccttggacagtggagagaatctgtaaaagtgtgaccccctctaagatttcgttttaaatgatcagattcggttccagttttattcttgttgagtttttccctatgaaggctccttttgaatgtgtcttgagacccaaattgagcatgttgctgttattcctgccctgcacctgtggagcaggagtggcagggctggctgtgctgggttccagctcgctcccaccgagggactagcttggcctttgcgctttgattccagatagtaagatgagtggaagtgtttatcgagcatgcaaaagaaaccctcacggctaagggctctgggagttgtgtctgtgtgacctgagagtgatccatctcctgcctgtgtgaggtagcagtgggcacttttcattgagacaaactccagggtgtccagagggggttctgccccttgtgaaggcccattcctggcacttagagacagaaagaactcagcaatctttcgttctagttatattcggtctttgaaactgacaatctttgaaatgtgaatactgtaacaatatgttttcttggattgttgtctttaaaaaggatttttgtgaagcaattgatttatcaaagcaaaaaaattaaaaatagaaacttgc

SEQ ID NO: 10757 - DNA, 523 bp, Homo sapiens
gcaggcattgcctcggctggctcccctgcagccctggcccatcatggggggagcaccctgagggcggggtgtctgtcttcctttgcttcccttttttcctttccaccttctcacatggaatgagggtttgagagagcagccaggagagcttagggtctcagggtgtcccagaccccgacaccggccagtggcggaagtgaccgcacctcacactcctttagatagcagcctggctcccctggggtgcaggcgcctcaactctgctgagggtccagaaggagggggtgacctccggccaggtgcctcctgacacacctgcagcctccctccgcggcgggccctgcccacacctcctggggcgcgtgaggcccgtggggccggggcttctgtgcacctgggctctcgcggcctcttctctcagaccgtcttcctccaacccctctatgtagtgccgctcttggggacatgggtcgcccatgagagcgcagcccgcggcaatcaataaacagcaggtgatacaagc

SEQ ID NO: 10758 - DNA, 2694 bp, Homo sapiens
ggagcagcagagtcccttgtaaaagactgcttttgtacagaatgcgctataaattatacctttaagaatgtggggccttttttatgattttgtaagttcccataagttgtgtgcacgaggttctgagagtgcccgcaggctgctgcgtcctggcccctctgtagtggctgcgggcgtcttggttgaatcttttgctacaaaccatgtttgcgtttgagctctccaggattttacatttttgggtaacctcagtgattcccattggtgtaggaaatgagaccctctctgaagctgaggagagcacgttgatctgaactttaaatcaatcagtgctgctggcacaatgaaaggtggaactgcacttctgttgagctctcagttctgcggaatttggtactcattaccgtattcgccgtactaagttggtttctgttagtcttaacagtctgttttcttttaaaagcatgtagggcttcattgccatgttctgtgggtgtttggcaggttaccgatggggaagattcttgtcacagaatcagcaataccatagtttttctacatgtgctcagctgggggtgtggacaggtaggggtggggaaagaagaggctctgcgttctgggggctttttcttctcctccccctacccggtttccctccctgttttcctacctctacggcaagcccaaagtgtcttcccgggagcccagcgcagcccccggctcttacccaggaccccgccccgtgctgagccttctgctgaggtccttgcgtggagcacactcattcctccaagcccttgcgctcccgtttctctctctctccgtccacgttccagccgagtcactgcctgaccggctccatggcagctccccatcttccctagaggctgcctgcgcatctggagcctgcgctccggctcagcgacctttcctctcaaatgcggaagcgtgcacttacagttcagaccgttctcctgtaagttcattacaaacacgggcggaaggcactcaggctttcgttggagaaacagaaataaggccttcttttgagcagcgattgctggatcattgatctgtttgaggaagtgtctgacctgggcctgagagctggagaaggtgcagattcaaagtgagcggctcctgaggagagccgccaaggctgctcgccttctccgtggcttccgcagctaccgtctgcacggtgagagggcacgggcacacggttcgggctggcgtgcagctctcccagccagccacgctctgctcaggcctggaagtgaaagccgcctccttcccgttatgccccccatacaggagcctcggtttttcagcaaaacgcggccagtccccttctccactgctgcctcccagcagagggccccaggatctccaaggtcccagctatggctttggacaacgtggcttcggcccctggggttgcagagcttgcattgggtttacctcggtctcattcattcatggagccaagggtggggtttcacctgcgaacatcagactgacttgctggcgtcaagagcagttgactcactgatgaaggccctggtgaggagaaagcactctgttcttcgcctactctgtaatcgttttgtcataatgagccatgaaaaaagtaatgaacttgtgctgttaatcgtcactgtaatgagaagtcttacgtacaacatagctgtggtggcttaatggctgcattagataggatcctcacatcccattcagaaccaaaactgatacagtgaaacaattaaggtgagcaaatagttttaacttttcttttttttttttaagtttcattcttcctagaatatttttctaacaatttttatttcagctttaaagatgggtcatatagccaaacgggccatataatccaacattgttgagatgtcttaggacatctaaggcaaaactggcacatttgttctgcagactattgcaggaatgttttttcctagcatttctatattatctgtccattctgaggaaccagtgaatgtcctataaatgcacctcctgtcaaaaccatgcctgagaggtcccggctgggagtgacagggtgcttcttagattctattggtccttctctcattctccgaacttactcctttttatgggtaagtcaactaggtttacagtcccttatttttaatgcctaagttttgacagcaggaagaaaacaattttttaaaaattctcattacatagacgcacaagaatatgtcacataaagaaaatgtgtttagaatactggttttctatttacgcatgatattttcctaagtaaaattgccaagtggacttggaagtccagaaaggaaaataatttaaattaatgctggtgatcttaacaatattttgtaaaatgatgcttcccccttctccatggtctagtcaattttgtacaattaggtatctgactttacaagtttgttatcctttctaatttttactgaactgaaagcacaaagaagactacacagaaaatctggaaacagttgcaggtgttgggaggaagatgaaatcgagctgtcttttaacttttgtatgtgttttatcagaatttgctggactatgctggcaaggactttgtttacgatcaaattgtactagtgtctgcagggtttgtcagtactcgtcaaagccaagtccaattaaaaaaaaaagtctttgccctcc

SEQ ID NO: 10759 - DNA, 6244 bp, Homo sapiens
gggccccgccgcttgcccgtgacacgcagcgcgttggtgtctccgtgtttgtccctgtgaaaacatgtaacgtctgccttagagccatgaccgaaacttgatatttttttctttcatgagtgtccggcatctgctggtcttcattgtgaaacgtgccagtcgtgctttgtgaaaaataacaaagtggtcacagaaatttgtgatctgaaaacccggctcccttccccacaaggctcctgggcctccgggaagacgggcccctgtttgccatctcgggggtgttccctgtgggagggtgagtgggtgaggccgagcctgctgcgtgtggagcctcgagtgggccctggctgccactaccgtacagaggccgtgtcgcgctgggctgggcctgggtggcctctgtctttgcatctctgagaaggagtcgggtggtaacggttggggtcaggaagaattctgccaagtatctttactgtcattctgaccatagcctctttgttcccgcattcgaacttttggttcttactttgctgctcgtttagtccctggggatttcagatcttaggctgttgtttcaccgtatgggagggttgatgtgagcttgcttggagacacacggtgcagcatcagggaccttcccaggccccagcaaattcaagtcggtctgcagacctctcagctacccgcgggacctcttgtaacccatcggcatcttccaggaatccgccgagtgacttgaggaagatgctaacgcagtaaggtctgtgctgggccaagagcagctttgaagctccagagaaccaccccgtcaggttccttgtggaagctcccctcatccgtggtgcagcaggctgagcactgcgcgtttgccacgtgctgcccgtgacagcacattgagccacagcatttgtagacaggacagaggggtgcctgccccctgcccctgctggcacatttaacccttgtcccctgacctcagttctgtgccccaccaaatgcccaggggcaagaggccaccctggaagctgccaatcttccaaggtgggtgtggggcacggtgggggcgggcagctcccaggcccttgggcaggctggggtgacggcagaggccacagcaccagctctgacaagtcctatcatcctctgctcagcagtgacctccctggccccactttgcccagagtttggggtccccccaggtatagctataggcggcagtgcctgtccctggcctgccttgatttcagccacacccctgcagccctgcatcccagctctggggtgtgcagaggtttgtgtctccagggaacccacggctggagagaaatagggagatgcaggaagtgggggcccatggggcccccaagaagcggactctccaaggggtacccccaccccgctaccttccccacggacgggcccctcctggagcccataccctcctgtgaggccattccagtgtcttctagaaagactcgcttgccaggagtgcgttctttgttgaaaaatgccctgaagcgaaaagatgcaggtttatatggaacccccaccccctcccccactctcccactctgttcgttctgaatgtcttcacgagcgtgcatcagggcgcctggctcccccacctcagccagtgagtcagacacgggtttcgcagccatgtttcctggctccgaggacacgggtggcaggcccgttgcagcccagagccactggtccctacagggcgccgccacaccagcaggaaggaggatggctgtgtccggagcctggcggggaggcggcctccccagtatgtgagtgcagggatctgccagaaccacctggccctctgtagggcgtttaactggaaataccctcactgccaagtggagactggggcgtgtgccacattgccagccaccaggaaagcttttctttttcttttttttttttttttaaacaccaagagcacgtatagcatgggggaaagaacctaaatgtctctctgtcctgtgagctggtgaaaaacccagcatgagaacgcagtgtcaggtgtgggactccttctgcccctgcagtgggtgttacgggcggtgtgccctggcgagcaagctttgattcttggttctttgagctcgtttcagaggctgagtccccacatcagctttagttcttggacttccctgtattaagcaagaattaggagaatggctgtccctgcaggcgcctcccgtaaatcctgagctctctggcgcaatctgaaacttctcttctgttttctttggctgtatcagccgaaccaggagaggcctgggctgcgactaaggagaaagaaatcgggggtttctgagagcagatggtgcctttgtgggtgcagggcttttgtggaaattgtcagcctctacgggcagagtccggcatcccctccccagactgcctgctgtcaaaccacggagcagctggagcctgccctgtccacggcccgtttccacccgggcatgttcgtctctcctgacttcggcagaggcccctggtggccttcagtttcagtttctcatccaggaaggtaaccttgggcattggcagtgggtttccctatggcttggatccagattagaattgatctttgttttcactttccatagttaataacatgcaaaataatgagaagaatttattttaaggtgacagctatactggtccaacatcgcctgcttattgtcagggtacagaagtttaatactttcttaatccagtttttcaaacttctccctgtagaccgtaaggatgaattccacaataggatcctttttaaaatcgattttaaattgttgcctagtcctgccaaggttattatgtgcatctgttatttttccaatacatgtaaacagttgcagcatgatgctttgtttaatgtcctgttcttaagctcgttagagccagttttgaaacgtttggtcttaccgtgaacggaggctggcttggcttagccacgctgatgagtaagtgagggatgtctccatcttgagatcaccaggcaagagagttgcctgcaccaggtaagaggccaaagcccctggggtaacagtccccaccgctacccgaggtaaaacaataaaagctatgtggttgagctcaggcctctcgtgcctggtgtcagagaaggcagagcccacagtaggtgcacggtgcaaggccctgggagggcactggccagggaaggtggtatagatggccctcagattgcggggccccgagcagctccccactctgcccgtccaccttccctggctccagcctcattctctctttagtttaactatgcaaagagaggaggttgagagtgttctggcagctggagctcttttccttgtccttcctgccctccgatggggccacctgtgtcggggcagcagtgtccatgtttatggagatcagaggtgtccccactgtgtggctggactgtactctgctgcccgggtagccaggagtctctccctctctcccctgccgcctgcctggtctcatgggcctccttcacacacccctccctgtggatcgcctgcctgggcccagagcaggggaactggagtttgtgagtgagcagagcaggttatgtgcagacagggaaacgagaactttggacctggctttctgagtccaggtgagagctgtgtggccccccgatgccactctgcccgccggagggatgtgcctgctgagccttttccttccacgccgcctctcactgccaggccagcggcttccgctgagactcgctggagaggcggctcccgtgtccgtccaccgagcactcagatggatgctgatcaccagggccgagggggctcccagaaggaccccaggccctggggagggtggctgtgggaggccaagtccactgcccggaagtcttgtcagccctaagccagggaagcctggagcgtggcctggcgggtctgggtggacaccgtccccactccggactcccagcacaggggaggatacctgagcctgtatggccctgtagccctgggcagagctgggcctgtcgtgtgttcctgcctggcaggtgcaggtgctggccatctgcaggtggaaggaggtgggaatcttggattttttgtttttttttgtttttttttttttgaggtgaagtctcgctctgacacccaggctggcgtgcagtggtgtgatctcggctcactgcaaactccgcttcctgggttcaagtggttctcctgccccagcctcccaagtagctgggattacaggcatgcgccaccacgctcagctgatttttgtatttttagtagagatggggtttcaccatgttggccaagctggtctcaaactcctgacctcaagtgatctgcccgcctcggcctcccagagtgctgggattacaggcatgagccagtgcacccggcggaatcttggaatttttatagacagcacctcagtttctgactccagccgcacacctcctgcctctgccagcaggggttgccgccagaccagagccagggccaggtccctgcgtccatcccccccggtaggatggacgtgagccatccttctaggggacttttttcagtgtgcgactcgtctctgttaggtggtaggagccagtttgtgtggcctgtgccacgctccacagtgcgtggctgggctctgtgtgtggcctgtgtcccctgtccctgcaggacccagcaggcatcgtggcgtgacagctgtgtccaagccactgcccgggcatcccatcacccaccagggtgcacggtctctcctgctgggggctttctgtcgcatgtgtgtctcctgtcgactctgcagtttgttctcagagcagaatgtttcctgttctcagtgcacaaagacactggttttcaatcggcgtctaaaaccacgttcctgcctttcattgcaacacggtgtgttcatttgtttaaaacagtttaatgagtaagtttagatgactggtcaatatcttaaaaatgtatattagtaagaagttcttcctggaatttttctttcgattctggcagaataaacaggtgtttttagttttcccactgtctgagccaagcaggaccctgtcccagagcaagagatgtccccttccatctctgacccttgcctgggacaagctttgatggggggccccagcttcaaggctgtggtgggaacagcacccccaaatgccagcctctcctttcttcccatccaccagtatactgcggggccatttctggtctttgtccaacaggaaacccatttctggtgggatatgccttccagtgccacagggccactcaccccatgcatctctgtcctgcccgtcagtgctgggacggacagcaagggcaagcccagtgtctggcggataggtgggtgggaacagagaggggagaatgccgtcctaagcttctgcttggggatcccccacacgacctgggtactgcctgggaaacctgtcctaagtaaaactatggacctcgcctcgcccaccggcctgcgaagccagcatctccgtgaaggtggatggaagcgcctttgtcctcattttgagctgcaagctgggtcagcggctctgaagccctcgagtgactttctaacccaagacccagcccctggcaggaggagggtgggtgcagggctggtgggacaaaaagaggcctcagcaggcctggaagacccttccagtacatcccacagcgtgtcgagcagctgggagaacctgtgtcaagctcgagccgtcataggtccccatgaggtgtctgaagccccttcttggtgatgggaggcagaggtgctgacgttctggagcatggacgtgagtcctcagctggctccgcgtgggcccttggagggtgccaggtgtgtggtgaccttctggatgcctttaacttcatggctgcgtcattcctgatttagaactttaaccggagcttcatctagtgattgcaaaactggaccaatgggaggacggcggcgcagcccgctccctccgtggaatggagctcagctcttcggaggcatcaaagcacctgtcgcctccgtggtccccctgctgagggagtgcggcctctgcaaggttcgggggtggcttcgtttgcctggagtggccggccctgcttgtgccatgtggatgtttgtgagcctcggtcctacagcactgtgtaggctgcatctgtttcgtgctggtcctgttgacttgtatgatatccacaaataaatattttcatggcggtcgtgttga

SEQ ID NO: 10760 - DNA, 328 bp, Homo sapiens
tgtggccgggccaaggacaggcagggagggaggccaggcctcgcttgcaccgcgggacgaggctgaccgggctgttctgtagactcaggaccgtggctccagaactcctgtgccaggcgggagggaagggcggcactggagagatgggcccatcattaggggccagcatcccaggaactggacctttccccagagcctccgcctgtggctgtgatgaccttgggccagaaggtcaaactccgaagactgaaactctgcctgcagcaggactggccgcccctgctgtggggggttcagaaaataaaatgccgcgcagcccttgccaggg

SEQ ID NO: 10761 - DNA, 5201 bp, Homo sapiens
ttaatggctgtgactgaacacacgcggccctgacggtggtatccagttaactcaaaaccaacacacagagtgcaggaaaagacaattagaaactatttttcttattaactggtgactaatattaacaaaacttgagccaagagtaaagaattcagaaggcctgtcaggtgaagtcttcagcctcccacagcgcagggtcccagcatctccacgcgcgcccgtgggaggtgggtccggccggagaggcctcccgcggacgccgtctctccagaactccgcttccaagagggagcctttggctgctttctctccttaaacttagatcaaattttttggtttttaatcagttatcttgggaacttaacctggcccctcacctcttctgcaccccccgcccccgaaactgtctcgtaatgaatttctgctgtcctcctgggagtggacggccgggtcccgtcccccgggagcatcgctcggctcagcaccttggctcccagtgggggccccgtggagggcgcccgtagtgataagcacaccggcacgaacgtcaggtccattcctcgaagtcggagccctcactctgccctgtcctggggctggctgagggcgaacgccccacctcactttctagagccctgtctgtcctagctcctatctgaccttgtgtgtaaatacgtacatctgtttttaaagtggatgggcccctgagaactcagtgaaatgcagagttctccatgcacctaaagctcctttgtcgctctcatggctgtcagatcctggtccctccacactgggtgctggggagggaggaccctcggggctaccgcgcgcccccccatcccacagatcaggagccaaggagggagaacagggcagcctgtgggactctaggatgcttcagaagaagcgacggcaccgtcaaccctctgttttttaaaggtggttggagactgttaacactgagctcattgacttctagagattttatttttactggttgatctcttggtggttttcaacttcctgctggaaactagaggtggggcaccccccaccccccagcctcgcactgtgtccttggggaaggcccgcccccatcctggccggtgtcactgtggcccggccacccctgagcgcccagctccctacctcctggacgtctctgagagtccaggcagagcagagggcagcgctcggccggtcatgctggctcccttggccttgcagcgagcccctggcccacgccgagcgagggatgcttctccctacagcatgtccactcccccggcatggccaggtggggcccctggggcaatggcagtggtagaacgctcaacttggttgcggtaccatcagcccacctgcatttggctttcgacttgcttgttctaagtcacagcgccctcatctttttagcaaggtaaaaaaaccaaaatgggtgttatctctgatatcttgaaaccagcgttctgaatagaggtaggttgagttttctaggggaaaacaaatggagaaaagaggcatgaagaaaagtaaaccgagaacataattaggcatcgggcctaagtgtcctggggagattggaggggacggcagcgttctgcatgatggaggcgctgccgggccccgggtctgtgggggccgtgctctcagggcgtgtgcgggacgccacctgtgcacacctgctcagagcacggctcctcgcaggggtgaaggggcagaccaacgaaaccagatgagaccaacgacaccatgcgagacacgcttgcagacactgttgttttggaaatgtgcttccctccatctgaaatctcatccctccacccgcccactcgggcagctgtgccgtgggcagggcatgcgctcccctggctgagcaccccagagattctcctgcaccttcctcatgccgcacgctgctcatccgtctccatgtgtgtttagatccatgccattcactgactcactaacacctgcaaaatctttaaggaaaaaagctgaagggtacgaccatgcacatatgtgacctggaaaatgcaaatttagatcttttatgatttaattattattgtttcccatagaagttccctccctttgaaattaatatataatgtataaattctgcactgagccatggcggagctgggcagcccctaggttagagtggagacggaggcccaggcgcaggggtcacacctcatctggtttccttcccatctcacagcttagcttgtgcttctcaacaccaagtctttaagagcaataaaaactacaccatgaatgtttgaattttttttttttgggggggggagggtggattttgcttttcatccagaaggaaaaggggaggagagctcctttacattttttaaattaaattcataaatcccagaacagtcttttttttttctttttcctttacaccctacttctgagcttaattcagttgatgttatgtccaaattcaggctgagtgctcaggctgaagcaactctgtagcccacagtccgtgctggccactgtcggggtgaggcacattctaggcctggcatcgctgatgccctctgcacccagtccttgagccaggccgaggacaggaagggcattgctggcctgtagctcctgttacccacccagagccaggcgccacactggaggctcccaggcgggagggcccaggcccacccacgggcgtctggccggtcaagctcccagcctgggccgtggtctcctggggacgccgctggcctcccagcttaggcccaggtgccaggtgtcatggggtctcctgcccatcttcccaaggatgccattgctgtcttcatcgtcttcccccgtgtgagacactggttgtctggtactcggcgacagtgtaccagacgcgcaccctatgtgaggtgctttaaggtccctgtcctcaggaagcgcagtctggtggaagagatgagcgctgaacaaatcactaaataacacaaaacaacaatgtaagcagcactttcttgtgtaaaaaaaaaaaaaaagcacgtcctgtcgatgaattttgagtctctctgccttgcctgtcccgactccctttcgcgcaccgtggcatgagaatctttcctcacgctgttcgttgcggtattgctgagcattgatgttgatttgaaggaaaagccgtggttggacccagctgtgtgtttcactcacgtgcaattgagtagctgttgccaggctgtccatgcctgttgtgactaccggttggggtcagatttggggtgaagaatgagtaagtttctgcatgctttgtctctacctgagacacttctacaacaagccaagtataatctctccagccctgcagattttcacctgacttgttcagccccatgcgtagactcccgctgcaggcctctggcctgtggctcactgcatgcagcccctggcgtgcaatactagtgctccacggcgcgatgtgcttctagcccttgcactgcacctaggctcagggttcaaacggccagcccgaaaagcctgcctgccttctttctggaaacagcacgtccccggccgtgtgcctgcccctttctctactgagctagtccccaaaccaaaggcaagccccctcgggcctcgggggatggggccggccacacccctgactccgccctggctctgccccatacccctgccgtggggccgacctgggggatgcagacatccggctccgtattcctgcctatcggggccaggatgcaaaaacaatttttgcgtaaaagatgtcacactgatctgctggagtggggtggacacatgaattcagttttatcatgaacactcgccactggctgcttgttaattcagggataatggtggcattcttacaaactgctcgggaaatagaatgacgggaacacttttagggagcccaggaagttaccagggacattggtgtcgccggcccaggcaacagcagcgtacgcttttcaaagatcattgagttgtcttagaatttgaagctgtgtaatgacaatgtcacctggagttcgtctccatttcttaactttttgttgcacaagtatttggacagaagtcgaactgtgaatgagatactgaaatgcactaaattgtattacattaaactggagttacttgatacaatgaagaaatgcatctgatctacttgtatttattgtctcagaattgtacgttgtgacaatcaaatgttacttgcctaaatgccaggaaattcaactggccttttaatcagcaagatcgccagcaagtactgtaactgtaaaggaaaatctctctctctggagaacccacacaaaccattgacctgagtgcgcatgacagccactggcttctttttctatgattgaaaatctgccatcgctgactgttggccagtttcaaagggacccattgtatacagggtgcaaatgtattatacggatgtttccttttgtacacttcatttttacaagttttgctactcacaagctttatgtagtggaggatagaggtatttttggtctttagaagcttgtcggggtgagggctgctaacttacacttcagaggcctgtgtcccaaaggcctggctgcgtttgccgtgctgtgcgaggacctgtgtacacaggcaggtgtgcgcctgcccgagcgcgagtagctcttgtgtagtggtgaaatgctgcaggcatctgtttattaaaattgctgctgtgaaagacagggataaaatatccacaatataagagaaagcgactccgtgcctccttctgtttcttcgtttccagtctgcatagatgtctccaaggggaaaccagggccaccaggcactcctgtcccatggggccacccaccttcagagcccactcccacgggctctgtttccttggaggccatcctgccgatggcacttttcaaggccctcccttccctacgagttgctttctgggaggggaaattgaaaaggagagcggtcacctggcaaaaacacaggggaaatcagccagtccacaaaaatacgcaaaatgacctgatgatgtccaaaaaagggttttaaaagcgatcaaggacaaaaggttttcctaagtggcatgtatacatccaaaactactctttttttgtaaaaacattcatctgtggagaaaaccaaggaacccctttctcttctttattaaaaagcaaaacaaaaactcttgttagaaccaaaag

SEQ ID NO: 10762 - DNA, 3015 bp, Homo sapiens
caacgccagggtgaacacacgccacttcccagctaggagtgcactttatgggactgtgactggactcttccgttctggctccagccagaccttcagtggtcctgcctggccgtggggacatcagagagtgtcatcacgcagctggccagctgagttctgttgttgttttcatgccgcctgtgatctcagattcctgcttttctcaccccgtccccatgctggtgtccgacgccgcttactcagagccctggcctccctccccctacctcacacgctgctcatgaaagtttccacccacgctgtctccacggaacagcctccgtctgctggctcttcgtggaaggccatttgtctttcaggtagacactcagcagccctcacggtcttagtgacgtgtgtgcctttctggtcacacagctgcccagtttcctgatcggggtggatttgtgtcccctaaggggtaaaacagccgtttaccgcagatcctctcattgtgcttttctagaataacacccttctaggggaggcgggtgggggagggagggatcataaccccttctgtgccttgggatgccggagctgggggacctggaggcccatcagccggagccacgtgaaaggtactgaagaaagctgagacccggctgtgaggagcgcctcagcggtgaggtggtttagggataaatgtttctggaaccctgtggtcccccataatgttgatagaatatcatatgcactgggagttaaatatatttaatttaatgatcattatatatgtgggggttaatatgttgtttttctgtccctttaaagtctttacatgtaattgtagctgtataatcgttatttttcttttgcatcttaagtcttagaaattaagatattccatcgtgaggatgagagaggtcctcagtgtgtttttggtctggttgtagggaaggactcaagtcctggaatgtcctccactggtctactgagttgcagtcacactgttccaatggattatttgctttcggttgtaaatttaattgtacatatggttgatttattatttttaaaaatacagactaactgatgtaatgtttatgtataagttgcaccaaaaatcaaggacaaaaataagtgtgtttgtttttacaggtgtgaaagtcacagcttgtaaataagtgttgtatgtattaaaccttttccagttctccaaagcgatgtatttttgtacacttgaaatagagtactcttaatttactgggcaaatgtgcttggaattgaacttgacaagattagctcaagcagatagagtcgggtccagcagtgggtggccctcgtgtgaatccccgtggatgtgcaagttgtggagagaaggagcaccgggttcctgcccagcactgtgcttgcgggaggcggtggggcatgggaggaaggaggcacagaccggggaaatatgacagccgtcatttccagtattctctgtgttgtcttttagctcattcaataaataaaggtggtgtgatttttttttcctcctgtctttttcatttgtagaaactggagacgtgtaaagaagataaataattgtgtaattaaactttccagaaatttatcttcctcatgtgcagtttaacaaacttggtcaaactagttagcaaattagaacttcagaatctaatgatagtttagggtttctaaaataaggttttttattgtaaaaattgacgattgccctgcatttctaccaagtcctgtgaataaagagatgggagatttgattccgtcagaagagactgtaatccgtgtcgtcagcctgggagccttccccagtgtaatgtagctttctctcttaccttctggaagagggaatgtttcatttattactgtttgattttcttgtatctggttctactcccaggatgaaattatccaactacatatatatttagaggaagaaagtgaaggggaaatttaaaatgtttacggcgcttaattgcctggaaatgaaatgaaatcaaatttatcagtttttttccccctaattacccaaaagatcttttgcaaactatgttacatgaatgcttctgcctctttaagacaaagaagaatgtcacccaaaattgtcatttttttcttaatgttcatcataaaagtcctaaaagagtaactgtaattggatgtttattgtttttatctaaagtaaggtgtatgtgtttgagacaagctggttttgttgataaagagatgttaaataattgtgaagccagatatgcaatgtgtatctgaaaagcaaggaatttgcagccgttttacaaatatctgtggaacatgtaaatactgtcaaatggaaaataaaataagttataatttttgtgaatttcatgggatgtcctatgattggaaaaattataactcttctgattctaatgtggaaattgttgtatttaatctgaaaatgactttacctacaacagttccattgtcagcacagcctaggaaggtcagatcctgtattaattactcttagtggagatgccagatatcccatacagaattagcagagaaaatacacacaggcttctattcaaattttctttagtgcttaaaattaagttttaaaatgaaatcagacactgcaggtttgtatataaaatgaaaagctatactactttttacaaaagggcaaactgggctgatgtaaatgttttactttcaactgtgttctttaaaataaatcctacctggtttttaaattttatttttcatgaaaatgctcctttctctacatttattcatcctatatacatcaggctgtaagaccccccccagtcatcattaatacaatgtgttgggattctgtgactggaaaaggtgacaagttggtgactttgacactgcaggtattccattttcatggtttactatgaaaagtcatttttcatattatgtaatatattgttagattaaaaccattgtattaagactttaaaatgtaagcattgtaattctgaaaatacacattttaag

SEQ ID NO: 10763 - DNA, 758 bp, Homo sapiens
tgcttcgattctgtccctcgttagaatcagagtggacgtccctttgccttccatccaggggttatctttggaatgctcgagtgctcattgctgtgaacttataaaatgcccttgggtgttcatctttcttttgcacttttaaataatatcttaagctcctttacaattaaagaattagcacagtgaaaccatacacagagagaaacattggttattgtcctcagtgtttttcgctgatacttattttgatgaaagtgataccacgttatatagctgtttctctgtcgctcctttttgttactcacagcccatcctgggcatctctccaggttagcaggtggggtttggagttgtttttgttacaattggtattcctggcttgattccattacctggtgttggacattgggttcttttatgcttcttgccaccacaagcagtgctgtagtgggcatctctgccaggtgttctttttgagaacccttgtcaccatgtgtgaaggaaggagtaattttgaggagccctggtgtcagcaggagaacctggagggagatgaagtgtggggacggtcagttctagctgtgagcactgtcctcactctggaactcatcagtggcgccgatggatactggctcatagtgcttctgaagatcaggtctggatatctcactctcctgagatgccagtatagacacagaaccaaagcaaagtgtttactaagtaaaaaaataaaataaaaaaacacttctatttcttat

SEQ ID NO: 10764 - DNA, 409 bp, Homo sapiens
agccagccggttgcagcgttggattgtgccggctaagacctgccagggagatgggacccttgtgccacctgggccagcaaagaggaggggtccagagaacagctgaaatactgtcactagtggtagtgacttgcttttcctgtgcacacatgtagcccatcaggacagcgagccgacgggtcacgccaggggccggcacgcactggcacctggccccaggagcggggccgtgtgaacggtgatgaatgttgaaaatgcgtctcagagaggtattcacatgaactttgtatgagacttatttatatctttaacataaaggtttgataaagaacttagggattaaaaaaaagatggagttttctaacgtgaggatgaagtctacacttcagattaaaaagggttatgttgt

SEQ ID NO: 10765 - DNA, 774 bp, Homo sapiens
cgcgcatggacggggcccagctaggcgccaggacttggcctcaccctctggctgaggagctgtcggctgctttccatccagctgggagtctggcaggcccttttttttttttctttgccgaaacctgcaggcgttctctctctaaggaggatgtgctgcagtgcatgggggatgtttcttcctgggtgtggctgggctgctctcacatacagaggccgaggggccaattcgttctctgccacagggacttgcctcactgtgtcccaaaaacaaatcgcagccagcttttccagaaatagaaaattctgccgtctgaggttttatacttcaggttagttagtttttggaaggaagaacatttttaggtttgcaagcctcctgatcaggaaaccagaaataccacatttatggaccatgaaaggttggttcttgactctgaagggacttttgagttaatcagcgtaaggggatttctaaagcaggcaatccctgtagccgcagagaataaacgccttcccaaaatggcaacttcccacagccacatttcagacctgctgagactgctgagtgaggaatggcagtgaggtttcttcaattagtctcagttctcttaattttcaggaagaaagggaaattgcagcccctcagcccccaggattgacctctggggagtgatggtagcgttggtgccaggccgtgggttcaggtgtggcagaagcttgcagatgcgtccgaagggaaataaagtgtgttggcgttagactttgtgctgca

SEQ ID NO: 10766 - DNA, 492 bp, Homo sapiens
ccccagatggccgggacatgcagctctgatgagagagtgctgagaaggacacctccttcctcagtcctggaagccggccggctgggatcaagaaggggacagcgccacctcttgtcagtgctcggctgtaaacagctctgtgtttctggggacaccagccatcatgtgcctggaaattaaaccctgccccacttctctactctggaagtccccgggagcctctccttgcctggtgacctactaaaaatataaaaattagctgggtgtggtggtgggtgcctgtaatcccagctacatgggagcctgaggcatgagaatcacttgaactcgggaggtggaggttgcagtgagctgagattgcgccactgcactccagtctggtcggcaagagtgagactccgtctcaaaaacaaaacaaaacaaaaaaaccacataacataaatttatcatctcgaccacttttcagttcagtggcattcacatctcatgtaa

SEQ ID NO: 10767 - DNA, 510 bp, Homo sapiens
ggccagccatgcccacgcccctccccagcccccacccatgccagcgcagcgccagggctcagatggggcctgggctgttgtgtctggagcctgcaggcaggtgggggctgcgtccctgctcagcccatcccctgcctctatccctggccacctgccaggcctccctcgggctggtgtcttgagaccagcctgccaggccctccagcaggaggacagagtgccctggggcatccaccttcctgcccaggggacgtggcgctgtcggtgtttggaggctgctgccccctggctttggcgccccatgggccctcagcgtctccccatgctgggctcactacatgggccagcccttgctctacctggccggtaggctgctggcgcctaggttgtgttgagagggggatgcccctggccctgcctcactgtgacctgctcctgcccacgtgcagcacctgtcaccttttctagaaataaaatcaccctgactgtggggtgcatcggtctccggag

SEQ ID NO: 10768 - DNA, 1264 bp, Homo sapiens
ctgtgccctcaggctgggcggctccagtccatagacgttccccccagaaaccagggcttctctctcctgagcctggccaggactcaggctgttcctgggccctgcacatgatggggtttggtggacccagtgcccctcacggctgccgcaagtctgctgcagatgacctcatgaactggaaggggtcaaggtgacccgggaggagagctcaagacagggcacaggctactcagagctgaggggcccctgggacccttggccatcaggcgaggggctgggcctgtgcagctgggcccttggccagagtccactcccttcctggctgtgtcaccccgagcagctcatccaccatggaggtcattggcctgaggcaagttccccggagagtcggggtcccctgtggccccctcaggcctatgtctgtgaggaaggggccctgccactctccccaagagggcctccatgtttcgaggtgcctcaacatggagccttgcctggcctgggctaggggcactgtctgaactcctgactgtcaggataaactccgtgggggtacaggagcccagacaaagcccaggcctgtcaagagacgcagagggcccctgccagggttggccccagggaccctgggacgaggctgcagaagctctccctccctactccctgggagccacgtgctggccatgtggccagggacggcatgagcaggaggcggggacgtgggggccttctggtttggtgtcaacagctcacaggagcgtgaaccatgagggccctcaggaggggaacgtggtaaaacccaagacattaaatctgccatctcaggcctggctggctcttctgtgctttccacaaataaagttcctgacacgtccagggccaggggctgtgtgacggctgcctgaagttctcctcgatcccccggtgagcttcctgcagcctgtggatgtcctgcagcccctcagccctacccccaagtttctcctctgacccatcagctccctgtcttcattttcctaaacctgggctccagcatcgtccccaagcccaccaggccaggatgcaggcatccacatgccctcctccttggcttcccctgcgtggtggtgccaatgtgccctggcacccctgcagaggctccggatggagcctggggctgcctggccactgagcactggccgaggtgatgcccacccttccctggacaggcctctgtcttccacctgacccaaagctctctagccacccccttgtccccaggtat

SEQ ID NO: 10769 - DNA, 1429 bp, Homo sapiens
cgcctgttccggcagacccccgccggtggctgctgtcacttttgtagtaggtggtgactgatgctgcttttgctcttccctgaggcaggtgtcacagccatgtgtgctccccactgttgcactcaggcacagcagcacctccaggctgggtggttttgccacacatccgtgtgacggatgaggaacctgaagcttagaggaacggaatgactgcccgtgacgataccatcaggaaattatcccagtggaacttcaacccgggctgtccatcgtgacattccgcctccttccaccatgccagcctctcccacacggggccctgcaggctgtggatatgcactcagaggactaagggggtgctctgcaagcgagagggttcaccagagggagcttgggtgcaggttcacccgctgaaggcgctgataagtcctgtgctgaggagctgacttgcccttgtttacttacaaagtgcattgtaggtaaacatgagccttgttccagtgttcgaagtacattggaacgtaagccctgtttccagagcaaagtaacagagaccaggtttttctagagagctaagtgggatgtgtagctcaaacaaactgtcctacccttttttattctcaaatgtttgttttgagtaaccgtagtgccaaaatttcagttcagtaatggggtgaacaatatggagagagacctgggaaaagtccagggtagcttgcccaggggaagacagcagccacatacctgggggcccgcctgcttcctgcccctctgggtgtgcctgatgcgggaggccctgccccagggcgatctcagctcactgcaacctttgcctcccaggctcaatcacttctgctgcctcagcctccctagtagctggaattacaggcatgagccaccacgcctggctaatttttgtatttttagtagagaccgggtttcaccatgttggccaggctggtctcgaactgttggcctcaagtgatccgcccgcctcagcctcccaaagtgctgggattacaggcgtcagccaccgcgcccggccctgtgccttgctttttctactcactaagatataaaacagctctttttccaaggcccggagtactggggattgatgtttcaaggccaatcaatgggatgcttcgttttctccagcaacaggaactctctcttttcacctttgctgccaggaatctcagagataatttagtgctcaatttactaaccttacttcacattcaggttagatgttacctccacctatatgatagtaattcctaattttattttttattgtcctttttatgagtgtttatattttaaagtactttgagtatttttggggggggtgtaaatgagtgatcagtgtacattgtgtgtggactgaagtgtaggtatgtagagatgcttcgccaaacagatgctt

SEQ ID NO: 10770 - DNA, 146 bp, Homo sapiens
cgccccgtgtgctcccgcccagcctgctgaggcctccgctcaggtcagaagcccagctgctgatggacacgccccccagtgccagccaggctcaggtcccacctgaaagctgatagtcgcgtcctgaattgctcctgcactttgac

SEQ ID NO: 10771 - DNA, 442 bp, Homo sapiens
gtgatctccttaagatcatccaaagcctgagtgctcactgccacctgcacccctggattctttacccttgacggctctccacatcccgctcctaagccctgcagtggacatcagtggtcagctggccatccagtgtgcgcttctcctcctagaagcagctcagctgtttctccaagtcttgactttcccccaattacccagccctgcttccccagcaacaggtgggcagtgaccccagcaaggccagcgggtgctcccaggccatagcccggtgtggggagaaacgagggtagacacgtaccaactgtgggtttctcgtcactgtcccagctcagtggcgagccctgctcctcccctgctgtgggcctgggcctctttctctgtcttccctgaccacgggagcaggtcagacccttctaataaactcctttcctaaaaagta

SEQ ID NO: 10772 - DNA, 74 bp, Homo sapiens
ggcctctgctcaggccaggagtccagctgctgatgggcacgtcccccagggccagccggctccggtcctgtcct

SEQ ID NO: 10773 - DNA, 328 bp, Homo sapiens
cggtcatgtcccccagggccagccgggctcaggccccacctccctgccagtccttggacctcccagcccacccagcctcagcacagctcaacacagaaggagcagccccagccacagccgcccagccccggggtctcagatgctcactggctcctccctgacctcccccccgggcaggcgagccctggcttctcctcacggtgcttcctggctgcagaccacaaccctccgctggtcgctggttggggacgggccctcctgacccgggtctcacccccagcagcgtcaccctctgcccctgagcaccaataaagcgtctgcggcccca

SEQ ID NO: 10774 - DNA, 280 bp, Homo sapiens
cagccctggatgtgatccggagtcccttcccaccaggggctgacctcccagctgccccagcaagctctgccctctctggctttgacaccctcagaaggtggggcaggctctttgtcttggggaccaggatgctcccccagtccttcccagatgatggctgcctgtgggaccccagctactcccccagacccaagttctgcagaactaacccccagcaggcctggttccaccctgggcagcaccccctctagttctaataaagccgcctctgtctcacacc

SEQ ID NO: 10775 - DNA, 294 bp, Homo sapiens
gtgctcaatccttgtctcctgctgactgtgtctttgctgccaagcaggattctccagtctcaggagcccctggagtcctcagaatccaccagctccatcagtagccacagagctgctgcctgaaggggattttgagcgcgtcacactttcctccccactgtctgggaagagacaacccacaaatccctcagcaggtggactgtggctttctggagcccccttctccaaatgtgttgcttatacccaatgtgacaaagaagaactgctctaatcaataaattcttgagtcaggaa

SEQ ID NO: 10776 - DNA, 71 bp, Homo sapiens
ccagctgctcctggtacacgggggtacacacctgtatccctccgtgaataagcatctggtggacccccaga

SEQ ID NO: 10777 - DNA, 105 bp, Homo sapiens
ggcctctgctcaggccagaagtccagctgctgccaggcatgtcccccagggccactgggcactatgagtcccccacctctcccactactggcccctcggctgctc

SEQ ID NO: 10778 - DNA, 169 bp, Homo sapiens
ccagggcagcgggcatgccacaactcctcaggacacatgtgggccaagtagagagcgccggcccctcaaggaccatggcctgagcctggtggacgcccttccctctggtcggttgtggggctcaataaatggctctgtgaacttcccctgcactgccagggccgttccc

SEQ ID NO: 10779 - DNA, 4362 bp, Homo sapiens
cccgggcagacatgatggggggtgcagggggctgtgggcatccagcgtcatcctccagaacctcacatctgaactgggggcaggtgcataccttggggagggagtagggggacacgggggaccaccaggtgtccacggttgtccccagcatctcacatcagacctggggcaggtgcgcagtgtggggaggggatggggtgcgtcagggcccagcatcgccgcctggcatctctctgccgcagcatttccccttctgaaccgtccagtgactgctttcaatctcggtttacgtttagaaattgagttctactgagtagggcttccttaagtttaggaaaatagaaattactttgtgtgaaattcttgaataaataatttattcagagctaggaatgtggtttataaaataggaagtaattgtgtcaggtcacttttatgccacattattttaattgcaaaaaagcatctatatatggaggagggtgggaaaatagaggtaggaaatagtagcctaaaggaaatcgccacacgtctgtctaaacttaggtctcttttctccgtaggtacctccctgggtagttccacacactaggttgtaacagtctctccctgaggagcagactcccagcatggtgtagcgtggccctgtcatgcacatggggtcccgcagcagtgactgtgtgtcctgcagaggcgtgacccaggcccctgtagccctcagcctcctctagaagcttctgtactccttgtaggatcagatcatggaaaacttttctcagtttacttctaagtaatcacagataatacatggccagtaatcccaggctggccattcattcaggttttttaaaggatatttaacttttatggactagaaggaatcacgagggctactgcacaatacatggcctaagttccctctgttccttcctctgaatcgaatggatgtgggtgaccgcccgaaggccttcacaggatggaagtagaatgatttcagtagatactcattcttggaaaatgccatagttttaaattattgtttccagctttatcaaagacatgtttgaaaaataaaaagcatccaagtgagagctggtgagaccacgtgctgctggcgtagtgtaggccagacattgacagtcctgacgggagctcagggctgcccagcgcccagcgtgcacgggacggccccacgacagagggagtcagcccgggaggtcaggagcgcggcgggcgagggccctgtgtggaccacctccaccaagctcagagatttgcaccaggtgccttgttgcctccgctcaggatgaaagaggagctgagagaagtgctctgcctgccagtgcagtgcccagctccaaggctctagagggtgttcaggtgggtctcctggggccatggggagagattggtgcagaccttaccccacagcatacacctgccacagcgaaatccagggtgttggcacctgtgtgtccgtgatgagcctaggaaaccagagcaggggcagaggggcgtcatcctcccaccggacgctgggagctcagaccccaaaactgaaacaccgtggcttcggcggggggtgtgcctcctgatgtcaggagccccatccacgtgtgtccacacagatctcgtcgcagcacggcaggaaggggtgctgcttagggctcattgttggggacatgaccgggttcagcggctagaacatctgccccacagcagcctcctcctccaccgaagagggtagttgtctccctgaagcagtcacagcaggcgtctctgccgctccgtcaccacagtggggttttgttcaggcagatcgcgctggggttctgcacctgcagaaggagaggggtctgttgtcgctggctttcccccaagcaggctcttgcacactctagaaaaaacaccttgtaagtctgtgcatttttattgtcttgataaattgtatttttttctaatggggattgggagatggacttcgtttttaaaaatatgtggattttggttaccaagtttagtgttaatatattccatatacatacaaaactacccggtatgtctggcttttcccttctgtcaggtaatagctaaagtcagcatgattgctccctgtaccaccccaaataagtgagtgcctcaccttgtggggcctgagcagctaccttgagaccatgtgaggtggcacctttccggggtggactcgtgcggccttgaggacaggcacagggcaccctatcccaagccgtccaggcaggaggaaggcagccaaggcaactgggttctgggagccctgggtggggcagctgtggggaggaactgggttcggggagccctgggcggggcggctgttggggggaactgggttcggggtgccctgggcagggggctactggggggcggctgtgaggaggagttgggttcagggagccctgggcggggtggctgtcagggggaactgggttccgggagccctgggccggggcagggggcggctgtaggaaggaactggtttcggggagccctgggcggggcggctgtggggaggaaggtgacgtgcaggggaccagaggctctgcactgctcctaggacagctcatctgtaatcagaaaaaaaataaacaaaatacagaacgctgactcctccgtgagacagatcggggaccttagcactttaatccctcccttctgagcgctcggtgtgcacttttagactatagctgtttcattgacgtgtcactctccatccagtgtccttgatgtggcttttagagacttagcagaaaattcgacacaagcaggaacttgattttttaagaaaaaatattacattttgaggacattttgacaagtaggggaagagagggcttctgttgttttgttttgttttgttttgttaactaaacctgaagtattaattccacaaagacactgtccctcaggaccactcaggtacagctctgccagggacagagtcctgctagtgggaggtctcaggtggggcggtgtgttctgtgccatgaggcagcgacaggtccagatggatgtcgtcaccaccttcctcagctctcatcacctggtcgtacgccaggcccacctcttcccagcaagggacgccaaagaactgcagtttttattctgagtcttaatttaacttttcatcatcttttcctattttggagaattttttgtaattaaaagcaattattttaaaatgtgcaagccagtatctcacaaggcatggatttctgtggaatttatttttattcaaataaccatatttatctccaggctgtggaatcgccactttctttgtgaagacagtgtctctccttgtaatctcacacaggtacactgaggaggggacggctccgtcttcacattgtgcacagatctgaggatgggattagcgaagctgtggagactgcacatccggacctgcccatgtctcaaaacaaacacatgtacagtggctctttttccttctcaaacactttaccccagaagcaggtggtctgccccaggcataaagaaggaaaattggccatctttcccacctctaaattctgtaaaattatagacttgctcaaaagattcctttttatcatccccacgctgtgtaagtggaaagggcattgtgttccgtgtgtgtccagtttacagcgtctctgccccctagcgtgttttgtgacaatctccctgggtgaggagtgggtgcacccagccccgaggccagtggttgctcggggccttccgtgtgagttctagtgttcacttgatgccggggaatagaattagagaaaactctgacctgccgggttccagggactggtggaggtggatggcaggtccgactcgaccatgacttagttgtaagggtgtgtcggctttttcagtctcatgtgaaaatcctcctgtctctggcagcactgtctgcactttcttgtttactgtttgaagggacgagtaccaagccacaagaacacttcttttggccacagcataagctgatggtatgtaaggaaccgatgggccattaaacatgaactgaacggttaaaagcacagtctatggaacgctaatggagtcagcccctaaagctgtttgctttttcaggctttggattacatgcttttaatttgattttagaatctggacactttctatgaatgtaattcggctgagaaacatgttgctgagatgcaatcctcagtgttctctgtatgtaaatctgtgtatacaccacacgttacaactgcatgagcttcctctcgcacaagaccagctggaactgagcatgagacgctgtcaaatacagacaaaggatttgagatgttctcaataaaaagaaaatgtttcact

SEQ ID NO: 10780 - DNA, 1321 bp, Homo sapiens
ccaccgcctggatgcggatggccggagaggaccggcggctcggaggaagcccccaccgtgggcagggagcggccggccagcccctggccccaggacctggctgccatactttcctgtatagttcacgtttcatgtaatcctcaagaaataaaaggaagccaaagagtgtatttttttaaaagtttaaaacagaagcctgatgctgacattcacctgccccaactctcccctgacctgtgagcccagctgggtcaggcagggtgcagtatcatgccctgtgcaacctcttggcctgatcagaccacggctcgatttctccaggatttcctgctttgggaagccgtgctcgccccagcaggtgctgacttcatctcccacctagcagcaccgttctgtgcacaaaacccagacctgttagcagacaggccccgtgaggcaatgggagctgaggccacactcagcacaaggccatctgggctcctccagggtgtgtgctcgccctgcggtagatgggagggaggctcaggtccctggggctagggggagccccttctgctcagctctgggccattctccacagcaaccccaggctgaagcaggttcccaagctcagaggcgcactgtgacccccagctccggcctgtcctccaacaccaagcacagcagcctggggctggcctcccaaatgagccatgagatgatacatccaaagcagacagctccaccctggccgagtccaagctgggagattcaagggacccatgagttggggtctggcagcctcccatccagggcccccatctcatgcccctggctgggacgtggctcagccagcacttgtccagctgagcgccaggatggaacacggccacatcaaagaggctgaggctggcacaggacatgcggtagccagcacacagggcagtgagggagggctgtcatctgtgcactgcccatggacaggctggctccagatgcagggcagtcattggctgtctcctaggaaacccatatccttaccctccttgggactgaaggggaaccccggggtgcccacaggccgccctgcgggtgaacaaagcagccacgaggtgcaacaaggtcctctgtcagtcacagccacccctgagatccggcaacatcaacccgagtcattcgttctgtggagggacaagtggactcagggcagcgccaggctgaccacagcacagccaacacgcacctgcctcaggactgcgacgaaaccggtggggctggttctgtaattgtgtgtgatgtgaagccaattcagacaggcaaataaaagtgaccttttacactg

SEQ ID NO: 10781 - DNA, 747 bp, Homo sapiens
tcctacccagcacccttcccccgcgtcacccacctgccagagcctaaggcccccggctctcgcactctgtacagcccaccttccctgcctcacagataccaatagagaggttttcttaattaacaaaaggacgtatgccatggagaaacacacccgcgcacacagctgctctctacagaggctgcaggctccgccgagtcccccctcagtgttattttatttatgacttacgctcccgtctgcccatgcaccggcatgcagtggtaattattttagaaatattgttccttggtgtcagcgtagctgtctgtcttaggagctgggtcggcgttccgacagcacttcctgtccgcccttctcctctgccatccagaaccgtccagaactgttgcctgagacccctcctctctcacacagccctgccatgctgactcggtttcccctcagagccattgttgtctgggctcgagtttctgccccaggttgtgtgctggaatcggggggtggctctcctgccacccatggggagcgccaggagaggagggtcatggaggatgttggggctctgaccccaggagtggggtggagggcggagcctgctgggggccctgccttcacagagatgccgcgtgctgggaaggctcttggggtcccctgagcgtcttccagggtggctggagagcacagacgcgccagggagccccctctgtgctcctcagagttcaataaatgtcgtggcccctcctc

SEQ ID NO: 10782 - DNA, 1036 bp, Homo sapiens
cccaccctgcacgccggcaccaaaccctgtcctcccacccctccccactcatcactaaacagagtaaaatgtgatgcgaattttcccgaccaacctgattcgctagattttttttaaggaaaagcttggaaagccaggacacaacgctgctgcctgctttgtgcagggtcctccggggctcagccctgagttggcatcacctgcgcagggccctctggggctcagccctgagctagtgtcacctgcacagggccctctgaggctcagccctgagctggcgtcacctgtgcagggccctctggggctcagccctgagctggcctcacctgggttccccaccccgggctctcctgccctgccctcctgcccgccctccctcctgcctgcgcagctccttccctaggcacctctgtgctgcatcccaccagcctgagcaagacgccctctcggggcctgtgccgcactagcctccctctcctctgtccccatagctggtttttcccaccaatcctcacctaacagttactttacaattaaactcaaagcaagctcttctcctcagcttggggcagccattggcctctgtctcgttttgggaaaccaaggtcaggaggccgttgcagacataaatctcggcgactcggccccgtctcctgagggtcctgctggtgaccggcctggaccttggccctacagccctggaggccgctgctgaccagcactgaccccgacctcagagagtactcgcaggggcgctggctgcactcaagaccctcgagattaacggtgctaaccccgtctgctcctccctcccgcagagactggggcctggactggacatgagagccccttggtgccacagagggctgtgtcttactagaaacaacgcaaacctctccttcctcagaatagtgatgtgttcgacgttttatcaaaggccccctttctatgttcatgttagttttgctccttctgtgtttttttctgaaccatatccatgttgctgacttttccaaataaaggttttcactcctct

SEQ ID NO: 10783 - DNA, 877 bp, Homo sapiens
aaggttttctcggggtccgtggtgtcccccaaaggtgccaccgtgcgggtctcctagctccctgccagcttcctgtccctgtgctcactgcccccacgcctcctgccaaggccgagccacacacccgctccacctgcatttcctctaccgactcgccagcccaaatgccgctcttcactctggcctcgctgagcggctgcccgaggaggagctctaggccgacgcccaccgcaggccttacagtcttctctggacgctcccttgcagatgcaccgtggcctggcggcgagcccccggtcaccttcctccgcacggaagaggggccggacgccaccttccccaggaccattcccctgatccaacagttgctaaacgccacggagctcacgcaggacccggccgcctactcccagctggtggccgtgctggtctacaccgccgagcgggccaagttcgccaccggggtagagcggcaggactggatggagctgttcattgacacctttaagctggtgcacagggacatcgtgggggaccccgagaccgcgctggccctctgctaaagcccgggcacccgcccagccgggctgggccctccctgccacactagcttcccagggctgcccccgacaggctggctctcagtggaggccagagatctggaatcggggtcagcggggctacagtccttccaggggctctggggcagctcccagcctcttcccatgctggtggccaccgtgtcccttgctgcggctgcatcttccagtctctcctccgtcttcctgtggccgctctctttataagaaccctggtcattgaatttaaggcccaccccaagtccagaatgacctcgcaagacccttaactcactccc

SEQ ID NO: 10784 - DNA, 297 bp, Homo sapiens
cgccgccgcccgggccccgcagtcgagggtcgtgagcccaccccgtccatggtgctaagcgggcccgggtcccacacggccagcaccgctgctcactcggacgacgccctgggcctgcacctctccagctcctcccacggggtccccgtagccccggcccccgcccagccccaggtctccccaggccctccgcaggctgcccggcctccctccccctgcagccatcccaaggctcctgacctacctggcccctgagctctggagcaagccctgacccaataaaggctttgaacccat

SEQ ID NO: 10785 - DNA, 708 bp, Homo sapiens
cctggctcatggaacatgggccttgcaaaggggtcaagatcacaaccctgcatccatgtgtgtccgtgggtaccgtaagggctactgggggaagaacctgtaagcagggtgtgaggagcacccaggctgggtagggactgcatgccccatgccacagttgaaggagggagagaacacgctgtgaaaacacagaagctcccagagaagccttctcagcttttatctctggagtagagcagactatgttgagctaacacagacctgctgaatcagcttctttctgagctgccagaagtacagaagttggagcctccaccaccttccagatctgtttctcctcagtgtaatccacctatgggttcttcctgcccactgcacagacaaaaccaattcactgcaattgtggtattgcagtagagaaagagtttaacacagagctagccaagcagaaaggctggagttattattcaactcaatctcccagagaactcagaggctacagtttctacaggcaatttggcaggcaggggctagggaatgcctgctgctgatcggctgcagacggaccatggggtgtcaacgatttttgtcccctgagtccgcctctgcgtggagccacgggatcagctgagtcatgagtctcaggtccaggtggagtctgtaggttgccagaactcaaaagtctgaaaaacatcccaaaagaccatt

SEQ ID NO: 10786 - DNA, 116 bp, Homo sapiens
gggccgcgttccttctgaaagcgggacgcgggaggggtggaggctgcggggagccggggtcgcacacgaataaataacgaatgaacgtacgaggggaacctcctcttatttccttc

SEQ ID NO: 10787 - DNA, 441 bp, Homo sapiens
ataaaatgtcatggctctttcctgcgacaattctatttgaggaaaagatttgtttttcccttttcccaaggaagctcgtgggacagcatgggcactactcttcatgtgcggtgacaccagcccccagatgccttgaattaagtgtcctcacctttatgcatgactgcaaagccagctggagcattttctatggagcctccgtatgttttaggcccatgaccttcgtgaggtgacgggcactcactcccatgagccctggctgtgtgctgttgtgtgcctatcggcagatccatccttcctgcctccaaggaggatacacagagaatggcttcctgttgttttgtttattttcttaacgtgtacagatggaaacttcatttaaaaataaaaacaaaacaactcaaaaaggaataaaatttaatcactgttttgtttgtgaat

SEQ ID NO: 10788 - DNA, 1065 bp, Homo sapiens
gcgcagcacaccggcccaggtgccggagatgaatgagccccagcagtccaaggtgtgatgtgggaagacaccgcagagctcactcaccgggactcgcccttcctgtgctcttacagatccctctcaacaatccccgcatctccttttagaaagcacttcctgaattatttaaagaaatattttgaatctgccaagtacatttacaaaaacacggatgctggtattttaacagatggagagacaaggaaaggaaaggaaaggcctggcatgggcattgtgaggaatcacaggcaccgaggttgttctctgctgtactgcaagtttgcactttctttaggctaaaaatatagttcctgatttttaaaattcagttatttattcccacttcaaatgacaagttcatatatagaatttacgggagaaacttgagaccatttacggggagaaacttgattctgggaagatagcagagtacaaaccagctgcctcacttctgtttcacagggaggctgatggaaaaaggaagcaagctggacccatcctccctgctcacagagggcactgtggtcacacacagtgcctcctctgccagttcctttattgaaagaggtgtgctggctggccacggtggcttacacctgtaatcccagcactttgggaggccgaggcgagcagatcacgaggtcaggagaccgagaccatcctggctaacatggtgaaaccctgtctctactaaaaatacaaaaaattagccgggtgtggtggtgggcgcctgtagtcccagctacttgggaggctgaggcaggagaatggtatgaaccagggaggcggagcttgcagtgagccgagatcacgctactgcactccagcctgggtgacagcacgagatgccgtcttaaaaaaacaaaaaagaggtgtgctgcttgtcagcatgtattgtcacggacactcaataagtgccattttggactgtcaaatttagatgctttgtttcagaaagataagccagcatttagttttaaatcactttcctggtttgtaacttgatgctgtttagttaaattg

SEQ ID NO: 10789 - DNA, 298 bp, Homo sapiens
ggggtgtggctaagggacacctcgttgcagccccacccttgtcctggccgttcctgacctcccatgtggccttggtcggtggcgctgacctccctgcccatcaccctacctgtgtgcagggccatccacacctccgagactggtgcacagtcctgcacacaggcctgagtcgggggtccccggggtggatgaggatgttttgctttttatatggagtggcaggtttgtgagtattcattatatcattctttaccattttggatgtctaaactattcaaaaataaatgcttctatttgt

SEQ ID NO: 10790 - DNA, 191 bp, Homo sapiens
atctcccaagctggcacccccactccactccaagtgccaagtggttggcttgtcccgcccggtcctccctggctccagctttgtttatctgtatttttcattgcaaattgacaaattacagctgtatgtatttacgggatacaaagtgatgttataatttatgaatacaatatagaataattaatatatcc

SEQ ID NO: 10791 - DNA, 160 bp, Homo sapiens
tgcgctgcggacccccacgccgggagtagattccttcatttgcagctcgggaagtctttgtgcagtagatggaaagcccagcaaacttgaattcacaaagcctaaaaattgttgtacatcagaaaactcctaaagtaaaaggaaaatatttgcagcaatg

SEQ ID NO: 10792 - DNA, 162 bp, Homo sapiens
gtatagctcccccttccccttctgggaaagaattatgttctttccaaccctgccacatgttcatatatcctaaatctatcctaaatgttccttgaagtatttatttatgtttatatatgtttatatatgttcttcataaatctattacatatatatagataa

SEQ ID NO: 10793 - DNA, 528 bp, Homo sapiens
cgatgtgcattttgtaagcactttggagccactatcaaatgctgtgaagagaaatgtacccagatgtatcattatccttgtgctgcaggagccgacacctttcaggatttcagtcacatcttcctgctttgtccagaacacattgaccaagctcctgaaagatgtaagtttactacgcatagacttttaaacttcaaccaatgtgtttactgaaaataacaaatgttgtaaattccctgagtgttattctacttgtattaaaaggtaataatacataatctttaaaatctgagggatcattgccagagattgttgcggagggaaatgttatcaacggtttcattgaaattaaatccaaaaagttatttcctcagaaaaatcaaataaagtttgcatgttttttattcttaaaacattttaaaaaccactgtagaaagatgtaaatagggactgtgcagtatttctgacttatactataaaattattaaaaagtcaatcagtattcaacatcttttacactaaaaagcc

SEQ ID NO: 10794 - DNA, 76 bp, Homo sapiens
gatatgtgtgtagtttgtggcagttttggccaaggagcagaaggaagactacttgcctgttctcagtgtggtcagt

SEQ ID NO: 10795 - DNA, 290 bp, Homo sapiens
aggagcctcacccctgcctcaccctggactaaggcactggagaactcttgctctgcagagccgcggactcttgcaggagagaacctgcgcccagccgtgccctggactgtggcacagcagggcccacaccgcgccatggactcctgtactggaggaagagtagtgacaaatgtccaggtttacaagttgaaaagtagcaatcaatgtgttacaatggatggatttgatgtaaaattacaaatgctgaaaacattatgtgtaattgcctagccagatcaattacacaagac

SEQ ID NO: 10796 - DNA, 177 bp, Homo sapiens
gatgccttcttccatcaaatgcacttgcttgtgaattaatggacttgtaaatgaaacaatgcaatcagtcttttataatgcactgttcaatttgagattcaagtatttctatttcttggaaaaaattttaagaatcaaaaataaagaaaataaaaaatgcatacagttaaacattcc
